United States Patent Application Publication US 2006/0046253 A1 - sequence listing, part 6

SEQ ID NO: 59118 - DNA, 25 bp, Saccharomyces pastorianus
gttatgataacttggctgctcttgc

SEQ ID NO: 59119 - DNA, 25 bp, Saccharomyces pastorianus
gagcctcatgctgataatgggccta

SEQ ID NO: 59120 - DNA, 25 bp, Saccharomyces pastorianus
tactggcttggatctcggtggaata

SEQ ID NO: 59121 - DNA, 25 bp, Saccharomyces pastorianus
gggcagacgctgatttacaccacat

SEQ ID NO: 59122 - DNA, 25 bp, Saccharomyces pastorianus
gttagatcgtttttgctatctcacg

SEQ ID NO: 59123 - DNA, 25 bp, Saccharomyces pastorianus
gtggctacagtcaccggcgacaaaa

SEQ ID NO: 59124 - DNA, 25 bp, Saccharomyces pastorianus
gtgaaagaacttcctcttggttgat

SEQ ID NO: 59125 - DNA, 25 bp, Saccharomyces pastorianus
acaatatctgttgccgaattcggtt

SEQ ID NO: 59126 - DNA, 25 bp, Saccharomyces pastorianus
aagtccgcttattcatcagacgtgg

SEQ ID NO: 59127 - DNA, 25 bp, Saccharomyces pastorianus
agtcctggatcacttcaatcacgaa

SEQ ID NO: 59128 - DNA, 25 bp, Saccharomyces pastorianus
gatatttcttccacaaaagtccgct

SEQ ID NO: 59129 - DNA, 25 bp, Saccharomyces pastorianus
ttggctccatcttaccgtagggtgc

SEQ ID NO: 59130 - DNA, 25 bp, Saccharomyces pastorianus
agcgtactggctctgatgttagatc

SEQ ID NO: 59131 - DNA, 25 bp, Saccharomyces pastorianus
gaagtcattggtggctactactccc

SEQ ID NO: 59132 - DNA, 25 bp, Saccharomyces pastorianus
atatgcttccctctcaaaattctga

SEQ ID NO: 59133 - DNA, 25 bp, Saccharomyces pastorianus
tagttctttaaaatctccaccgcct

SEQ ID NO: 59134 - DNA, 25 bp, Saccharomyces pastorianus
atatcgtcaactcccctaagtgcga

SEQ ID NO: 59135 - DNA, 25 bp, Saccharomyces pastorianus
gacggagcttcttctaatagtgaca

SEQ ID NO: 59136 - DNA, 25 bp, Saccharomyces pastorianus
aaatttggaggcaagcgcatcgacc

SEQ ID NO: 59137 - DNA, 25 bp, Saccharomyces pastorianus
gagaatctacgctgcatcacaagca

SEQ ID NO: 59138 - DNA, 25 bp, Saccharomyces pastorianus
tagaccacgtccatttcaagccaaa

SEQ ID NO: 59139 - DNA, 25 bp, Saccharomyces pastorianus
gccggctgcatctttattacatgat

SEQ ID NO: 59140 - DNA, 25 bp, Saccharomyces pastorianus
taatgcctcacaaatgcctagacca

SEQ ID NO: 59141 - DNA, 25 bp, Saccharomyces pastorianus
aataagaatattgcgccggctgcat

SEQ ID NO: 59142 - DNA, 25 bp, Saccharomyces pastorianus
gaccacatttcctggtcgtacggaa

SEQ ID NO: 59143 - DNA, 25 bp, Saccharomyces pastorianus
acgctccaaagccagcaaactctgt

SEQ ID NO: 59144 - DNA, 25 bp, Saccharomyces pastorianus
aaactctgtcatgcagggccgtgat

SEQ ID NO: 59145 - DNA, 25 bp, Saccharomyces pastorianus
taggaggtggtgtcgtctcatcaac

SEQ ID NO: 59146 - DNA, 25 bp, Saccharomyces pastorianus
ggtgtcgtctcatcaacatctggga

SEQ ID NO: 59147 - DNA, 25 bp, Saccharomyces pastorianus
atgggtggtggcaacgctccaaagc

SEQ ID NO: 59148 - DNA, 25 bp, Saccharomyces pastorianus
atcaacatctgggagctctggtgcc

SEQ ID NO: 59149 - DNA, 25 bp, Saccharomyces pastorianus
atgatagaagtgctccaactgtagg

SEQ ID NO: 59150 - DNA, 25 bp, Saccharomyces pastorianus
ctcctccgccaacaatgggtggtgg

SEQ ID NO: 59151 - DNA, 25 bp, Saccharomyces pastorianus
atggttagtgctccagctcctcctc

SEQ ID NO: 59152 - DNA, 25 bp, Saccharomyces pastorianus
gccgtgatgcccttttaggtgacat

SEQ ID NO: 59153 - DNA, 25 bp, Saccharomyces pastorianus
ctctggtgccctcaacaacaataga

SEQ ID NO: 59154 - DNA, 25 bp, Saccharomyces pastorianus
ggcaccagagctcccagatgttgat

SEQ ID NO: 59155 - DNA, 25 bp, Saccharomyces pastorianus
acagagtttgctggctttggagcgt

SEQ ID NO: 59156 - DNA, 25 bp, Saccharomyces pastorianus
gtctattgttgttgagggcaccaga

SEQ ID NO: 59157 - DNA, 25 bp, Saccharomyces pastorianus
attccaccagccaaaataccacttt

SEQ ID NO: 59158 - DNA, 25 bp, Saccharomyces pastorianus
caccacccattgttggcggaggagg

SEQ ID NO: 59159 - DNA, 25 bp, Saccharomyces pastorianus
atcacggccctgcatgacagagttt

SEQ ID NO: 59160 - DNA, 25 bp, Saccharomyces pastorianus
cctacagttggagcacttctatcat

SEQ ID NO: 59161 - DNA, 25 bp, Saccharomyces pastorianus
ctatcattagtctctgcttttttca

SEQ ID NO: 59162 - DNA, 25 bp, Saccharomyces pastorianus
atgttgatgagacgacaccacctcc

SEQ ID NO: 59163 - DNA, 25 bp, Saccharomyces pastorianus
catgtttcagcttaggtattccacc

SEQ ID NO: 59164 - DNA, 25 bp, Saccharomyces pastorianus
ttttcagtctcattccttttctaat

SEQ ID NO: 59165 - DNA, 25 bp, Saccharomyces pastorianus
cataacgtccttgatttcgttcaag

SEQ ID NO: 59166 - DNA, 25 bp, Saccharomyces pastorianus
gcagcaactctcttggaaaccataa

SEQ ID NO: 59167 - DNA, 25 bp, Saccharomyces pastorianus
accataacgtccttgatttcgttca

SEQ ID NO: 59168 - DNA, 25 bp, Saccharomyces pastorianus
gattcgttagtgaaaatgaaaccca

SEQ ID NO: 59169 - DNA, 25 bp, Saccharomyces pastorianus
gatttcgttcaaggattcgttagtg

SEQ ID NO: 59170 - DNA, 25 bp, Saccharomyces pastorianus
gaaaccataacgtccttgatttcgt

SEQ ID NO: 59171 - DNA, 25 bp, Saccharomyces pastorianus
ttggaaaccataacgtccttgattt

SEQ ID NO: 59172 - DNA, 25 bp, Saccharomyces pastorianus
gggcagcaactctcttggaaaccat

SEQ ID NO: 59173 - DNA, 25 bp, Saccharomyces pastorianus
gcaactctcttggaaaccataacgt

SEQ ID NO: 59174 - DNA, 25 bp, Saccharomyces pastorianus
tctcttggaaaccataacgtccttg

SEQ ID NO: 59175 - DNA, 25 bp, Saccharomyces pastorianus
ttcgttcaaggattcgttagtgaaa

SEQ ID NO: 59176 - DNA, 25 bp, Saccharomyces pastorianus
agcaaagtattcagctttcttttca

SEQ ID NO: 59177 - DNA, 25 bp, Saccharomyces pastorianus
gtattctctcaacttagcaaagtat

SEQ ID NO: 59178 - DNA, 25 bp, Saccharomyces pastorianus
ccaagtattctctcaacttagcaaa

SEQ ID NO: 59179 - DNA, 25 bp, Saccharomyces pastorianus
attcttccaagtattctctcaactt

SEQ ID NO: 59180 - DNA, 25 bp, Saccharomyces pastorianus
ttgtattcttccaagtattctctca

SEQ ID NO: 59181 - DNA, 25 bp, Saccharomyces pastorianus
tctctcaacttagcaaagtattcag

SEQ ID NO: 59182 - DNA, 25 bp, Saccharomyces pastorianus
ttccaagtattctctcaacttagca

SEQ ID NO: 59183 - DNA, 25 bp, Saccharomyces pastorianus
tcttccaagtattctctcaacttag

SEQ ID NO: 59184 - DNA, 25 bp, Saccharomyces pastorianus
aacttagcaaagtattcagctttct

SEQ ID NO: 59185 - DNA, 25 bp, Saccharomyces pastorianus
gtattcttccaagtattctctcaac

SEQ ID NO: 59186 - DNA, 25 bp, Saccharomyces pastorianus
aagtattctctcaacttagcaaagt

SEQ ID NO: 59187 - DNA, 25 bp, Saccharomyces pastorianus
gactaatcttccactgtatgacagc

SEQ ID NO: 59188 - DNA, 25 bp, Saccharomyces pastorianus
gttccaaactgactggtactttcca

SEQ ID NO: 59189 - DNA, 25 bp, Saccharomyces pastorianus
agttaccatttattattatcccagg

SEQ ID NO: 59190 - DNA, 25 bp, Saccharomyces pastorianus
aacacgcttgcgtaaacgtatggtc

SEQ ID NO: 59191 - DNA, 25 bp, Saccharomyces pastorianus
gcgatcttaatttgccagttaccat

SEQ ID NO: 59192 - DNA, 25 bp, Saccharomyces pastorianus
aattcgtccaccaatttattctttg

SEQ ID NO: 59193 - DNA, 25 bp, Saccharomyces pastorianus
gttaaagccttctcgccaaattcgt

SEQ ID NO: 59194 - DNA, 25 bp, Saccharomyces pastorianus
caatacggctttctggactggtaaa

SEQ ID NO: 59195 - DNA, 25 bp, Saccharomyces pastorianus
ctgtggcttcgtctcacgttaaaaa

SEQ ID NO: 59196 - DNA, 25 bp, Saccharomyces pastorianus
agcattaatgctgactcgtgagttc

SEQ ID NO: 59197 - DNA, 25 bp, Saccharomyces pastorianus
tacatggcttggactcagccagcta

SEQ ID NO: 59198 - DNA, 25 bp, Saccharomyces pastorianus
ttgaacccagggagtatcgccgatc

SEQ ID NO: 59199 - DNA, 25 bp, Saccharomyces pastorianus
atatcatttccgattccccagagcg

SEQ ID NO: 59200 - DNA, 25 bp, Saccharomyces pastorianus
ttagctgttcgtatggaaccattgt

SEQ ID NO: 59201 - DNA, 25 bp, Saccharomyces pastorianus
gaaatttcatttagccccttttgca

SEQ ID NO: 59202 - DNA, 25 bp, Saccharomyces pastorianus
gaaaaagaacccacgacactggcct

SEQ ID NO: 59203 - DNA, 25 bp, Saccharomyces pastorianus
tatccttcggaatatgcagaatcat

SEQ ID NO: 59204 - DNA, 25 bp, Saccharomyces pastorianus
aatggcttgtacttgcgttgaacta

SEQ ID NO: 59205 - DNA, 25 bp, Saccharomyces pastorianus
atcgccgatctcactgatgaccaaa

SEQ ID NO: 59206 - DNA, 25 bp, Saccharomyces pastorianus
aaggatatcctcattattgctcatg

SEQ ID NO: 59207 - DNA, 25 bp, Saccharomyces pastorianus
ggagtcttaccacgacttagctgtt

SEQ ID NO: 59208 - DNA, 25 bp, Saccharomyces pastorianus
ttgcgttgaactaccaaacttggac

SEQ ID NO: 59209 - DNA, 25 bp, Saccharomyces pastorianus
atttctgcgtagttccaaagtcaaa

SEQ ID NO: 59210 - DNA, 25 bp, Saccharomyces pastorianus
aatatagcgctcgtattgcagtcga

SEQ ID NO: 59211 - DNA, 25 bp, Saccharomyces pastorianus
aaatccgccaaagatgtaccttctg

SEQ ID NO: 59212 - DNA, 25 bp, Saccharomyces pastorianus
accttctaccacaacaggatctgta

SEQ ID NO: 59213 - DNA, 25 bp, Saccharomyces pastorianus
atatatcccctggacaactttactc

SEQ ID NO: 59214 - DNA, 25 bp, Saccharomyces pastorianus
ggactcaggtaatctatttcacgct

SEQ ID NO: 59215 - DNA, 25 bp, Saccharomyces pastorianus
gaagaattctcgtcgtcctcgttgg

SEQ ID NO: 59216 - DNA, 25 bp, Saccharomyces pastorianus
atgtaccttctgattatttctgcgt

SEQ ID NO: 59217 - DNA, 25 bp, Saccharomyces pastorianus
gcaaccttctgtgaaatcggtgtta

SEQ ID NO: 59218 - DNA, 25 bp, Saccharomyces pastorianus
gcacttctggtcaactggccattta

SEQ ID NO: 59219 - DNA, 25 bp, Saccharomyces pastorianus
acaactttactccacggactcaggt

SEQ ID NO: 59220 - DNA, 25 bp, Saccharomyces pastorianus
gctacagtgtcagtggcgtattcta

SEQ ID NO: 59221 - DNA, 25 bp, Saccharomyces pastorianus
agtggcgtattctaccatcgtggtt

SEQ ID NO: 59222 - DNA, 25 bp, Saccharomyces pastorianus
gaactcgttgtctgctctattggct

SEQ ID NO: 59223 - DNA, 25 bp, Saccharomyces pastorianus
gtgtcagtggcgtattctaccatcg

SEQ ID NO: 59224 - DNA, 25 bp, Saccharomyces pastorianus
atgtttcagctacagtgtcagtggc

SEQ ID NO: 59225 - DNA, 25 bp, Saccharomyces pastorianus
gcagatgtttcagctacagtgtcag

SEQ ID NO: 59226 - DNA, 25 bp, Saccharomyces pastorianus
atggaagcagatgtttcagctacag

SEQ ID NO: 59227 - DNA, 25 bp, Saccharomyces pastorianus
gcattgaactcgttgtctgctctat

SEQ ID NO: 59228 - DNA, 25 bp, Saccharomyces pastorianus
aaagcagaggcacgagcattgaact

SEQ ID NO: 59229 - DNA, 25 bp, Saccharomyces pastorianus
ggcgtattctaccatcgtggttaaa

SEQ ID NO: 59230 - DNA, 25 bp, Saccharomyces pastorianus
tctaccatcgtggttaaagcggaaa

SEQ ID NO: 59231 - DNA, 25 bp, Saccharomyces pastorianus
ggatgcaaaatgactctgccttgga

SEQ ID NO: 59232 - DNA, 25 bp, Saccharomyces pastorianus
agaactatctggtcacgaagctcga

SEQ ID NO: 59233 - DNA, 25 bp, Saccharomyces pastorianus
gtgtttacaggatataccgccatga

SEQ ID NO: 59234 - DNA, 25 bp, Saccharomyces pastorianus
agactgggtcccttcacggtgttga

SEQ ID NO: 59235 - DNA, 25 bp, Saccharomyces pastorianus
gggaactttgcagacgtcgtgaaca

SEQ ID NO: 59236 - DNA, 25 bp, Saccharomyces pastorianus
gacgttgttcactgggtggaagccc

SEQ ID NO: 59237 - DNA, 25 bp, Saccharomyces pastorianus
gtaattccgcaggaccaggtgacca

SEQ ID NO: 59238 - DNA, 25 bp, Saccharomyces pastorianus
gctttgaagatcctggccgatgcca

SEQ ID NO: 59239 - DNA, 25 bp, Saccharomyces pastorianus
gtgttcgccggcagacgttatgaag

SEQ ID NO: 59240 - DNA, 25 bp, Saccharomyces pastorianus
ggtgaccaacatggcgtatctactg

SEQ ID NO: 59241 - DNA, 25 bp, Saccharomyces pastorianus
atgaaggcgggctcaagacgttgtt

SEQ ID NO: 59242 - DNA, 25 bp, Saccharomyces pastorianus
gcatcgaccattatatttcctaaat

SEQ ID NO: 59243 - DNA, 25 bp, Saccharomyces pastorianus
tcctaaattacctcttgacgcttgt

SEQ ID NO: 59244 - DNA, 25 bp, Saccharomyces pastorianus
ctaaattacctcttgacgcttgtga

SEQ ID NO: 59245 - DNA, 25 bp, Saccharomyces pastorianus
gaatgatgaagcagcatcgaccatt

SEQ ID NO: 59246 - DNA, 25 bp, Saccharomyces pastorianus
tttcctaaattacctcttgacgctt

SEQ ID NO: 59247 - DNA, 25 bp, Saccharomyces pastorianus
aagcagcatcgaccattatatttcc

SEQ ID NO: 59248 - DNA, 25 bp, Saccharomyces pastorianus
gcagcatcgaccattatatttccta

SEQ ID NO: 59249 - DNA, 25 bp, Saccharomyces pastorianus
aaattacctcttgacgcttgtgatg

SEQ ID NO: 59250 - DNA, 25 bp, Saccharomyces pastorianus
tgaagcagcatcgaccattatattt

SEQ ID NO: 59251 - DNA, 25 bp, Saccharomyces pastorianus
taggtaagacgaatgatgaagcagc

SEQ ID NO: 59252 - DNA, 25 bp, Saccharomyces pastorianus
attacctcttgacgcttgtgatgtt

SEQ ID NO: 59253 - DNA, 25 bp, Saccharomyces pastorianus
ttcttttcttgttggtgccggacca

SEQ ID NO: 59254 - DNA, 25 bp, Saccharomyces pastorianus
gactgttctaaacgtgggtcacctg

SEQ ID NO: 59255 - DNA, 25 bp, Saccharomyces pastorianus
taaacgtgggtcacctgagtttatt

SEQ ID NO: 59256 - DNA, 25 bp, Saccharomyces pastorianus
ttttcgatggtttcctccacttcct

SEQ ID NO: 59257 - DNA, 25 bp, Saccharomyces pastorianus
cataatatttcacctttcgtctttt

SEQ ID NO: 59258 - DNA, 25 bp, Saccharomyces pastorianus
catttactattacactgggacccct

SEQ ID NO: 59259 - DNA, 25 bp, Saccharomyces pastorianus
tattacactgggacccctaaaccat

SEQ ID NO: 59260 - DNA, 25 bp, Saccharomyces pastorianus
ctccacttcctcgtattctagtttt

SEQ ID NO: 59261 - DNA, 25 bp, Saccharomyces pastorianus
cactgggacccctaaaccataatat

SEQ ID NO: 59262 - DNA, 25 bp, Saccharomyces pastorianus
gaccatctgttcaacgactgttcta

SEQ ID NO: 59263 - DNA, 25 bp, Saccharomyces pastorianus
tggtgccggaccatctgttcaacga

SEQ ID NO: 59264 - DNA, 25 bp, Saccharomyces pastorianus
gacctattacggtgcttctcaggaa

SEQ ID NO: 59265 - DNA, 25 bp, Saccharomyces pastorianus
gaaataccctcttgggctacacaag

SEQ ID NO: 59266 - DNA, 25 bp, Saccharomyces pastorianus
agaagtcgtcaaacaatccgccact

SEQ ID NO: 59267 - DNA, 25 bp, Saccharomyces pastorianus
atacagacccacagctcttgaatta

SEQ ID NO: 59268 - DNA, 25 bp, Saccharomyces pastorianus
catgttaaacaactatggcccattt

SEQ ID NO: 59269 - DNA, 25 bp, Saccharomyces pastorianus
aatccgccactactgctaaagcaga

SEQ ID NO: 59270 - DNA, 25 bp, Saccharomyces pastorianus
gggctcagttttttggatgtcacca

SEQ ID NO: 59271 - DNA, 25 bp, Saccharomyces pastorianus
tatctttctcgaatacgttcctgga

SEQ ID NO: 59272 - DNA, 25 bp, Saccharomyces pastorianus
atatggtccactggttgtgttgtta

SEQ ID NO: 59273 - DNA, 25 bp, Saccharomyces pastorianus
gaggttcggtttcatccatgttaaa

SEQ ID NO: 59274 - DNA, 25 bp, Saccharomyces pastorianus
aagagcttctttgcagggctcagtt

SEQ ID NO: 59275 - DNA, 25 bp, Saccharomyces pastorianus
ttcgtcgaacttactctctcaaaac

SEQ ID NO: 59276 - DNA, 25 bp, Saccharomyces pastorianus
ggcactattgcagggtttggaccaa

SEQ ID NO: 59277 - DNA, 25 bp, Saccharomyces pastorianus
gttaaagcactcgaatgccgtggat

SEQ ID NO: 59278 - DNA, 25 bp, Saccharomyces pastorianus
aaaacagacctttgagcgccgaatc

SEQ ID NO: 59279 - DNA, 25 bp, Saccharomyces pastorianus
caaggccatatccacatccaagaaa

SEQ ID NO: 59280 - DNA, 25 bp, Saccharomyces pastorianus
atcagactccaagtgacaaggccat

SEQ ID NO: 59281 - DNA, 25 bp, Saccharomyces pastorianus
gttaatctcaaccaacttagcaggg

SEQ ID NO: 59282 - DNA, 25 bp, Saccharomyces pastorianus
aaccaagtagggtcatcttcgtcga

SEQ ID NO: 59283 - DNA, 25 bp, Saccharomyces pastorianus
agggtacttccctcatacagacatg

SEQ ID NO: 59284 - DNA, 25 bp, Saccharomyces pastorianus
atcgtttcgtcattcagctatgcta

SEQ ID NO: 59285 - DNA, 25 bp, Saccharomyces pastorianus
taagctcgacacaaccaaaattccg

SEQ ID NO: 59286 - DNA, 25 bp, Saccharomyces pastorianus
aagaaagagctcctctcttacggaa

SEQ ID NO: 59287 - DNA, 25 bp, Saccharomyces pastorianus
aacttaaggaaagctgctccgttgc

SEQ ID NO: 59288 - DNA, 25 bp, Saccharomyces pastorianus
cccacgtagggttacaaagaagcag

SEQ ID NO: 59289 - DNA, 25 bp, Saccharomyces pastorianus
tgctccgttgcaattgaaatctaaa

SEQ ID NO: 59290 - DNA, 25 bp, Saccharomyces pastorianus
aaagtcggccacttggagctgttga

SEQ ID NO: 59291 - DNA, 25 bp, Saccharomyces pastorianus
caaaagccgcttaaagtcactaaga

SEQ ID NO: 59292 - DNA, 25 bp, Saccharomyces pastorianus
agagctcctctcttacggaaactac

SEQ ID NO: 59293 - DNA, 25 bp, Saccharomyces pastorianus
ttggttgcaagtaaagtcggccact

SEQ ID NO: 59294 - DNA, 25 bp, Saccharomyces pastorianus
aggaaagctgctccgttgcaattga

SEQ ID NO: 59295 - DNA, 25 bp, Saccharomyces pastorianus
gaaactaccgaaagattggttgcaa

SEQ ID NO: 59296 - DNA, 25 bp, Saccharomyces pastorianus
taagaaagtcaaagacccacgtagg

SEQ ID NO: 59297 - DNA, 25 bp, Saccharomyces pastorianus
tcaagttttgttgagaccttcttcc

SEQ ID NO: 59298 - DNA, 25 bp, Saccharomyces pastorianus
tctgttttagccgacgctttaaatg

SEQ ID NO: 59299 - DNA, 25 bp, Saccharomyces pastorianus
tgttttagccgacgctttaaatgcc

SEQ ID NO: 59300 - DNA, 25 bp, Saccharomyces pastorianus
aagcgtcaagttttgttgagacctt

SEQ ID NO: 59301 - DNA, 25 bp, Saccharomyces pastorianus
tgacccgttcttctgttttagccga

SEQ ID NO: 59302 - DNA, 25 bp, Saccharomyces pastorianus
ttagccgacgctttaaatgccatta

SEQ ID NO: 59303 - DNA, 25 bp, Saccharomyces pastorianus
tcttctgttttagccgacgctttaa

SEQ ID NO: 59304 - DNA, 25 bp, Saccharomyces pastorianus
cgacgctttaaatgccattaacaac

SEQ ID NO: 59305 - DNA, 25 bp, Saccharomyces pastorianus
gttcttctgttttagccgacgcttt

SEQ ID NO: 59306 - DNA, 25 bp, Saccharomyces pastorianus
gccgacgctttaaatgccattaaca

SEQ ID NO: 59307 - DNA, 25 bp, Saccharomyces pastorianus
atgacccgttcttctgttttagccg

SEQ ID NO: 59308 - DNA, 25 bp, Saccharomyces pastorianus
aaatcgggtacttcttccaggatat

SEQ ID NO: 59309 - DNA, 25 bp, Saccharomyces pastorianus
gaaacccaggataccttatgtgctt

SEQ ID NO: 59310 - DNA, 25 bp, Saccharomyces pastorianus
gagactacgtccttttagatgatga

SEQ ID NO: 59311 - DNA, 25 bp, Saccharomyces pastorianus
ggtctctttttcaaaggctacgaca

SEQ ID NO: 59312 - DNA, 25 bp, Saccharomyces pastorianus
attggacagaatgcccttgaagaac

SEQ ID NO: 59313 - DNA, 25 bp, Saccharomyces pastorianus
gtgaattactacgatgcaagcccag

SEQ ID NO: 59314 - DNA, 25 bp, Saccharomyces pastorianus
tttccccagtggttccacgaactga

SEQ ID NO: 59315 - DNA, 25 bp, Saccharomyces pastorianus
gagaatgcaactcagcgcttacaca

SEQ ID NO: 59316 - DNA, 25 bp, Saccharomyces pastorianus
ggatgtaaccatgtactttgcattc

SEQ ID NO: 59317 - DNA, 25 bp, Saccharomyces pastorianus
gggctgatgccctttcgaggagatt

SEQ ID NO: 59318 - DNA, 25 bp, Saccharomyces pastorianus
gtgatataagagtccgcctagcaga

SEQ ID NO: 59319 - DNA, 25 bp, Saccharomyces pastorianus
gtcatggcctgttctggtccatctg

SEQ ID NO: 59320 - DNA, 25 bp, Saccharomyces pastorianus
tgctgcctatggttatttgatctta

SEQ ID NO: 59321 - DNA, 25 bp, Saccharomyces pastorianus
aattgatgggtcgtacttccgttga

SEQ ID NO: 59322 - DNA, 25 bp, Saccharomyces pastorianus
ggtccatctgttccgaagaagcctt

SEQ ID NO: 59323 - DNA, 25 bp, Saccharomyces pastorianus
atggtacacaggatgctgctgccta

SEQ ID NO: 59324 - DNA, 25 bp, Saccharomyces pastorianus
caagtactttagtcgtatcttacca

SEQ ID NO: 59325 - DNA, 25 bp, Saccharomyces pastorianus
ggttccgttggatctggttcttcta

SEQ ID NO: 59326 - DNA, 25 bp, Saccharomyces pastorianus
gaagctactgtttctacacacttat

SEQ ID NO: 59327 - DNA, 25 bp, Saccharomyces pastorianus
gggtcaccagattccaaatcatcca

SEQ ID NO: 59328 - DNA, 25 bp, Saccharomyces pastorianus
gaatccgaagtatctggttccgttg

SEQ ID NO: 59329 - DNA, 25 bp, Saccharomyces pastorianus
gtacttccgttgaatgggttccaat

SEQ ID NO: 59330 - DNA, 25 bp, Saccharomyces pastorianus
gctatcggaatcatcgtcgtctatt

SEQ ID NO: 59331 - DNA, 25 bp, Saccharomyces pastorianus
ggctaacgggtaccatgctatcgga

SEQ ID NO: 59332 - DNA, 25 bp, Saccharomyces pastorianus
gccgatcttctccaaggtttttgaa

SEQ ID NO: 59333 - DNA, 25 bp, Saccharomyces pastorianus
ctgcggaccagttccaggctttgaa

SEQ ID NO: 59334 - DNA, 25 bp, Saccharomyces pastorianus
ggctatccagccgaacaatttgagt

SEQ ID NO: 59335 - DNA, 25 bp, Saccharomyces pastorianus
gttatcttcggtggtcaagctatct

SEQ ID NO: 59336 - DNA, 25 bp, Saccharomyces pastorianus
aaagtttcatattccttccatcgaa

SEQ ID NO: 59337 - DNA, 25 bp, Saccharomyces pastorianus
ggtattgaattgtggccgatcttct

SEQ ID NO: 59338 - DNA, 25 bp, Saccharomyces pastorianus
gaactcttcctcattgggtttctta

SEQ ID NO: 59339 - DNA, 25 bp, Saccharomyces pastorianus
atgaatactactacctctgctgtcg

SEQ ID NO: 59340 - DNA, 25 bp, Saccharomyces pastorianus
gtcgtctattacatcgttatcttcg

SEQ ID NO: 59341 - DNA, 25 bp, Saccharomyces pastorianus
gctactgggatcaacaatcaataaa

SEQ ID NO: 59342 - DNA, 25 bp, Saccharomyces pastorianus
aatggcgcaattattggtcgcccgg

SEQ ID NO: 59343 - DNA, 25 bp, Saccharomyces pastorianus
atggcgcaattattggtcgcccggt

SEQ ID NO: 59344 - DNA, 25 bp, Saccharomyces pastorianus
gcgctactgggatcaacaatcaata

SEQ ID NO: 59345 - DNA, 25 bp, Saccharomyces pastorianus
cacggtcgcgcagcgctactgggat

SEQ ID NO: 59346 - DNA, 25 bp, Saccharomyces pastorianus
gcgcagcgctactgggatcaacaat

SEQ ID NO: 59347 - DNA, 25 bp, Saccharomyces pastorianus
gcgcaattattggtcgcccggtcac

SEQ ID NO: 59348 - DNA, 25 bp, Saccharomyces pastorianus
cagcgctactgggatcaacaatcaa

SEQ ID NO: 59349 - DNA, 25 bp, Saccharomyces pastorianus
gtcgcgcagcgctactgggatcaac

SEQ ID NO: 59350 - DNA, 25 bp, Saccharomyces pastorianus
gcaattattggtcgcccggtcacct

SEQ ID NO: 59351 - DNA, 25 bp, Saccharomyces pastorianus
cgcagcgctactgggatcaacaatc

SEQ ID NO: 59352 - DNA, 25 bp, Saccharomyces pastorianus
ggacgaggcctcaccattgtactgc

SEQ ID NO: 59353 - DNA, 25 bp, Saccharomyces pastorianus
acgtaacgtggttcatagcgctatt

SEQ ID NO: 59354 - DNA, 25 bp, Saccharomyces pastorianus
aacgtaacgtggttcatagcgctat

SEQ ID NO: 59355 - DNA, 25 bp, Saccharomyces pastorianus
tcaccattgtactgcctctcggctg

SEQ ID NO: 59356 - DNA, 25 bp, Saccharomyces pastorianus
gcaacgtaacgtggttcatagcgct

SEQ ID NO: 59357 - DNA, 25 bp, Saccharomyces pastorianus
gaggcctcaccattgtactgcctct

SEQ ID NO: 59358 - DNA, 25 bp, Saccharomyces pastorianus
tcatgttgggcagggccgggtgggc

SEQ ID NO: 59359 - DNA, 25 bp, Saccharomyces pastorianus
ggcggacgaggcctcaccattgtac

SEQ ID NO: 59360 - DNA, 25 bp, Saccharomyces pastorianus
tgaggcggacgaggcctcaccattg

SEQ ID NO: 59361 - DNA, 25 bp, Saccharomyces pastorianus
attgtactgcctctcggctgccttg

SEQ ID NO: 59362 - DNA, 25 bp, Saccharomyces pastorianus
gtaacgtggttcatagcgctattgt

SEQ ID NO: 59363 - DNA, 25 bp, Saccharomyces pastorianus
ggacgaggcctcaccattgtactgc

SEQ ID NO: 59364 - DNA, 25 bp, Saccharomyces pastorianus
acgtaacgtggttcatagcgctatt

SEQ ID NO: 59365 - DNA, 25 bp, Saccharomyces pastorianus
tcaccattgtactgcctctcggctg

SEQ ID NO: 59366 - DNA, 25 bp, Saccharomyces pastorianus
attgtttgcattactcatcgctcgc

SEQ ID NO: 59367 - DNA, 25 bp, Saccharomyces pastorianus
gcaacgtaacgtggttcatagcgct

SEQ ID NO: 59368 - DNA, 25 bp, Saccharomyces pastorianus
gaggcctcaccattgtactgcctct

SEQ ID NO: 59369 - DNA, 25 bp, Saccharomyces pastorianus
tcatgttgggcagggccgggtgggc

SEQ ID NO: 59370 - DNA, 25 bp, Saccharomyces pastorianus
ggcggacgaggcctcaccattgtac

SEQ ID NO: 59371 - DNA, 25 bp, Saccharomyces pastorianus
ggctgccttgataaggttgtcgaat

SEQ ID NO: 59372 - DNA, 25 bp, Saccharomyces pastorianus
attgtactgcctctcggctgccttg

SEQ ID NO: 59373 - DNA, 25 bp, Saccharomyces pastorianus
gtaacgtggttcatagcgctattgt

SEQ ID NO: 59374 - DNA, 25 bp, Saccharomyces pastorianus
ctgactacacacaaggctacgcatt

SEQ ID NO: 59375 - DNA, 25 bp, Saccharomyces pastorianus
gcacaattgaagtcgctgcaccaga

SEQ ID NO: 59376 - DNA, 25 bp, Saccharomyces pastorianus
ggcgtgttctcacgttgtgacacat

SEQ ID NO: 59377 - DNA, 25 bp, Saccharomyces pastorianus
aacttctatgctaacctgactacac

SEQ ID NO: 59378 - DNA, 25 bp, Saccharomyces pastorianus
gtgtccattcaactccactttgata

SEQ ID NO: 59379 - DNA, 25 bp, Saccharomyces pastorianus
atcgagccctgccaatgatgtcacg

SEQ ID NO: 59380 - DNA, 25 bp, Saccharomyces pastorianus
gagtacccacctggcactaagaaaa

SEQ ID NO: 59381 - DNA, 25 bp, Saccharomyces pastorianus
atactgtcccagtcaggagcgctat

SEQ ID NO: 59382 - DNA, 25 bp, Saccharomyces pastorianus
tctgtttcgcccaccgatgatgata

SEQ ID NO: 59383 - DNA, 25 bp, Saccharomyces pastorianus
aagcctttgaatttcgagacctcca

SEQ ID NO: 59384 - DNA, 25 bp, Saccharomyces pastorianus
gctacgcatttgacgccggaggata

SEQ ID NO: 59385 - DNA, 25 bp, Saccharomyces pastorianus
ggatctggcccaggattaaaaagat

SEQ ID NO: 59386 - DNA, 25 bp, Saccharomyces pastorianus
ggcacgcaaccagtacagagggtcc

SEQ ID NO: 59387 - DNA, 25 bp, Saccharomyces pastorianus
gcaaccagtacagagggtccgaggt

SEQ ID NO: 59388 - DNA, 25 bp, Saccharomyces pastorianus
acagagggtccgaggtttcactgga

SEQ ID NO: 59389 - DNA, 25 bp, Saccharomyces pastorianus
atgggcgagacacccagctccagca

SEQ ID NO: 59390 - DNA, 25 bp, Saccharomyces pastorianus
agtacagagggtccgaggtttcact

SEQ ID NO: 59391 - DNA, 25 bp, Saccharomyces pastorianus
tacagcgggatctggcccaggatta

SEQ ID NO: 59392 - DNA, 25 bp, Saccharomyces pastorianus
gtccgaggtttcactggacacgatc

SEQ ID NO: 59393 - DNA, 25 bp, Saccharomyces pastorianus
agctccagcagcgtaccacggttgg

SEQ ID NO: 59394 - DNA, 25 bp, Saccharomyces pastorianus
gagggtccgaggtttcactggacac

SEQ ID NO: 59395 - DNA, 25 bp, Saccharomyces pastorianus
ggcccaggattaaaaagatcagcag

SEQ ID NO: 59396 - DNA, 25 bp, Saccharomyces pastorianus
ccagaaattccggttccagagatcc

SEQ ID NO: 59397 - DNA, 25 bp, Saccharomyces pastorianus
attagcgaaaaagacagagagagag

SEQ ID NO: 59398 - DNA, 25 bp, Saccharomyces pastorianus
ttctattagcgaaaaagacagagag

SEQ ID NO: 59399 - DNA, 25 bp, Saccharomyces pastorianus
tattagcgaaaaagacagagagaga

SEQ ID NO: 59400 - DNA, 25 bp, Saccharomyces pastorianus
gggaagtttactacatcccagaaat

SEQ ID NO: 59401 - DNA, 25 bp, Saccharomyces pastorianus
cagaaattccggttccagagatcca

SEQ ID NO: 59402 - DNA, 25 bp, Saccharomyces pastorianus
agcgaaaaagacagagagagagtta

SEQ ID NO: 59403 - DNA, 25 bp, Saccharomyces pastorianus
agaaattccggttccagagatccaa

SEQ ID NO: 59404 - DNA, 25 bp, Saccharomyces pastorianus
ctattagcgaaaaagacagagagag

SEQ ID NO: 59405 - DNA, 25 bp, Saccharomyces pastorianus
agacagagagagagttaatgaaaac

SEQ ID NO: 59406 - DNA, 25 bp, Saccharomyces pastorianus
tagcgaaaaagacagagagagagtt

SEQ ID NO: 59407 - DNA, 25 bp, Saccharomyces pastorianus
aatgtggtctacaaggtcactctat

SEQ ID NO: 59408 - DNA, 25 bp, Saccharomyces pastorianus
acataggtacatcgatgctgctgat

SEQ ID NO: 59409 - DNA, 25 bp, Saccharomyces pastorianus
aatcgtatacggatgctgccatagc

SEQ ID NO: 59410 - DNA, 25 bp, Saccharomyces pastorianus
gcgaagtacctttcatcgattcaat

SEQ ID NO: 59411 - DNA, 25 bp, Saccharomyces pastorianus
atgctctagcactgtaccgttatga

SEQ ID NO: 59412 - DNA, 25 bp, Saccharomyces pastorianus
agacaacgaacctttgcgccgtaag

SEQ ID NO: 59413 - DNA, 25 bp, Saccharomyces pastorianus
gtaatacattacgttgaggctcatg

SEQ ID NO: 59414 - DNA, 25 bp, Saccharomyces pastorianus
aggctttagagcatctttccgaaat

SEQ ID NO: 59415 - DNA, 25 bp, Saccharomyces pastorianus
ctttgcgccgtaaggtcatgattga

SEQ ID NO: 59416 - DNA, 25 bp, Saccharomyces pastorianus
ggtcactctatctctgtatgatgtc

SEQ ID NO: 59417 - DNA, 25 bp, Saccharomyces pastorianus
gaggctattaccattgctgttcaga

SEQ ID NO: 59418 - DNA, 25 bp, Saccharomyces pastorianus
ccagaaattccggttccagagatcc

SEQ ID NO: 59419 - DNA, 25 bp, Saccharomyces pastorianus
attagcgaaaaagacagagagagag

SEQ ID NO: 59420 - DNA, 25 bp, Saccharomyces pastorianus
ttctattagcgaaaaagacagagag

SEQ ID NO: 59421 - DNA, 25 bp, Saccharomyces pastorianus
tattagcgaaaaagacagagagaga

SEQ ID NO: 59422 - DNA, 25 bp, Saccharomyces pastorianus
gggaagtttactacatcccagaaat

SEQ ID NO: 59423 - DNA, 25 bp, Saccharomyces pastorianus
cagaaattccggttccagagatcca

SEQ ID NO: 59424 - DNA, 25 bp, Saccharomyces pastorianus
agcgaaaaagacagagagagagtta

SEQ ID NO: 59425 - DNA, 25 bp, Saccharomyces pastorianus
agaaattccggttccagagatccaa

SEQ ID NO: 59426 - DNA, 25 bp, Saccharomyces pastorianus
ctattagcgaaaaagacagagagag

SEQ ID NO: 59427 - DNA, 25 bp, Saccharomyces pastorianus
agacagagagagagttaatgaaaac

SEQ ID NO: 59428 - DNA, 25 bp, Saccharomyces pastorianus
tagcgaaaaagacagagagagagtt

SEQ ID NO: 59429 - DNA, 25 bp, Saccharomyces pastorianus
acgttagatatggtcagtgtcggga

SEQ ID NO: 59430 - DNA, 25 bp, Saccharomyces pastorianus
agattgcgcaaggacgggaacctga

SEQ ID NO: 59431 - DNA, 25 bp, Saccharomyces pastorianus
atcgtgtgtctcgtgggcatctaca

SEQ ID NO: 59432 - DNA, 25 bp, Saccharomyces pastorianus
ggaacctgagatcggacgttcccat

SEQ ID NO: 59433 - DNA, 25 bp, Saccharomyces pastorianus
ggcacgaagttctttgagcccatcg

SEQ ID NO: 59434 - DNA, 25 bp, Saccharomyces pastorianus
catcgtgatcgatagattgcgcaag

SEQ ID NO: 59435 - DNA, 25 bp, Saccharomyces pastorianus
gggcatctacacaggcacgaagttc

SEQ ID NO: 59436 - DNA, 25 bp, Saccharomyces pastorianus
tcagtgtcgggatcgtgtgtctcgt

SEQ ID NO: 59437 - DNA, 25 bp, Saccharomyces pastorianus
gttcccatcccggactatgataggg

SEQ ID NO: 59438 - DNA, 25 bp, Saccharomyces pastorianus
actatgatagggacgggaacttggt

SEQ ID NO: 59439 - DNA, 25 bp, Saccharomyces pastorianus
ttctttgagcccatcgtgatcgata

SEQ ID NO: 59440 - DNA, 25 bp, Saccharomyces pastorianus
atcagcctaaatccaataagcccct

SEQ ID NO: 59441 - DNA, 25 bp, Saccharomyces pastorianus
gagagttctgatggttccgtgtttg

SEQ ID NO: 59442 - DNA, 25 bp, Saccharomyces pastorianus
tcaacccggttcaagtattttgtca

SEQ ID NO: 59443 - DNA, 25 bp, Saccharomyces pastorianus
ataagccccttctgaacttgaatga

SEQ ID NO: 59444 - DNA, 25 bp, Saccharomyces pastorianus
gttgaggctgaaataccgcctagat

SEQ ID NO: 59445 - DNA, 25 bp, Saccharomyces pastorianus
tgagttacgattgagggatcatcct

SEQ ID NO: 59446 - DNA, 25 bp, Saccharomyces pastorianus
gcaaacgggaactattcatctttga

SEQ ID NO: 59447 - DNA, 25 bp, Saccharomyces pastorianus
aggcaccgtgggaatagactttata

SEQ ID NO: 59448 - DNA, 25 bp, Saccharomyces pastorianus
tatttatttcgatccggcagccaaa

SEQ ID NO: 59449 - DNA, 25 bp, Saccharomyces pastorianus
ggttccgtgtttgagtgtgagttac

SEQ ID NO: 59450 - DNA, 25 bp, Saccharomyces pastorianus
ttaacgaggaggattacaggcaccg

SEQ ID NO: 59451 - DNA, 25 bp, Saccharomyces pastorianus
ggtgcgtatgactacagtttccagt

SEQ ID NO: 59452 - DNA, 25 bp, Saccharomyces pastorianus
gggatttttacagctctaatgatca

SEQ ID NO: 59453 - DNA, 25 bp, Saccharomyces pastorianus
gtatggaatgctcttgatggatctt

SEQ ID NO: 59454 - DNA, 25 bp, Saccharomyces pastorianus
gtgacaaggagcaacgcacggcttc

SEQ ID NO: 59455 - DNA, 25 bp, Saccharomyces pastorianus
gggttctcagagactttgacaaaga

SEQ ID NO: 59456 - DNA, 25 bp, Saccharomyces pastorianus
gaacagagagttttccctccagata

SEQ ID NO: 59457 - DNA, 25 bp, Saccharomyces pastorianus
cagtttccagtttgacaagtttcct

SEQ ID NO: 59458 - DNA, 25 bp, Saccharomyces pastorianus
taaaccgttccacagattaatcagg

SEQ ID NO: 59459 - DNA, 25 bp, Saccharomyces pastorianus
gatggatcttcaaagccgttcaaag

SEQ ID NO: 59460 - DNA, 25 bp, Saccharomyces pastorianus
aaggcagcatcttggtttaaaccgt

SEQ ID NO: 59461 - DNA, 25 bp, Saccharomyces pastorianus
taataggtccttccatactttgtta

SEQ ID NO: 59462 - DNA, 25 bp, Saccharomyces pastorianus
taattttggacaacttcttgggaag

SEQ ID NO: 59463 - DNA, 25 bp, Saccharomyces pastorianus
gtcgtgaagttaagactgcgtccat

SEQ ID NO: 59464 - DNA, 25 bp, Saccharomyces pastorianus
gtcgccttactatcggtgtttgttt

SEQ ID NO: 59465 - DNA, 25 bp, Saccharomyces pastorianus
gaacctgaagaaatagtcgccttac

SEQ ID NO: 59466 - DNA, 25 bp, Saccharomyces pastorianus
ggtaccgtggtcagagtcattacat

SEQ ID NO: 59467 - DNA, 25 bp, Saccharomyces pastorianus
cttaagtctactacctgattatgaa

SEQ ID NO: 59468 - DNA, 25 bp, Saccharomyces pastorianus
attgtcacaccaaggctagcaaagg

SEQ ID NO: 59469 - DNA, 25 bp, Saccharomyces pastorianus
ggaaatgcttggtgcttttagtaca

SEQ ID NO: 59470 - DNA, 25 bp, Saccharomyces pastorianus
atgagccctgaagccgaaggtaccg

SEQ ID NO: 59471 - DNA, 25 bp, Saccharomyces pastorianus
aattctggttatgaactggttctaa

SEQ ID NO: 59472 - DNA, 25 bp, Saccharomyces pastorianus
gaatgggctcgtggtttatcgttta

SEQ ID NO: 59473 - DNA, 25 bp, Saccharomyces pastorianus
gttcatcatggagggttgttgccta

SEQ ID NO: 59474 - DNA, 25 bp, Saccharomyces pastorianus
atggcctgaacttgtcaactaccta

SEQ ID NO: 59475 - DNA, 25 bp, Saccharomyces pastorianus
gtttagattctaccgggacagtcat

SEQ ID NO: 59476 - DNA, 25 bp, Saccharomyces pastorianus
gacagtcatcgtcatggcgtacagt

SEQ ID NO: 59477 - DNA, 25 bp, Saccharomyces pastorianus
agttctcctctatctatcactacat

SEQ ID NO: 59478 - DNA, 25 bp, Saccharomyces pastorianus
gtttgccacagaaacatttgccatg

SEQ ID NO: 59479 - DNA, 25 bp, Saccharomyces pastorianus
gagagttcactcaaatggctggtag

SEQ ID NO: 59480 - DNA, 25 bp, Saccharomyces pastorianus
gtaaccatgggtgttccaacaaggt

SEQ ID NO: 59481 - DNA, 25 bp, Saccharomyces pastorianus
atcagatccttgctggaacgtggta

SEQ ID NO: 59482 - DNA, 25 bp, Saccharomyces pastorianus
gccatgggtttgaacttacctacaa

SEQ ID NO: 59483 - DNA, 25 bp, Saccharomyces pastorianus
agaaggaattgctacccatggttgt

SEQ ID NO: 59484 - DNA, 25 bp, Saccharomyces pastorianus
gatgaaagctttgttttcgttccca

SEQ ID NO: 59485 - DNA, 25 bp, Saccharomyces pastorianus
agactacgcacaattctccatggag

SEQ ID NO: 59486 - DNA, 25 bp, Saccharomyces pastorianus
gtggtgccctgatcaagccatggat

SEQ ID NO: 59487 - DNA, 25 bp, Saccharomyces pastorianus
attgacagtgtcatggttgcccgtg

SEQ ID NO: 59488 - DNA, 25 bp, Saccharomyces pastorianus
tttaatgggcagcacggacgtcaac

SEQ ID NO: 59489 - DNA, 25 bp, Saccharomyces pastorianus
ttgcgagagatatcccgttcagttg

SEQ ID NO: 59490 - DNA, 25 bp, Saccharomyces pastorianus
ggctttctcaatgccgtagattctt

SEQ ID NO: 59491 - DNA, 25 bp, Saccharomyces pastorianus
acgtgggccaagttgctgatacatt

SEQ ID NO: 59492 - DNA, 25 bp, Saccharomyces pastorianus
gatacattcctatgggcatttgcga

SEQ ID NO: 59493 - DNA, 25 bp, Saccharomyces pastorianus
gttcatgtcctttttccacagatac

SEQ ID NO: 59494 - DNA, 25 bp, Saccharomyces pastorianus
gacgtcaacgactggatcaagctaa

SEQ ID NO: 59495 - DNA, 25 bp, Saccharomyces pastorianus
gatcatcgcaatcggttaatctgga

SEQ ID NO: 59496 - DNA, 25 bp, Saccharomyces pastorianus
ctaagtaacccagcactatttgcgg

SEQ ID NO: 59497 - DNA, 25 bp, Saccharomyces pastorianus
atcgccgataaaaatgtgcccgtta

SEQ ID NO: 59498 - DNA, 25 bp, Saccharomyces pastorianus
aaacttcgacttcaagcgtcacggc

SEQ ID NO: 59499 - DNA, 25 bp, Saccharomyces pastorianus
gagtttggcggtttgccgtttcagc

SEQ ID NO: 59500 - DNA, 25 bp, Saccharomyces pastorianus
gccaacggagactgcttcaaattat

SEQ ID NO: 59501 - DNA, 25 bp, Saccharomyces pastorianus
gaactgtgccggaacttatgtgata

SEQ ID NO: 59502 - DNA, 25 bp, Saccharomyces pastorianus
gattcacggtcgtacacgtagaact

SEQ ID NO: 59503 - DNA, 25 bp, Saccharomyces pastorianus
ttggatcaaacggtcgaactgtgcc

SEQ ID NO: 59504 - DNA, 25 bp, Saccharomyces pastorianus
tcatggctgtccgtgggttactaag

SEQ ID NO: 59505 - DNA, 25 bp, Saccharomyces pastorianus
agctggcccagcatcatttatattg

SEQ ID NO: 59506 - DNA, 25 bp, Saccharomyces pastorianus
tctcttacgttgaacctgtcttggt

SEQ ID NO: 59507 - DNA, 25 bp, Saccharomyces pastorianus
atgggtaccgaagatgtccgtctag

SEQ ID NO: 59508 - DNA, 25 bp, Saccharomyces pastorianus
gaacccattgttctcttacgttgaa

SEQ ID NO: 59509 - DNA, 25 bp, Saccharomyces pastorianus
gctccagaattgaaccaagctattt

SEQ ID NO: 59510 - DNA, 25 bp, Saccharomyces pastorianus
attgttctcttacgttgaacctgtc

SEQ ID NO: 59511 - DNA, 25 bp, Saccharomyces pastorianus
aagatgtccgtctagctccagaatt

SEQ ID NO: 59512 - DNA, 25 bp, Saccharomyces pastorianus
tgaacctgtcttggttgcctctgcc

SEQ ID NO: 59513 - DNA, 25 bp, Saccharomyces pastorianus
gctatttggaagagaggtgttaaag

SEQ ID NO: 59514 - DNA, 25 bp, Saccharomyces pastorianus
agctatttggaagagaggtgttaaa

SEQ ID NO: 59515 - DNA, 25 bp, Saccharomyces pastorianus
ttggaagagaggtgttaaaggtgtt

SEQ ID NO: 59516 - DNA, 25 bp, Saccharomyces pastorianus
tgtcttggttgcctctgccaagggt

SEQ ID NO: 59517 - DNA, 25 bp, Saccharomyces pastorianus
gagtgaggaatctagttccgctaac

SEQ ID NO: 59518 - DNA, 25 bp, Saccharomyces pastorianus
gagccactaaacctggaagacgctt

SEQ ID NO: 59519 - DNA, 25 bp, Saccharomyces pastorianus
actggcgacgatggagctgctcaca

SEQ ID NO: 59520 - DNA, 25 bp, Saccharomyces pastorianus
tcaacctcccgttacaacttcaaag

SEQ ID NO: 59521 - DNA, 25 bp, Saccharomyces pastorianus
ggagctgctcacagggaagtctttc

SEQ ID NO: 59522 - DNA, 25 bp, Saccharomyces pastorianus
aaccacttcccatattctgtcgaat

SEQ ID NO: 59523 - DNA, 25 bp, Saccharomyces pastorianus
gacaagcctttaagagagccactaa

SEQ ID NO: 59524 - DNA, 25 bp, Saccharomyces pastorianus
gaagacagctttggacacaacacaa

SEQ ID NO: 59525 - DNA, 25 bp, Saccharomyces pastorianus
gggcttccatgtctcaagtagggat

SEQ ID NO: 59526 - DNA, 25 bp, Saccharomyces pastorianus
gggaagtctttcaagccatacctga

SEQ ID NO: 59527 - DNA, 25 bp, Saccharomyces pastorianus
agattgaggcgctattcaccgtggc

SEQ ID NO: 59528 - DNA, 25 bp, Saccharomyces pastorianus
ggaacagaagcttcgaagacgttag

SEQ ID NO: 59529 - DNA, 25 bp, Saccharomyces pastorianus
aggaccgaagagctggaccgattac

SEQ ID NO: 59530 - DNA, 25 bp, Saccharomyces pastorianus
tagagaggtataccccgtatctggg

SEQ ID NO: 59531 - DNA, 25 bp, Saccharomyces pastorianus
gggcgcgctgaagttttacaaaaag

SEQ ID NO: 59532 - DNA, 25 bp, Saccharomyces pastorianus
caaatgtgtgttacctgctaatgac

SEQ ID NO: 59533 - DNA, 25 bp, Saccharomyces pastorianus
gcgacttcacgatgactcgtttaag

SEQ ID NO: 59534 - DNA, 25 bp, Saccharomyces pastorianus
atatagtcaactcaccaaatggaac

SEQ ID NO: 59535 - DNA, 25 bp, Saccharomyces pastorianus
gggatctccgaatcattgagatggc

SEQ ID NO: 59536 - DNA, 25 bp, Saccharomyces pastorianus
gaatttactgcgacttcacgatgac

SEQ ID NO: 59537 - DNA, 25 bp, Saccharomyces pastorianus
tgacatgttagagaggtataccccg

SEQ ID NO: 59538 - DNA, 25 bp, Saccharomyces pastorianus
gagctggaccgattacttgacaata

SEQ ID NO: 59539 - DNA, 25 bp, Saccharomyces pastorianus
agcgaaaagttcgacgtcgtcaagg

SEQ ID NO: 59540 - DNA, 25 bp, Saccharomyces pastorianus
gggtatccttatggaagtcttacaa

SEQ ID NO: 59541 - DNA, 25 bp, Saccharomyces pastorianus
gtcaaactggactttgggtatcctt

SEQ ID NO: 59542 - DNA, 25 bp, Saccharomyces pastorianus
gacgacaacaaacttccaggacgaa

SEQ ID NO: 59543 - DNA, 25 bp, Saccharomyces pastorianus
catgcgtataggtactggccttata

SEQ ID NO: 59544 - DNA, 25 bp, Saccharomyces pastorianus
tgaaaaccctggttctgatctttta

SEQ ID NO: 59545 - DNA, 25 bp, Saccharomyces pastorianus
agaattctgtgcctgacaagcgaaa

SEQ ID NO: 59546 - DNA, 25 bp, Saccharomyces pastorianus
gagggtgacctactgatagacaaac

SEQ ID NO: 59547 - DNA, 25 bp, Saccharomyces pastorianus
agcttgcgagcggtttgaacatcta

SEQ ID NO: 59548 - DNA, 25 bp, Saccharomyces pastorianus
gccaaaagaccgctattgattcttg

SEQ ID NO: 59549 - DNA, 25 bp, Saccharomyces pastorianus
agttgtgttgacgagggtgacctac

SEQ ID NO: 59550 - DNA, 25 bp, Saccharomyces pastorianus
aattctttgcccctgtggtagacgt

SEQ ID NO: 59551 - DNA, 25 bp, Saccharomyces pastorianus
agttttgcccatctcttgatgtgca

SEQ ID NO: 59552 - DNA, 25 bp, Saccharomyces pastorianus
cttccaccaatcgtacagctttgaa

SEQ ID NO: 59553 - DNA, 25 bp, Saccharomyces pastorianus
gcccgtccgttttgttcaagaactg

SEQ ID NO: 59554 - DNA, 25 bp, Saccharomyces pastorianus
tggcaccaagcaaacactctacgag

SEQ ID NO: 59555 - DNA, 25 bp, Saccharomyces pastorianus
atgtttggaggattcgacccaccgc

SEQ ID NO: 59556 - DNA, 25 bp, Saccharomyces pastorianus
atagttagttgctgcgatctgggcc

SEQ ID NO: 59557 - DNA, 25 bp, Saccharomyces pastorianus
tattcgcaatcaacgcattggcgcc

SEQ ID NO: 59558 - DNA, 25 bp, Saccharomyces pastorianus
tagacgtgaaccatctggccgccaa

SEQ ID NO: 59559 - DNA, 25 bp, Saccharomyces pastorianus
taccttactcgctacaacatatcat

SEQ ID NO: 59560 - DNA, 25 bp, Saccharomyces pastorianus
ttgtcaacatcgcaagtactctggg

SEQ ID NO: 59561 - DNA, 25 bp, Saccharomyces pastorianus
acaggtgttgtagtagatcttttca

SEQ ID NO: 59562 - DNA, 25 bp, Saccharomyces pastorianus
agaagctatgcctgatttggtatca

SEQ ID NO: 59563 - DNA, 25 bp, Saccharomyces pastorianus
aacaggctcgttttgaacttggcgt

SEQ ID NO: 59564 - DNA, 25 bp, Saccharomyces pastorianus
gactcggctttaccaattgccatgg

SEQ ID NO: 59565 - DNA, 25 bp, Saccharomyces pastorianus
gaacttggcgtctccatgatgattt

SEQ ID NO: 59566 - DNA, 25 bp, Saccharomyces pastorianus
tgctttggatgttgccgttgaaaat

SEQ ID NO: 59567 - DNA, 25 bp, Saccharomyces pastorianus
aaccggaacccgttgtagatgatga

SEQ ID NO: 59568 - DNA, 25 bp, Saccharomyces pastorianus
aagagtcattcacgttgaaggcgat

SEQ ID NO: 59569 - DNA, 25 bp, Saccharomyces pastorianus
gtggcccggactcttctgagaaaag

SEQ ID NO: 59570 - DNA, 25 bp, Saccharomyces pastorianus
gagacattgctgtatgctatggttg

SEQ ID NO: 59571 - DNA, 25 bp, Saccharomyces pastorianus
accaacgtcgaagatgactcggctt

SEQ ID NO: 59572 - DNA, 25 bp, Saccharomyces pastorianus
tactgcacttttcttagctttaggc

SEQ ID NO: 59573 - DNA, 25 bp, Saccharomyces pastorianus
agtgttgttgctgaagccaccattc

SEQ ID NO: 59574 - DNA, 25 bp, Saccharomyces pastorianus
gaagtcgtttctgtatccggtaatt

SEQ ID NO: 59575 - DNA, 25 bp, Saccharomyces pastorianus
agaatatctgtctctatgccctcga

SEQ ID NO: 59576 - DNA, 25 bp, Saccharomyces pastorianus
acagggcgctatgcttgatctctta

SEQ ID NO: 59577 - DNA, 25 bp, Saccharomyces pastorianus
cacttgctgctggtcatttggtaca

SEQ ID NO: 59578 - DNA, 25 bp, Saccharomyces pastorianus
gaactatctctgtgttctgcacttg

SEQ ID NO: 59579 - DNA, 25 bp, Saccharomyces pastorianus
taccgttttggaaccacagggcgct

SEQ ID NO: 59580 - DNA, 25 bp, Saccharomyces pastorianus
aaacttggtcggatctgcaatggct

SEQ ID NO: 59581 - DNA, 25 bp, Saccharomyces pastorianus
agctttaggccaagatccagcgcag

SEQ ID NO: 59582 - DNA, 25 bp, Saccharomyces pastorianus
atctgttggtggcttcaatgcgcat

SEQ ID NO: 59583 - DNA, 25 bp, Saccharomyces pastorianus
tgattgcctgtggtgctatcagtgc

SEQ ID NO: 59584 - DNA, 25 bp, Saccharomyces pastorianus
ttttaagaatgttcccttgatatgg

SEQ ID NO: 59585 - DNA, 25 bp, Saccharomyces pastorianus
cactcttgaagatggtagcgctgat

SEQ ID NO: 59586 - DNA, 25 bp, Saccharomyces pastorianus
ggatgagtttccagaagcattgaaa

SEQ ID NO: 59587 - DNA, 25 bp, Saccharomyces pastorianus
taacggattatgtggatgagtttcc

SEQ ID NO: 59588 - DNA, 25 bp, Saccharomyces pastorianus
gcttggagaattctgccactcttga

SEQ ID NO: 59589 - DNA, 25 bp, Saccharomyces pastorianus
gatggtagcgctgataattttaaga

SEQ ID NO: 59590 - DNA, 25 bp, Saccharomyces pastorianus
gttacggctttgttctaaccaagag

SEQ ID NO: 59591 - DNA, 25 bp, Saccharomyces pastorianus
aaacggccagatcggcttggagaat

SEQ ID NO: 59592 - DNA, 25 bp, Saccharomyces pastorianus
tcagtgcctataacgatccatcaaa

SEQ ID NO: 59593 - DNA, 25 bp, Saccharomyces pastorianus
gagaattctgccactcttgaagatg

SEQ ID NO: 59594 - DNA, 25 bp, Saccharomyces pastorianus
atgcaaaaggtgtccaacctggtga

SEQ ID NO: 59595 - DNA, 25 bp, Saccharomyces pastorianus
aaaattttggatttcctcgatggat

SEQ ID NO: 59596 - DNA, 25 bp, Saccharomyces pastorianus
aaacgaaaagtttgctcctggtgat

SEQ ID NO: 59597 - DNA, 25 bp, Saccharomyces pastorianus
ggatagctaaggtcttggcttctaa

SEQ ID NO: 59598 - DNA, 25 bp, Saccharomyces pastorianus
actggttggactacccacgttatag

SEQ ID NO: 59599 - DNA, 25 bp, Saccharomyces pastorianus
gctcctggtgattatgtctctgcaa

SEQ ID NO: 59600 - DNA, 25 bp, Saccharomyces pastorianus
gaatgcactttcgaactaactgaga

SEQ ID NO: 59601 - DNA, 25 bp, Saccharomyces pastorianus
gaaagaactctctccagaacaacta

SEQ ID NO: 59602 - DNA, 25 bp, Saccharomyces pastorianus
cccacgttatagttcctcaatcgga

SEQ ID NO: 59603 - DNA, 25 bp, Saccharomyces pastorianus
attacttgtctaatgatcctgctca

SEQ ID NO: 59604 - DNA, 25 bp, Saccharomyces pastorianus
aattttactgatcctgaatgcactt

SEQ ID NO: 59605 - DNA, 25 bp, Saccharomyces pastorianus
acgctacatcgtctaacggtgctga

SEQ ID NO: 59606 - DNA, 25 bp, Saccharomyces pastorianus
gtgacccagcaaaaggcactagagg

SEQ ID NO: 59607 - DNA, 25 bp, Saccharomyces pastorianus
gatacgctacatcgtctaacggtgc

SEQ ID NO: 59608 - DNA, 25 bp, Saccharomyces pastorianus
ggcactagaggaggacaaccagcag

SEQ ID NO: 59609 - DNA, 25 bp, Saccharomyces pastorianus
gagtcacagatacgctacatcgtct

SEQ ID NO: 59610 - DNA, 25 bp, Saccharomyces pastorianus
tataccagagtcacagatacgctac

SEQ ID NO: 59611 - DNA, 25 bp, Saccharomyces pastorianus
ctaacggtgctgacgctagttggtg

SEQ ID NO: 59612 - DNA, 25 bp, Saccharomyces pastorianus
tacatcgtctaacggtgctgacgct

SEQ ID NO: 59613 - DNA, 25 bp, Saccharomyces pastorianus
gtctaacggtgctgacgctagttgg

SEQ ID NO: 59614 - DNA, 25 bp, Saccharomyces pastorianus
gctgacgctagttggtggtacgtta

SEQ ID NO: 59615 - DNA, 25 bp, Saccharomyces pastorianus
gtctaaatatgcttggtataccaga

SEQ ID NO: 59616 - DNA, 25 bp, Saccharomyces pastorianus
acgctacatcgtctaacggtgctga

SEQ ID NO: 59617 - DNA, 25 bp, Saccharomyces pastorianus
gatacgctacatcgtctaacggtgc

SEQ ID NO: 59618 - DNA, 25 bp, Saccharomyces pastorianus
gtgacccagcaaaaggcactagagg

SEQ ID NO: 59619 - DNA, 25 bp, Saccharomyces pastorianus
ggcactagaggaggacaaccagcag

SEQ ID NO: 59620 - DNA, 25 bp, Saccharomyces pastorianus
gagtcacagatacgctacatcgtct

SEQ ID NO: 59621 - DNA, 25 bp, Saccharomyces pastorianus
tataccagagtcacagatacgctac

SEQ ID NO: 59622 - DNA, 25 bp, Saccharomyces pastorianus
tacatcgtctaacggtgctgacgct

SEQ ID NO: 59623 - DNA, 25 bp, Saccharomyces pastorianus
tctaacggtgctgacgctagttggt

SEQ ID NO: 59624 - DNA, 25 bp, Saccharomyces pastorianus
ggtacgttatacatgtccggtggct

SEQ ID NO: 59625 - DNA, 25 bp, Saccharomyces pastorianus
gctgacgctagttggtggtacgtta

SEQ ID NO: 59626 - DNA, 25 bp, Saccharomyces pastorianus
gtctaaatatgcttggtataccaga

SEQ ID NO: 59627 - DNA, 25 bp, Saccharomyces pastorianus
gagaatctctgaaactccagtggat

SEQ ID NO: 59628 - DNA, 25 bp, Saccharomyces pastorianus
aaagcgtgtcggtctattctcttac

SEQ ID NO: 59629 - DNA, 25 bp, Saccharomyces pastorianus
ggttccattgagcacttgcaatctg

SEQ ID NO: 59630 - DNA, 25 bp, Saccharomyces pastorianus
gattacaacgttttccacgtgccaa

SEQ ID NO: 59631 - DNA, 25 bp, Saccharomyces pastorianus
atgtacaccgcatccgtatatgctg

SEQ ID NO: 59632 - DNA, 25 bp, Saccharomyces pastorianus
ctaaccctgcattattcccagaagt

SEQ ID NO: 59633 - DNA, 25 bp, Saccharomyces pastorianus
cacgtgccaacctgtaaactagtca

SEQ ID NO: 59634 - DNA, 25 bp, Saccharomyces pastorianus
tctctattaaactacgtcggctctg

SEQ ID NO: 59635 - DNA, 25 bp, Saccharomyces pastorianus
gcaatctggcgtttactacttgacc

SEQ ID NO: 59636 - DNA, 25 bp, Saccharomyces pastorianus
tggctgcttctctatattcctgtaa

SEQ ID NO: 59637 - DNA, 25 bp, Saccharomyces pastorianus
gacctttgtcaatgttgctaagcca

SEQ ID NO: 59638 - DNA, 25 bp, Saccharomyces pastorianus
cagaattcatttcccattggtgtca

SEQ ID NO: 59639 - DNA, 25 bp, Saccharomyces pastorianus
aagagagccacccatgagtccaatt

SEQ ID NO: 59640 - DNA, 25 bp, Saccharomyces pastorianus
gatcggtatctgttacgagccacca

SEQ ID NO: 59641 - DNA, 25 bp, Saccharomyces pastorianus
gagtccaattccgtgtcagagatca

SEQ ID NO: 59642 - DNA, 25 bp, Saccharomyces pastorianus
caagttctgaactggcttctgtgga

SEQ ID NO: 59643 - DNA, 25 bp, Saccharomyces pastorianus
accgccattgccgaggcttggaaaa

SEQ ID NO: 59644 - DNA, 25 bp, Saccharomyces pastorianus
gagccgtttgtatgttatcccacac

SEQ ID NO: 59645 - DNA, 25 bp, Saccharomyces pastorianus
atacgctcctatcttgtccaataag

SEQ ID NO: 59646 - DNA, 25 bp, Saccharomyces pastorianus
gagccaccaaccgtaataccaagtt

SEQ ID NO: 59647 - DNA, 25 bp, Saccharomyces pastorianus
gcgtccttaaggttcgatggttcgt

SEQ ID NO: 59648 - DNA, 25 bp, Saccharomyces pastorianus
gtgtcatctgtaacagcgtccttaa

SEQ ID NO: 59649 - DNA, 25 bp, Saccharomyces pastorianus
acacggccttatgggctggaggttc

SEQ ID NO: 59650 - DNA, 25 bp, Saccharomyces pastorianus
atctcgggataggattagccacttt

SEQ ID NO: 59651 - DNA, 25 bp, Saccharomyces pastorianus
aatggatctttcattcccagcttct

SEQ ID NO: 59652 - DNA, 25 bp, Saccharomyces pastorianus
gaaatgcagcttgacccagatggga

SEQ ID NO: 59653 - DNA, 25 bp, Saccharomyces pastorianus
atgttatccttgttctttgggtggg

SEQ ID NO: 59654 - DNA, 25 bp, Saccharomyces pastorianus
gttgcattcaatgttggctcgataa

SEQ ID NO: 59655 - DNA, 25 bp, Saccharomyces pastorianus
gccagcgttacaccagttcatgagt

SEQ ID NO: 59656 - DNA, 25 bp, Saccharomyces pastorianus
actgttgtcaactattccatgtcat

SEQ ID NO: 59657 - DNA, 25 bp, Saccharomyces pastorianus
gctgctttactcgttggattttcca

SEQ ID NO: 59658 - DNA, 25 bp, Saccharomyces pastorianus
agcttcttccatcatcttcagtgat

SEQ ID NO: 59659 - DNA, 25 bp, Saccharomyces pastorianus
agttcatgagtcgtacttccgtact

SEQ ID NO: 59660 - DNA, 25 bp, Saccharomyces pastorianus
atcatctagatcagtgtccgtggaa

SEQ ID NO: 59661 - DNA, 25 bp, Saccharomyces pastorianus
agaactgctgtccatcatgttgctg

SEQ ID NO: 59662 - DNA, 25 bp, Saccharomyces pastorianus
atctttaagtgctgctgttgccacg

SEQ ID NO: 59663 - DNA, 25 bp, Saccharomyces pastorianus
aacgactattctcttcttggactgt

SEQ ID NO: 59664 - DNA, 25 bp, Saccharomyces pastorianus
ggaactcatcccgtatattttacta

SEQ ID NO: 59665 - DNA, 25 bp, Saccharomyces pastorianus
gaggatttggtccagtgcacagcct

SEQ ID NO: 59666 - DNA, 25 bp, Saccharomyces pastorianus
ttcaccgggcatctgtcaaaaggtt

SEQ ID NO: 59667 - DNA, 25 bp, Saccharomyces pastorianus
ttggactgttgcttctcggttacac

SEQ ID NO: 59668 - DNA, 25 bp, Saccharomyces pastorianus
acatgctctgtggtgtcgatattac

SEQ ID NO: 59669 - DNA, 25 bp, Saccharomyces pastorianus
acgccatcatgtcgatgcacttatc

SEQ ID NO: 59670 - DNA, 25 bp, Saccharomyces pastorianus
agggcccaggcgatctttaagtgct

SEQ ID NO: 59671 - DNA, 25 bp, Saccharomyces pastorianus
aagatttcagatactttacccttgc

SEQ ID NO: 59672 - DNA, 25 bp, Saccharomyces pastorianus
ggagctggcagttgagaacccgtta

SEQ ID NO: 59673 - DNA, 25 bp, Saccharomyces pastorianus
tacgacgctcctcaggtaactgcag

SEQ ID NO: 59674 - DNA, 25 bp, Saccharomyces pastorianus
acacagcccgttcttaatgggtcat

SEQ ID NO: 59675 - DNA, 25 bp, Saccharomyces pastorianus
gaacccgttagcaaagactatggca

SEQ ID NO: 59676 - DNA, 25 bp, Saccharomyces pastorianus
tgaacgttctgaggcgatttccaaa

SEQ ID NO: 59677 - DNA, 25 bp, Saccharomyces pastorianus
gagaaattccatatggtcctgattt

SEQ ID NO: 59678 - DNA, 25 bp, Saccharomyces pastorianus
tgaacgaaatcgtcccactacacag

SEQ ID NO: 59679 - DNA, 25 bp, Saccharomyces pastorianus
gtaactgcagcggagaaatcattca

SEQ ID NO: 59680 - DNA, 25 bp, Saccharomyces pastorianus
atggcagatgccgttcgtgaactag

SEQ ID NO: 59681 - DNA, 25 bp, Saccharomyces pastorianus
ttacccttgctactttgacgtgaac

SEQ ID NO: 59682 - DNA, 25 bp, Saccharomyces pastorianus
actggaattcgtcaagggtataagc

SEQ ID NO: 59683 - DNA, 25 bp, Saccharomyces pastorianus
aaagcccactgtcggtggctataca

SEQ ID NO: 59684 - DNA, 25 bp, Saccharomyces pastorianus
tatcacccagactacataacatttg

SEQ ID NO: 59685 - DNA, 25 bp, Saccharomyces pastorianus
tatactgttttactggaaagcccac

SEQ ID NO: 59686 - DNA, 25 bp, Saccharomyces pastorianus
gagaataatacccaccactctggaa

SEQ ID NO: 59687 - DNA, 25 bp, Saccharomyces pastorianus
gcctctttgtctcatattttggcaa

SEQ ID NO: 59688 - DNA, 25 bp, Saccharomyces pastorianus
agcaaattcttgacgcatccaaagt

SEQ ID NO: 59689 - DNA, 25 bp, Saccharomyces pastorianus
gagtcgtagaactagtcattggttt

SEQ ID NO: 59690 - DNA, 25 bp, Saccharomyces pastorianus
gcaatggtctgttgtctatcatcct

SEQ ID NO: 59691 - DNA, 25 bp, Saccharomyces pastorianus
tttacctgagacctgcctctttgtc

SEQ ID NO: 59692 - DNA, 25 bp, Saccharomyces pastorianus
gagtcaattaggcatcaaggtttta

SEQ ID NO: 59693 - DNA, 25 bp, Saccharomyces pastorianus
gagttctctagacactacaagcagc

SEQ ID NO: 59694 - DNA, 25 bp, Saccharomyces pastorianus
gaagataatggccagcagccaccta

SEQ ID NO: 59695 - DNA, 25 bp, Saccharomyces pastorianus
gcagccacctattacttcaaacttg

SEQ ID NO: 59696 - DNA, 25 bp, Saccharomyces pastorianus
aataacgcgtcgatcattcaagtaa

SEQ ID NO: 59697 - DNA, 25 bp, Saccharomyces pastorianus
gaatttctgacaatgctcacaccaa

SEQ ID NO: 59698 - DNA, 25 bp, Saccharomyces pastorianus
taattgctaatgtcgtggatccaag

SEQ ID NO: 59699 - DNA, 25 bp, Saccharomyces pastorianus
gtacccaattggatcactcacaaca

SEQ ID NO: 59700 - DNA, 25 bp, Saccharomyces pastorianus
ccccatttggtctcttcttatttga

SEQ ID NO: 59701 - DNA, 25 bp, Saccharomyces pastorianus
aaatccgatttgctagtatcacccc

SEQ ID NO: 59702 - DNA, 25 bp, Saccharomyces pastorianus
ttatcaagcttgtcgagttctctag

SEQ ID NO: 59703 - DNA, 25 bp, Saccharomyces pastorianus
tataacggttggtctctagtgggta

SEQ ID NO: 59704 - DNA, 25 bp, Saccharomyces pastorianus
gcgtcgatcgacacgtacgagcaga

SEQ ID NO: 59705 - DNA, 25 bp, Saccharomyces pastorianus
gacgagaccagcagcgtcgagccgt

SEQ ID NO: 59706 - DNA, 25 bp, Saccharomyces pastorianus
caaactgcgcttgggcgtcgatcga

SEQ ID NO: 59707 - DNA, 25 bp, Saccharomyces pastorianus
gttcacgaccccacgcgaaacggtg

SEQ ID NO: 59708 - DNA, 25 bp, Saccharomyces pastorianus
cgtccgtggacgagaccagcagcgt

SEQ ID NO: 59709 - DNA, 25 bp, Saccharomyces pastorianus
gagcagaacccgtccgtggacgaga

SEQ ID NO: 59710 - DNA, 25 bp, Saccharomyces pastorianus
gatcctcgcaccaaactgcgcttgg

SEQ ID NO: 59711 - DNA, 25 bp, Saccharomyces pastorianus
gtacgagcagaacccgtccgtggac

SEQ ID NO: 59712 - DNA, 25 bp, Saccharomyces pastorianus
ggtgggcgggttcttggcggctacg

SEQ ID NO: 59713 - DNA, 25 bp, Saccharomyces pastorianus
ttggcggctacgtcgtcgcccggtt

SEQ ID NO: 59714 - DNA, 25 bp, Saccharomyces pastorianus
atcgacacgtacgagcagaacccgt

SEQ ID NO: 59715 - DNA, 25 bp, Saccharomyces pastorianus
tggtgtgcattttcgtgttcaccgt

SEQ ID NO: 59716 - DNA, 25 bp, Saccharomyces pastorianus
gtgttcatactggtcttggtgtgca

SEQ ID NO: 59717 - DNA, 25 bp, Saccharomyces pastorianus
aggaatgccaagcaggcgcccacgc

SEQ ID NO: 59718 - DNA, 25 bp, Saccharomyces pastorianus
tggccccgcacgtgcagcaacagaa

SEQ ID NO: 59719 - DNA, 25 bp, Saccharomyces pastorianus
aaggtcgtgcaagacctcagggcca

SEQ ID NO: 59720 - DNA, 25 bp, Saccharomyces pastorianus
ggacggatcaactacagtgttcata

SEQ ID NO: 59721 - DNA, 25 bp, Saccharomyces pastorianus
tgttcaccgtgcagcgcaggaatgc

SEQ ID NO: 59722 - DNA, 25 bp, Saccharomyces pastorianus
tcgagatcgtgatgaccatggcccc

SEQ ID NO: 59723 - DNA, 25 bp, Saccharomyces pastorianus
aaagacccgtcaacaaggacatggt

SEQ ID NO: 59724 - DNA, 25 bp, Saccharomyces pastorianus
gccgcccagcgcgtgaacaggaaaa

SEQ ID NO: 59725 - DNA, 25 bp, Saccharomyces pastorianus
agagcctctgccagaagcgcatgcc

SEQ ID NO: 59726 - DNA, 25 bp, Saccharomyces pastorianus
agtggagaccctttgttatcgattt

SEQ ID NO: 59727 - DNA, 25 bp, Saccharomyces pastorianus
gagcgcaacttgaaccgcgatgata

SEQ ID NO: 59728 - DNA, 25 bp, Saccharomyces pastorianus
tagtcgaagtagacgttccttatga

SEQ ID NO: 59729 - DNA, 25 bp, Saccharomyces pastorianus
tgagttttccaccaatgatatcccc

SEQ ID NO: 59730 - DNA, 25 bp, Saccharomyces pastorianus
tccttagttcgcctcatggtgaaag

SEQ ID NO: 59731 - DNA, 25 bp, Saccharomyces pastorianus
tattgcgtttttctttgcctcaaag

SEQ ID NO: 59732 - DNA, 25 bp, Saccharomyces pastorianus
agagctattcaatttggcgccaaga

SEQ ID NO: 59733 - DNA, 25 bp, Saccharomyces pastorianus
atacccctttttggatgaacatgtt

SEQ ID NO: 59734 - DNA, 25 bp, Saccharomyces pastorianus
atggacttgtctatcgctattgcgt

SEQ ID NO: 59735 - DNA, 25 bp, Saccharomyces pastorianus
ataagccgcctcatgaactcgtgga

SEQ ID NO: 59736 - DNA, 25 bp, Saccharomyces pastorianus
tattcttcggaaagtggcttctcaa

SEQ ID NO: 59737 - DNA, 25 bp, Saccharomyces pastorianus
tctttgaccatcgaggcccagataa

SEQ ID NO: 59738 - DNA, 25 bp, Saccharomyces pastorianus
tgaagcgatgagcaagcagcaacaa

SEQ ID NO: 59739 - DNA, 25 bp, Saccharomyces pastorianus
gaaaaaagcgccaatgcagcaattt

SEQ ID NO: 59740 - DNA, 25 bp, Saccharomyces pastorianus
aagacccaatactctttgaccatcg

SEQ ID NO: 59741 - DNA, 25 bp, Saccharomyces pastorianus
acaaaagctactggttcctgcatct

SEQ ID NO: 59742 - DNA, 25 bp, Saccharomyces pastorianus
ttcatggtagacatcggaaccggat

SEQ ID NO: 59743 - DNA, 25 bp, Saccharomyces pastorianus
caatgcagcaattttgttctaccaa

SEQ ID NO: 59744 - DNA, 25 bp, Saccharomyces pastorianus
gacaggctgctatcagacagcatga

SEQ ID NO: 59745 - DNA, 25 bp, Saccharomyces pastorianus
gaggcccagataagacaggctgcta

SEQ ID NO: 59746 - DNA, 25 bp, Saccharomyces pastorianus
atcaaaacagtttcccagccagaaa

SEQ ID NO: 59747 - DNA, 25 bp, Saccharomyces pastorianus
aagcttaacaaggaatctgtgcaaa

SEQ ID NO: 59748 - DNA, 25 bp, Saccharomyces pastorianus
aaacccagagttactaggctacact

SEQ ID NO: 59749 - DNA, 25 bp, Saccharomyces pastorianus
ttcacatcgccttactaacactaaa

SEQ ID NO: 59750 - DNA, 25 bp, Saccharomyces pastorianus
gccataatcggtgatgaaaacccag

SEQ ID NO: 59751 - DNA, 25 bp, Saccharomyces pastorianus
gaggatgctattcacatcgccttac

SEQ ID NO: 59752 - DNA, 25 bp, Saccharomyces pastorianus
gtcgatccttctggttcttacttcc

SEQ ID NO: 59753 - DNA, 25 bp, Saccharomyces pastorianus
atgatgaattggaactcgaggatgc

SEQ ID NO: 59754 - DNA, 25 bp, Saccharomyces pastorianus
ggtgacaccatagaattagccataa

SEQ ID NO: 59755 - DNA, 25 bp, Saccharomyces pastorianus
gtggctgcaaagacctttttggaga

SEQ ID NO: 59756 - DNA, 25 bp, Saccharomyces pastorianus
gaaaaggttcggtggctgcaaagac

SEQ ID NO: 59757 - DNA, 25 bp, Saccharomyces pastorianus
tggtattccaactgacaaaggtcct

SEQ ID NO: 59758 - DNA, 25 bp, Saccharomyces pastorianus
gacaaaggtcctagattcagaaaat

SEQ ID NO: 59759 - DNA, 25 bp, Saccharomyces pastorianus
tatatggccacctgtctattataca

SEQ ID NO: 59760 - DNA, 25 bp, Saccharomyces pastorianus
agagccgtatgtatgctatcaaaca

SEQ ID NO: 59761 - DNA, 25 bp, Saccharomyces pastorianus
gatttgacggttcactaaatgtgga

SEQ ID NO: 59762 - DNA, 25 bp, Saccharomyces pastorianus
atcaaacactacatccattgctgag

SEQ ID NO: 59763 - DNA, 25 bp, Saccharomyces pastorianus
tagtcgattggtgcccaactggttt

SEQ ID NO: 59764 - DNA, 25 bp, Saccharomyces pastorianus
gttcaactagtcgattggtgcccaa

SEQ ID NO: 59765 - DNA, 25 bp, Saccharomyces pastorianus
acgaatccaattccgtctcagagat

SEQ ID NO: 59766 - DNA, 25 bp, Saccharomyces pastorianus
aatggtcaaatgtgatcctagagat

SEQ ID NO: 59767 - DNA, 25 bp, Saccharomyces pastorianus
caagtcaaaggcattccacgaatcc

SEQ ID NO: 59768 - DNA, 25 bp, Saccharomyces pastorianus
caaactcccaattggcttctgtgga

SEQ ID NO: 59769 - DNA, 25 bp, Saccharomyces pastorianus
tctgtgacagcgtctttaagatttg

SEQ ID NO: 59770 - DNA, 25 bp, Saccharomyces pastorianus
taagcatgcacacagggatcatccc

SEQ ID NO: 59771 - DNA, 25 bp, Saccharomyces pastorianus
acgctttgaaatccctcgatcatga

SEQ ID NO: 59772 - DNA, 25 bp, Saccharomyces pastorianus
aatcacgttatcaagccatcgctat

SEQ ID NO: 59773 - DNA, 25 bp, Saccharomyces pastorianus
acatcattatctaacgcttgcacca

SEQ ID NO: 59774 - DNA, 25 bp, Saccharomyces pastorianus
ggatcatccctacaggcaacttttt

SEQ ID NO: 59775 - DNA, 25 bp, Saccharomyces pastorianus
atattatccttcaaccatagcacca

SEQ ID NO: 59776 - DNA, 25 bp, Saccharomyces pastorianus
ggtaactgaccctacgcatctgaaa

SEQ ID NO: 59777 - DNA, 25 bp, Saccharomyces pastorianus
tcaacggtggacattgccatcccat

SEQ ID NO: 59778 - DNA, 25 bp, Saccharomyces pastorianus
ggtcaaattcgaatccgtcaacggt

SEQ ID NO: 59779 - DNA, 25 bp, Saccharomyces pastorianus
aatcctccttcgagtcgctgtgtat

SEQ ID NO: 59780 - DNA, 25 bp, Saccharomyces pastorianus
gtgtatcctatctttcgagcagttc

SEQ ID NO: 59781 - DNA, 25 bp, Saccharomyces pastorianus
tagcggctggccatttagtgcagag

SEQ ID NO: 59782 - DNA, 25 bp, Saccharomyces pastorianus
acggctgttttcttggcattgggac

SEQ ID NO: 59783 - DNA, 25 bp, Saccharomyces pastorianus
aagaattgtcgcatgtgccgtcctg

SEQ ID NO: 59784 - DNA, 25 bp, Saccharomyces pastorianus
atgccatccatcgaagtcggaacca

SEQ ID NO: 59785 - DNA, 25 bp, Saccharomyces pastorianus
aagaatttctgtatccatgccatcc

SEQ ID NO: 59786 - DNA, 25 bp, Saccharomyces pastorianus
gtgccatgctagacctattgggtgt

SEQ ID NO: 59787 - DNA, 25 bp, Saccharomyces pastorianus
aagagtgttgttgccgaagctacta

SEQ ID NO: 59788 - DNA, 25 bp, Saccharomyces pastorianus
gcagagtcatatggcgcacaacagg

SEQ ID NO: 59789 - DNA, 25 bp, Saccharomyces pastorianus
ggatgccactgacatcaatcgtttg

SEQ ID NO: 59790 - DNA, 25 bp, Saccharomyces pastorianus
gtgggtttaacgcacacgcagccaa

SEQ ID NO: 59791 - DNA, 25 bp, Saccharomyces pastorianus
tgaactatccttatgtgctgcccta

SEQ ID NO: 59792 - DNA, 25 bp, Saccharomyces pastorianus
agctcggccgtggtgaagtcatcaa

SEQ ID NO: 59793 - DNA, 25 bp, Saccharomyces pastorianus
tggtaaaccattcgctttcaagctc

SEQ ID NO: 59794 - DNA, 25 bp, Saccharomyces pastorianus
gacttgacaccagacgaagacgaaa

SEQ ID NO: 59795 - DNA, 25 bp, Saccharomyces pastorianus
agcgaacgtagaatcgtcatcccag

SEQ ID NO: 59796 - DNA, 25 bp, Saccharomyces pastorianus
catcggtgttgctggcatgtgcgtc

SEQ ID NO: 59797 - DNA, 25 bp, Saccharomyces pastorianus
caggcattcctgcaaactctgaact

SEQ ID NO: 59798 - DNA, 25 bp, Saccharomyces pastorianus
atacgcctacggtagccaagcctta

SEQ ID NO: 59799 - DNA, 25 bp, Saccharomyces pastorianus
gggtgacggcccacaagctaagaga

SEQ ID NO: 59800 - DNA, 25 bp, Saccharomyces pastorianus
ttgtcatcgaagaccgtgccatggg

SEQ ID NO: 59801 - DNA, 25 bp, Saccharomyces pastorianus
catgtgcgtcggtagcgaacgtaga

SEQ ID NO: 59802 - DNA, 25 bp, Saccharomyces pastorianus
tcttggaaggcggtattgtcatcga

SEQ ID NO: 59803 - DNA, 25 bp, Saccharomyces pastorianus
attagctacctacaacttgaacgtt

SEQ ID NO: 59804 - DNA, 25 bp, Saccharomyces pastorianus
actccggttccagccatcgatgtaa

SEQ ID NO: 59805 - DNA, 25 bp, Saccharomyces pastorianus
taacgatgcccattaccatccgtat

SEQ ID NO: 59806 - DNA, 25 bp, Saccharomyces pastorianus
tcgatgtaacgatgcccattaccat

SEQ ID NO: 59807 - DNA, 25 bp, Saccharomyces pastorianus
ctttaaatcctgaagccatcgatga

SEQ ID NO: 59808 - DNA, 25 bp, Saccharomyces pastorianus
attaccatccgtatcaccatggctg

SEQ ID NO: 59809 - DNA, 25 bp, Saccharomyces pastorianus
tccgtatcaccatggctgctttaaa

SEQ ID NO: 59810 - DNA, 25 bp, Saccharomyces pastorianus
accatggctgctttaaatcctgaag

SEQ ID NO: 59811 - DNA, 25 bp, Saccharomyces pastorianus
gctaccattagctacctacaacttg

SEQ ID NO: 59812 - DNA, 25 bp, Saccharomyces pastorianus
tgaacgttgaaccttacactccggt

SEQ ID NO: 59813 - DNA, 25 bp, Saccharomyces pastorianus
gccatcgatgaagacaataaaccgt

SEQ ID NO: 59814 - DNA, 25 bp, Saccharomyces pastorianus
atcgcttgagattgcacttgacact

SEQ ID NO: 59815 - DNA, 25 bp, Saccharomyces pastorianus
aaaggatgcgttgtctcaagccgtt

SEQ ID NO: 59816 - DNA, 25 bp, Saccharomyces pastorianus
gcggttggtacctacgactttgaca

SEQ ID NO: 59817 - DNA, 25 bp, Saccharomyces pastorianus
gagagcgaaccacacatcacggaat

SEQ ID NO: 59818 - DNA, 25 bp, Saccharomyces pastorianus
gatatcgtggccaaatcgcttgaga

SEQ ID NO: 59819 - DNA, 25 bp, Saccharomyces pastorianus
tatcctgttgtctggtttttcgcac

SEQ ID NO: 59820 - DNA, 25 bp, Saccharomyces pastorianus
agccaaattcggtagagcctcgtat

SEQ ID NO: 59821 - DNA, 25 bp, Saccharomyces pastorianus
gactttgacacctttgccaagtgga

SEQ ID NO: 59822 - DNA, 25 bp, Saccharomyces pastorianus
tttttcgcacgggttgatccaagtc

SEQ ID NO: 59823 - DNA, 25 bp, Saccharomyces pastorianus
atgtcggcgactcctctaaagtgga

SEQ ID NO: 59824 - DNA, 25 bp, Saccharomyces pastorianus
gaaggcgctaagtctactgcaacat

SEQ ID NO: 59825 - DNA, 25 bp, Saccharomyces pastorianus
gcgatatgttcgtttttggtctact

SEQ ID NO: 59826 - DNA, 25 bp, Saccharomyces pastorianus
ggattcacgtaaagcgccactggaa

SEQ ID NO: 59827 - DNA, 25 bp, Saccharomyces pastorianus
tggctctaatcaccgttatgggacc

SEQ ID NO: 59828 - DNA, 25 bp, Saccharomyces pastorianus
agccattgtccattgttgtttccga

SEQ ID NO: 59829 - DNA, 25 bp, Saccharomyces pastorianus
ggatgaacccttaactgcttatgtc

SEQ ID NO: 59830 - DNA, 25 bp, Saccharomyces pastorianus
gtctattacacatccgttgttccaa

SEQ ID NO: 59831 - DNA, 25 bp, Saccharomyces pastorianus
gttgtcgtatggtgacttctaccca

SEQ ID NO: 59832 - DNA, 25 bp, Saccharomyces pastorianus
tgaactttgctcacgtcatcaacga

SEQ ID NO: 59833 - DNA, 25 bp, Saccharomyces pastorianus
atggctgtcacatattcggatccgt

SEQ ID NO: 59834 - DNA, 25 bp, Saccharomyces pastorianus
tgcctcatggattttcacgtttctg

SEQ ID NO: 59835 - DNA, 25 bp, Saccharomyces pastorianus
tcacgtttctggacatggctctaat

SEQ ID NO: 59836 - DNA, 25 bp, Saccharomyces pastorianus
acacgaggtaccgaagactttatag

SEQ ID NO: 59837 - DNA, 25 bp, Saccharomyces pastorianus
tcagagcattggtgaagaaacgaca

SEQ ID NO: 59838 - DNA, 25 bp, Saccharomyces pastorianus
gactttatagaagaccaagatacga

SEQ ID NO: 59839 - DNA, 25 bp, Saccharomyces pastorianus
cgaccagctggctgagaaacgtggc

SEQ ID NO: 59840 - DNA, 25 bp, Saccharomyces pastorianus
tggcggagatgaacagaatacagtc

SEQ ID NO: 59841 - DNA, 25 bp, Saccharomyces pastorianus
ccaagatacgatcagtgaagcggtg

SEQ ID NO: 59842 - DNA, 25 bp, Saccharomyces pastorianus
gaaaacgatcgtcagagcattggtg

SEQ ID NO: 59843 - DNA, 25 bp, Saccharomyces pastorianus
aggcaggaaacgaccagctggctga

SEQ ID NO: 59844 - DNA, 25 bp, Saccharomyces pastorianus
aacagaatacagtctatggatgaaa

SEQ ID NO: 59845 - DNA, 25 bp, Saccharomyces pastorianus
gaaacgacacgaggtaccgaagact

SEQ ID NO: 59846 - DNA, 25 bp, Saccharomyces pastorianus
gccatgaatatgatgaccaggacga

SEQ ID NO: 59847 - DNA, 25 bp, Saccharomyces pastorianus
taaagagtatccatagcaggctgct

SEQ ID NO: 59848 - DNA, 25 bp, Saccharomyces pastorianus
atgtcaacaagataccctggccaaa

SEQ ID NO: 59849 - DNA, 25 bp, Saccharomyces pastorianus
aagagcttggtggtgatttggttaa

SEQ ID NO: 59850 - DNA, 25 bp, Saccharomyces pastorianus
acagcttcgatttttgggcctgcaa

SEQ ID NO: 59851 - DNA, 25 bp, Saccharomyces pastorianus
gcctgcaatcctcaatcgatacaaa

SEQ ID NO: 59852 - DNA, 25 bp, Saccharomyces pastorianus
cttaggagccaaattgcctgaatta

SEQ ID NO: 59853 - DNA, 25 bp, Saccharomyces pastorianus
gtaaagctgaggctctgactaaaga

SEQ ID NO: 59854 - DNA, 25 bp, Saccharomyces pastorianus
atcagaagggcgtacaagtctcgtt

SEQ ID NO: 59855 - DNA, 25 bp, Saccharomyces pastorianus
aagtctcgttgtaacacgctcagaa

SEQ ID NO: 59856 - DNA, 25 bp, Saccharomyces pastorianus
ttgcaaggtcttcacgattccgtaa

SEQ ID NO: 59857 - DNA, 25 bp, Saccharomyces pastorianus
agcaggctgcttctacgtattggaa

SEQ ID NO: 59858 - DNA, 25 bp, Saccharomyces pastorianus
atcgagctcgttcattggtggccga

SEQ ID NO: 59859 - DNA, 25 bp, Saccharomyces pastorianus
tcgttcattggtggccgacaaacgt

SEQ ID NO: 59860 - DNA, 25 bp, Saccharomyces pastorianus
ttcattggtggccgacaaacgtaat

SEQ ID NO: 59861 - DNA, 25 bp, Saccharomyces pastorianus
aacagactcaaacgataatcgagct

SEQ ID NO: 59862 - DNA, 25 bp, Saccharomyces pastorianus
atgttacaaaggcatagcagaaaga

SEQ ID NO: 59863 - DNA, 25 bp, Saccharomyces pastorianus
tcaaccgaaaacagactcaaacgat

SEQ ID NO: 59864 - DNA, 25 bp, Saccharomyces pastorianus
gctcgttcattggtggccgacaaac

SEQ ID NO: 59865 - DNA, 25 bp, Saccharomyces pastorianus
gcatagcagaaagagatttcaaccg

SEQ ID NO: 59866 - DNA, 25 bp, Saccharomyces pastorianus
gagctcgttcattggtggccgacaa

SEQ ID NO: 59867 - DNA, 25 bp, Saccharomyces pastorianus
gagatttcaaccgaaaacagactca

SEQ ID NO: 59868 - DNA, 25 bp, Saccharomyces pastorianus
taatcgagctcgttcattggtggcc

SEQ ID NO: 59869 - DNA, 25 bp, Saccharomyces pastorianus
gtggacgccactttagttaatggat

SEQ ID NO: 59870 - DNA, 25 bp, Saccharomyces pastorianus
gattcctcggtttttgattttatga

SEQ ID NO: 59871 - DNA, 25 bp, Saccharomyces pastorianus
gtacatgtgttcaatgccatcgatg

SEQ ID NO: 59872 - DNA, 25 bp, Saccharomyces pastorianus
aacggagattgcctttagtgagatt

SEQ ID NO: 59873 - DNA, 25 bp, Saccharomyces pastorianus
gggttttgctaaaagctctacagac

SEQ ID NO: 59874 - DNA, 25 bp, Saccharomyces pastorianus
gttacagaatttcctagccccaaag

SEQ ID NO: 59875 - DNA, 25 bp, Saccharomyces pastorianus
gacgaacgtgtctctccattagatt

SEQ ID NO: 59876 - DNA, 25 bp, Saccharomyces pastorianus
aaactaccaggtcgcgtacatgtgt

SEQ ID NO: 59877 - DNA, 25 bp, Saccharomyces pastorianus
aatggatcccttggcaaagttattg

SEQ ID NO: 59878 - DNA, 25 bp, Saccharomyces pastorianus
tgcatttaaaagtaggcgcccaagt

SEQ ID NO: 59879 - DNA, 25 bp, Saccharomyces pastorianus
cccatctatgccctcggataaatta

SEQ ID NO: 59880 - DNA, 25 bp, Saccharomyces pastorianus
gcggcgccctgtctaatggtataga

SEQ ID NO: 59881 - DNA, 25 bp, Saccharomyces pastorianus
tggcggttgccaaagtctctaggat

SEQ ID NO: 59882 - DNA, 25 bp, Saccharomyces pastorianus
catcaggcaattcaacatgacccca

SEQ ID NO: 59883 - DNA, 25 bp, Saccharomyces pastorianus
gctggtagcaatcttgaacatctgt

SEQ ID NO: 59884 - DNA, 25 bp, Saccharomyces pastorianus
gacgaagctctatccacttttgaaa

SEQ ID NO: 59885 - DNA, 25 bp, Saccharomyces pastorianus
aaagtcaccgagatgctggtagcaa

SEQ ID NO: 59886 - DNA, 25 bp, Saccharomyces pastorianus
gcgcaaatatacctccatcctggat

SEQ ID NO: 59887 - DNA, 25 bp, Saccharomyces pastorianus
gtctctaggatgtattctgtcctaa

SEQ ID NO: 59888 - DNA, 25 bp, Saccharomyces pastorianus
gaaattgccccaggtaagccaacca

SEQ ID NO: 59889 - DNA, 25 bp, Saccharomyces pastorianus
agaaataagatcttggcggttgcca

SEQ ID NO: 59890 - DNA, 25 bp, Saccharomyces pastorianus
gaagaactggttggcactgataaga

SEQ ID NO: 59891 - DNA, 25 bp, Saccharomyces pastorianus
ggttgcctcgtcacgaattcttaag

SEQ ID NO: 59892 - DNA, 25 bp, Saccharomyces pastorianus
cgatcactgtctgcggtgacatcca

SEQ ID NO: 59893 - DNA, 25 bp, Saccharomyces pastorianus
gaaaactgtctttggcgcaggcggc

SEQ ID NO: 59894 - DNA, 25 bp, Saccharomyces pastorianus
gtagattccaagctcgcttctgctg

SEQ ID NO: 59895 - DNA, 25 bp, Saccharomyces pastorianus
aagagaccatttcaagcgcgaagga

SEQ ID NO: 59896 - DNA, 25 bp, Saccharomyces pastorianus
tcacacagtataccctcgataacgg

SEQ ID NO: 59897 - DNA, 25 bp, Saccharomyces pastorianus
ctcgctaccgaactcttgagcaaag

SEQ ID NO: 59898 - DNA, 25 bp, Saccharomyces pastorianus
atggccagtacttcgatcttctgaa

SEQ ID NO: 59899 - DNA, 25 bp, Saccharomyces pastorianus
gaatcatgagcaaggtgcccgccat

SEQ ID NO: 59900 - DNA, 25 bp, Saccharomyces pastorianus
gaatcgttcgcgactgccgtagatt

SEQ ID NO: 59901 - DNA, 25 bp, Saccharomyces pastorianus
aaggaccgtggcgacgaaccataga

SEQ ID NO: 59902 - DNA, 25 bp, Saccharomyces pastorianus
attcttgtcaagatatcggtcacac

SEQ ID NO: 59903 - DNA, 25 bp, Saccharomyces pastorianus
agtcagatttgagttcagaaccgcc

SEQ ID NO: 59904 - DNA, 25 bp, Saccharomyces pastorianus
gtttacaacgttagtcaattcgcta

SEQ ID NO: 59905 - DNA, 25 bp, Saccharomyces pastorianus
aaaaccggtagctcgggcaatgcct

SEQ ID NO: 59906 - DNA, 25 bp, Saccharomyces pastorianus
tgtttctggttctgttgttgacaag

SEQ ID NO: 59907 - DNA, 25 bp, Saccharomyces pastorianus
aaactgaccatgtgttggttgcaca

SEQ ID NO: 59908 - DNA, 25 bp, Saccharomyces pastorianus
tatttctctgaaactgaccatgtgt

SEQ ID NO: 59909 - DNA, 25 bp, Saccharomyces pastorianus
cgggcaatgcctctacttctcgtta

SEQ ID NO: 59910 - DNA, 25 bp, Saccharomyces pastorianus
tatcggtcacacatcattgacccta

SEQ ID NO: 59911 - DNA, 25 bp, Saccharomyces pastorianus
cagaaccgcctctgctcaattggaa

SEQ ID NO: 59912 - DNA, 25 bp, Saccharomyces pastorianus
caattcgctaacgaattcggcgttc

SEQ ID NO: 59913 - DNA, 25 bp, Saccharomyces pastorianus
ggtttcatcaactctccaattgtca

SEQ ID NO: 59914 - DNA, 25 bp, Saccharomyces pastorianus
aatggctatcagcatggctttgttg

SEQ ID NO: 59915 - DNA, 25 bp, Saccharomyces pastorianus
acttcccatcttctgccgttagttt

SEQ ID NO: 59916 - DNA, 25 bp, Saccharomyces pastorianus
tctctggtcttccagttactggtat

SEQ ID NO: 59917 - DNA, 25 bp, Saccharomyces pastorianus
gaaagccttagaacacttgaagaca

SEQ ID NO: 59918 - DNA, 25 bp, Saccharomyces pastorianus
gaagatatctttgaacactccattt

SEQ ID NO: 59919 - DNA, 25 bp, Saccharomyces pastorianus
attgtcatttctccaactactactg

SEQ ID NO: 59920 - DNA, 25 bp, Saccharomyces pastorianus
gatttcttggttttaccagggctgg

SEQ ID NO: 59921 - DNA, 25 bp, Saccharomyces pastorianus
atgactgctccaatggaccacaaga

SEQ ID NO: 59922 - DNA, 25 bp, Saccharomyces pastorianus
aaagatggtctttcagtccaggaat

SEQ ID NO: 59923 - DNA, 25 bp, Saccharomyces pastorianus
ttaccagggctggttgacttcccat

SEQ ID NO: 59924 - DNA, 25 bp, Saccharomyces pastorianus
agattggagcttggtttgcggccat

SEQ ID NO: 59925 - DNA, 25 bp, Saccharomyces pastorianus
acaccaaaactgtccttcaaagatt

SEQ ID NO: 59926 - DNA, 25 bp, Saccharomyces pastorianus
gtgggccccgacattattaaagcct

SEQ ID NO: 59927 - DNA, 25 bp, Saccharomyces pastorianus
gcggccattacaatagagacgctaa

SEQ ID NO: 59928 - DNA, 25 bp, Saccharomyces pastorianus
agaggaatttgcatcctttctggat

SEQ ID NO: 59929 - DNA, 25 bp, Saccharomyces pastorianus
accatctcaccaagttcgccataag

SEQ ID NO: 59930 - DNA, 25 bp, Saccharomyces pastorianus
atctacccacacaatttgaggcttt

SEQ ID NO: 59931 - DNA, 25 bp, Saccharomyces pastorianus
attggtggccatgtttttgctggaa

SEQ ID NO: 59932 - DNA, 25 bp, Saccharomyces pastorianus
aaagattacttaagcggccaggcca

SEQ ID NO: 59933 - DNA, 25 bp, Saccharomyces pastorianus
gaaggagctcttcagacaccaaaac

SEQ ID NO: 59934 - DNA, 25 bp, Saccharomyces pastorianus
actggactcattgtggtttggaaaa

SEQ ID NO: 59935 - DNA, 25 bp, Saccharomyces pastorianus
ggttttgaacgtgtcagcttgccag

SEQ ID NO: 59936 - DNA, 25 bp, Saccharomyces pastorianus
caagatcaaaccatatgttactgcc

SEQ ID NO: 59937 - DNA, 25 bp, Saccharomyces pastorianus
gtcagcttgccagaacttcattctg

SEQ ID NO: 59938 - DNA, 25 bp, Saccharomyces pastorianus
tgttactgccaaaagctaaactcaa

SEQ ID NO: 59939 - DNA, 25 bp, Saccharomyces pastorianus
gcactttttcatcgtggttttgaac

SEQ ID NO: 59940 - DNA, 25 bp, Saccharomyces pastorianus
agaacttcattctgccacccaacaa

SEQ ID NO: 59941 - DNA, 25 bp, Saccharomyces pastorianus
accttacatcaacgtgcactttttc

SEQ ID NO: 59942 - DNA, 25 bp, Saccharomyces pastorianus
ggattattaccttacatcaacgtgc

SEQ ID NO: 59943 - DNA, 25 bp, Saccharomyces pastorianus
caacgtgcactttttcatcgtggtt

SEQ ID NO: 59944 - DNA, 25 bp, Saccharomyces pastorianus
tgccacccaacaagatcaaaccata

SEQ ID NO: 59945 - DNA, 25 bp, Saccharomyces pastorianus
aaagctaaactcaaggctgccatca

SEQ ID NO: 59946 - DNA, 25 bp, Saccharomyces pastorianus
gaagttattatgctcctgtgcgtat

SEQ ID NO: 59947 - DNA, 25 bp, Saccharomyces pastorianus
ggtgctttattccattattatccaa

SEQ ID NO: 59948 - DNA, 25 bp, Saccharomyces pastorianus
tgctcctgtgcgtatggttatcgac

SEQ ID NO: 59949 - DNA, 25 bp, Saccharomyces pastorianus
gtgaattatcagacggcaccatcaa

SEQ ID NO: 59950 - DNA, 25 bp, Saccharomyces pastorianus
gatcgtattccattgtaggcagaga

SEQ ID NO: 59951 - DNA, 25 bp, Saccharomyces pastorianus
agcatctcaaattctgataggccag

SEQ ID NO: 59952 - DNA, 25 bp, Saccharomyces pastorianus
ggttatcgacggtgacctatgtgaa

SEQ ID NO: 59953 - DNA, 25 bp, Saccharomyces pastorianus
ggcaccatcaagtacccattgaatt

SEQ ID NO: 59954 - DNA, 25 bp, Saccharomyces pastorianus
tgatgtactaaaccacctctacgtt

SEQ ID NO: 59955 - DNA, 25 bp, Saccharomyces pastorianus
agaggaacccgccagtgtcgtgtta

SEQ ID NO: 59956 - DNA, 25 bp, Saccharomyces pastorianus
gtcgtgttacacaggcgaggtgata

SEQ ID NO: 59957 - DNA, 25 bp, Saccharomyces pastorianus
cacggcagagatgcgtctgctatat

SEQ ID NO: 59958 - DNA, 25 bp, Saccharomyces pastorianus
atatgagcaagccacgacgacgatg

SEQ ID NO: 59959 - DNA, 25 bp, Saccharomyces pastorianus
tgagcaagccacgacgacgatgagc

SEQ ID NO: 59960 - DNA, 25 bp, Saccharomyces pastorianus
aatagtaggattgtcgccccacacg

SEQ ID NO: 59961 - DNA, 25 bp, Saccharomyces pastorianus
ccacacggcagagatgcgtctgcta

SEQ ID NO: 59962 - DNA, 25 bp, Saccharomyces pastorianus
gcgtctgctatatgagcaagccacg

SEQ ID NO: 59963 - DNA, 25 bp, Saccharomyces pastorianus
cagagatgcgtctgctatatgagca

SEQ ID NO: 59964 - DNA, 25 bp, Saccharomyces pastorianus
gcaagccacgacgacgatgagcttt

SEQ ID NO: 59965 - DNA, 25 bp, Saccharomyces pastorianus
gatgcgtctgctatatgagcaagcc

SEQ ID NO: 59966 - DNA, 25 bp, Saccharomyces pastorianus
gtggcaaaacggcaatagtaggatt

SEQ ID NO: 59967 - DNA, 25 bp, Saccharomyces pastorianus
gcaatagtaggattgtcgccccaca

SEQ ID NO: 59968 - DNA, 25 bp, Saccharomyces pastorianus
cttctccttcttctaacagcaataa

SEQ ID NO: 59969 - DNA, 25 bp, Saccharomyces pastorianus
agagagccacttatgacgattatca

SEQ ID NO: 59970 - DNA, 25 bp, Saccharomyces pastorianus
tagattcactgcttctactttcaca

SEQ ID NO: 59971 - DNA, 25 bp, Saccharomyces pastorianus
gccggtgaaggtttccaaagtcgct

SEQ ID NO: 59972 - DNA, 25 bp, Saccharomyces pastorianus
tagccactttggttaagctcagaag

SEQ ID NO: 59973 - DNA, 25 bp, Saccharomyces pastorianus
atggtaagaaccctgcaggcgccag

SEQ ID NO: 59974 - DNA, 25 bp, Saccharomyces pastorianus
ctacagggccggtgccatcaggaaa

SEQ ID NO: 59975 - DNA, 25 bp, Saccharomyces pastorianus
tttgagagacatggcttctccttct

SEQ ID NO: 59976 - DNA, 25 bp, Saccharomyces pastorianus
gaaagccgcagctccaggtattcaa

SEQ ID NO: 59977 - DNA, 25 bp, Saccharomyces pastorianus
gtgcgacagacttgaagaccctttt

SEQ ID NO: 59978 - DNA, 25 bp, Saccharomyces pastorianus
atgggtggtccagttgctgcctaca

SEQ ID NO: 59979 - DNA, 25 bp, Saccharomyces pastorianus
tggaattgaacgactccaagccgct

SEQ ID NO: 59980 - DNA, 25 bp, Saccharomyces pastorianus
gcgttccaggtgtcgaacgacgaca

SEQ ID NO: 59981 - DNA, 25 bp, Saccharomyces pastorianus
gttgagcgcgactatgcgttccagg

SEQ ID NO: 59982 - DNA, 25 bp, Saccharomyces pastorianus
ggccaactagttgttcctcagtgga

SEQ ID NO: 59983 - DNA, 25 bp, Saccharomyces pastorianus
tagaaagattttcccctccaagacg

SEQ ID NO: 59984 - DNA, 25 bp, Saccharomyces pastorianus
aggtggctgtttgatgtttcattac

SEQ ID NO: 59985 - DNA, 25 bp, Saccharomyces pastorianus
aggccttcaatcttccacgagaaaa

SEQ ID NO: 59986 - DNA, 25 bp, Saccharomyces pastorianus
gaacgacgacaccatcaataacaag

SEQ ID NO: 59987 - DNA, 25 bp, Saccharomyces pastorianus
gatatctgtccgaaggtggctgttt

SEQ ID NO: 59988 - DNA, 25 bp, Saccharomyces pastorianus
ttaatggtgctcaggccttcaatct

SEQ ID NO: 59989 - DNA, 25 bp, Saccharomyces pastorianus
gtttcattacgacgctgataacgaa

SEQ ID NO: 59990 - DNA, 25 bp, Saccharomyces pastorianus
cgaccacgccatttacacattatac

SEQ ID NO: 59991 - DNA, 25 bp, Saccharomyces pastorianus
ttatgcgtagcgaccacgccattta

SEQ ID NO: 59992 - DNA, 25 bp, Saccharomyces pastorianus
tccacttttttattcgcagatttat

SEQ ID NO: 59993 - DNA, 25 bp, Saccharomyces pastorianus
acattatgcgtagcgaccacgccat

SEQ ID NO: 59994 - DNA, 25 bp, Saccharomyces pastorianus
gcgaccacgccatttacacattata

SEQ ID NO: 59995 - DNA, 25 bp, Saccharomyces pastorianus
tagcgaccacgccatttacacatta

SEQ ID NO: 59996 - DNA, 25 bp, Saccharomyces pastorianus
atacattatgcgtagcgaccacgcc

SEQ ID NO: 59997 - DNA, 25 bp, Saccharomyces pastorianus
ccacttttttattcgcagatttata

SEQ ID NO: 59998 - DNA, 25 bp, Saccharomyces pastorianus
tttacacattatactaacttcttct

SEQ ID NO: 59999 - DNA, 25 bp, Saccharomyces pastorianus
ttattcgcagatttataaattgaac

SEQ ID NO: 60000 - DNA, 25 bp, Saccharomyces pastorianus
atgcgtagcgaccacgccatttaca

SEQ ID NO: 60001 - DNA, 25 bp, Saccharomyces pastorianus
agtatcgatatcgttctttgaacaa

SEQ ID NO: 60002 - DNA, 25 bp, Saccharomyces pastorianus
gagcttatctgcctaaactttcaca

SEQ ID NO: 60003 - DNA, 25 bp, Saccharomyces pastorianus
acatcttttgcatttgttgacccta

SEQ ID NO: 60004 - DNA, 25 bp, Saccharomyces pastorianus
gaccggtgtagagatcgagtttaac

SEQ ID NO: 60005 - DNA, 25 bp, Saccharomyces pastorianus
gagtgtgtattgtgcctttcaccca

SEQ ID NO: 60006 - DNA, 25 bp, Saccharomyces pastorianus
gaattatcttctatagtgaccggtg

SEQ ID NO: 60007 - DNA, 25 bp, Saccharomyces pastorianus
atcagcgatgccttccaaaaatttg

SEQ ID NO: 60008 - DNA, 25 bp, Saccharomyces pastorianus
tgaccctaaattgatctgttcgcag

SEQ ID NO: 60009 - DNA, 25 bp, Saccharomyces pastorianus
gagcgatttatcaacatcttttgca

SEQ ID NO: 60010 - DNA, 25 bp, Saccharomyces pastorianus
atattccgctatttacaagactcta

SEQ ID NO: 60011 - DNA, 25 bp, Saccharomyces pastorianus
gaacaactggccaacgaattatctt

SEQ ID NO: 60012 - DNA, 25 bp, Saccharomyces pastorianus
agctcaaatcaatgtccagttcaga

SEQ ID NO: 60013 - DNA, 25 bp, Saccharomyces pastorianus
gaatgcatatttgagcgtagtccaa

SEQ ID NO: 60014 - DNA, 25 bp, Saccharomyces pastorianus
gacatcttcctttcggatatcgtgg

SEQ ID NO: 60015 - DNA, 25 bp, Saccharomyces pastorianus
ggccgatttggctgatgtttttact

SEQ ID NO: 60016 - DNA, 25 bp, Saccharomyces pastorianus
ggagcccaatggtccaaatgatcca

SEQ ID NO: 60017 - DNA, 25 bp, Saccharomyces pastorianus
aatttgaccgaaatacgcggcgaca

SEQ ID NO: 60018 - DNA, 25 bp, Saccharomyces pastorianus
aatacgcggcgacattatgaaatgc

SEQ ID NO: 60019 - DNA, 25 bp, Saccharomyces pastorianus
gaaggccaagatcgaaggactaatt

SEQ ID NO: 60020 - DNA, 25 bp, Saccharomyces pastorianus
atggatagggccgttggagcccaat

SEQ ID NO: 60021 - DNA, 25 bp, Saccharomyces pastorianus
aattacgtgacatcttcctttcgga

SEQ ID NO: 60022 - DNA, 25 bp, Saccharomyces pastorianus
gaaggactaattacgcaaactatgg

SEQ ID NO: 60023 - DNA, 25 bp, Saccharomyces pastorianus
gtggtcatgaagtgccatcacatcg

SEQ ID NO: 60024 - DNA, 25 bp, Saccharomyces pastorianus
gaagattcttctgatctcattcgaa

SEQ ID NO: 60025 - DNA, 25 bp, Saccharomyces pastorianus
ggcaccatccaaatttgatttctta

SEQ ID NO: 60026 - DNA, 25 bp, Saccharomyces pastorianus
aaacctgaatgtattccttgtccat

SEQ ID NO: 60027 - DNA, 25 bp, Saccharomyces pastorianus
atccttggagttcctaagggctaag

SEQ ID NO: 60028 - DNA, 25 bp, Saccharomyces pastorianus
gggccccttggatccgcgatgatga

SEQ ID NO: 60029 - DNA, 25 bp, Saccharomyces pastorianus
tcggcgtattcatagtcattcctgc

SEQ ID NO: 60030 - DNA, 25 bp, Saccharomyces pastorianus
gtttttgggcaaatctctacttgca

SEQ ID NO: 60031 - DNA, 25 bp, Saccharomyces pastorianus
ttgcaaccatcctattcggcgtatt

SEQ ID NO: 60032 - DNA, 25 bp, Saccharomyces pastorianus
tattcaatgaagcaagggccccttg

SEQ ID NO: 60033 - DNA, 25 bp, Saccharomyces pastorianus
ggaatttgctatccatacatgaaac

SEQ ID NO: 60034 - DNA, 25 bp, Saccharomyces pastorianus
aaccaagcgacgagggtattgtgaa

SEQ ID NO: 60035 - DNA, 25 bp, Saccharomyces pastorianus
gtatctgaacgttcaaccaagcgac

SEQ ID NO: 60036 - DNA, 25 bp, Saccharomyces pastorianus
ttctcctctggctaaacagttcagg

SEQ ID NO: 60037 - DNA, 25 bp, Saccharomyces pastorianus
tcttcctcttcttcagcatcttcta

SEQ ID NO: 60038 - DNA, 25 bp, Saccharomyces pastorianus
agattaaaccgcaggtgcagcagtt

SEQ ID NO: 60039 - DNA, 25 bp, Saccharomyces pastorianus
gacgaagttggtgatcttttgatta

SEQ ID NO: 60040 - DNA, 25 bp, Saccharomyces pastorianus
ttcagcatcttctactcgcaagagt

SEQ ID NO: 60041 - DNA, 25 bp, Saccharomyces pastorianus
gggaaagatcagcttctcctctggc

SEQ ID NO: 60042 - DNA, 25 bp, Saccharomyces pastorianus
gattatatctagtgatccaatgagg

SEQ ID NO: 60043 - DNA, 25 bp, Saccharomyces pastorianus
gtgaagatggaccatccttcttctt

SEQ ID NO: 60044 - DNA, 25 bp, Saccharomyces pastorianus
actcgcaagagtagacggtcccgtg

SEQ ID NO: 60045 - DNA, 25 bp, Saccharomyces pastorianus
gctttcaagaaaaccgccgtcgtcg

SEQ ID NO: 60046 - DNA, 25 bp, Saccharomyces pastorianus
aacaaggtgcgcaagtccttttcgc

SEQ ID NO: 60047 - DNA, 25 bp, Saccharomyces pastorianus
atacacaatggtcgctcaagttcaa

SEQ ID NO: 60048 - DNA, 25 bp, Saccharomyces pastorianus
agattattcggtgcgtggcttccca

SEQ ID NO: 60049 - DNA, 25 bp, Saccharomyces pastorianus
aactgaaatcatcgccttctctgaa

SEQ ID NO: 60050 - DNA, 25 bp, Saccharomyces pastorianus
ttaacatcccattattggccgacac

SEQ ID NO: 60051 - DNA, 25 bp, Saccharomyces pastorianus
taagtacgtcgtcttggcctttatc

SEQ ID NO: 60052 - DNA, 25 bp, Saccharomyces pastorianus
actccttgtccaaagactacggtgt

SEQ ID NO: 60053 - DNA, 25 bp, Saccharomyces pastorianus
ggcttcccacgtacattgtctttta

SEQ ID NO: 60054 - DNA, 25 bp, Saccharomyces pastorianus
ttcactttcgtttgcccaactgaaa

SEQ ID NO: 60055 - DNA, 25 bp, Saccharomyces pastorianus
tgagaggtcttttcatcattgatcc

SEQ ID NO: 60056 - DNA, 25 bp, Saccharomyces pastorianus
cccactacaagattccagcttggtt

SEQ ID NO: 60057 - DNA, 25 bp, Saccharomyces pastorianus
aacgacatcaccgatggtaaggatt

SEQ ID NO: 60058 - DNA, 25 bp, Saccharomyces pastorianus
cgacatcaccgatggtaaggattac

SEQ ID NO: 60059 - DNA, 25 bp, Saccharomyces pastorianus
caacccactacaagattccagcttg

SEQ ID NO: 60060 - DNA, 25 bp, Saccharomyces pastorianus
acaagattccagcttggtttttgaa

SEQ ID NO: 60061 - DNA, 25 bp, Saccharomyces pastorianus
gattccagcttggtttttgaaccgt

SEQ ID NO: 60062 - DNA, 25 bp, Saccharomyces pastorianus
cactacaagattccagcttggtttt

SEQ ID NO: 60063 - DNA, 25 bp, Saccharomyces pastorianus
ctacaagattccagcttggtttttg

SEQ ID NO: 60064 - DNA, 25 bp, Saccharomyces pastorianus
agattccagcttggtttttgaaccg

SEQ ID NO: 60065 - DNA, 25 bp, Saccharomyces pastorianus
aacccactacaagattccagcttgg

SEQ ID NO: 60066 - DNA, 25 bp, Saccharomyces pastorianus
caagattccagcttggtttttgaac

SEQ ID NO: 60067 - DNA, 25 bp, Saccharomyces pastorianus
gacttgaacgcgttagacatcttaa

SEQ ID NO: 60068 - DNA, 25 bp, Saccharomyces pastorianus
gacatcttaaagacggacacacttg

SEQ ID NO: 60069 - DNA, 25 bp, Saccharomyces pastorianus
gagaagccatcttcaggaagttctt

SEQ ID NO: 60070 - DNA, 25 bp, Saccharomyces pastorianus
gtgctagggcactcgcaagaactgc

SEQ ID NO: 60071 - DNA, 25 bp, Saccharomyces pastorianus
gcacaaaccgtcttcattgaactgg

SEQ ID NO: 60072 - DNA, 25 bp, Saccharomyces pastorianus
aaacgattacaccacagagctgcca

SEQ ID NO: 60073 - DNA, 25 bp, Saccharomyces pastorianus
taaagtcgacttgatatcacccacc

SEQ ID NO: 60074 - DNA, 25 bp, Saccharomyces pastorianus
atgacatactgagagcacaaaccgt

SEQ ID NO: 60075 - DNA, 25 bp, Saccharomyces pastorianus
ggctgatgaaatgttctgacccata

SEQ ID NO: 60076 - DNA, 25 bp, Saccharomyces pastorianus
gggcaagagactacttttcattact

SEQ ID NO: 60077 - DNA, 25 bp, Saccharomyces pastorianus
tgatatcacccaccccggaaataga

SEQ ID NO: 60078 - DNA, 25 bp, Saccharomyces pastorianus
caagagactttgtgatgaaatcgcc

SEQ ID NO: 60079 - DNA, 25 bp, Saccharomyces pastorianus
aaccaacaagagactttgtgatgaa

SEQ ID NO: 60080 - DNA, 25 bp, Saccharomyces pastorianus
agagactttgtgatgaaatcgccac

SEQ ID NO: 60081 - DNA, 25 bp, Saccharomyces pastorianus
aaaccaacaagagactttgtgatga

SEQ ID NO: 60082 - DNA, 25 bp, Saccharomyces pastorianus
ccaaaccaacaagagactttgtgat

SEQ ID NO: 60083 - DNA, 25 bp, Saccharomyces pastorianus
gatttccaaaccaacaagagacttt

SEQ ID NO: 60084 - DNA, 25 bp, Saccharomyces pastorianus
atttccaaaccaacaagagactttg

SEQ ID NO: 60085 - DNA, 25 bp, Saccharomyces pastorianus
aagagactttgtgatgaaatcgcca

SEQ ID NO: 60086 - DNA, 25 bp, Saccharomyces pastorianus
tttccaaaccaacaagagactttgt

SEQ ID NO: 60087 - DNA, 25 bp, Saccharomyces pastorianus
cccatttgatgaagagaatccaaaa

SEQ ID NO: 60088 - DNA, 25 bp, Saccharomyces pastorianus
ttccaaaccaacaagagactttgtg

SEQ ID NO: 60089 - DNA, 25 bp, Saccharomyces pastorianus
gcaagactgtgttattattctgaca

SEQ ID NO: 60090 - DNA, 25 bp, Saccharomyces pastorianus
aggttattgatctagtcgagctgga

SEQ ID NO: 60091 - DNA, 25 bp, Saccharomyces pastorianus
gtatgcttactggtccttttacgat

SEQ ID NO: 60092 - DNA, 25 bp, Saccharomyces pastorianus
gctggattgttttgcatttaccgaa

SEQ ID NO: 60093 - DNA, 25 bp, Saccharomyces pastorianus
tatacccttattagccgaaggtacg

SEQ ID NO: 60094 - DNA, 25 bp, Saccharomyces pastorianus
ttggaaattgaaccgcctttattgt

SEQ ID NO: 60095 - DNA, 25 bp, Saccharomyces pastorianus
atcggatggcgtctcattttgcaat

SEQ ID NO: 60096 - DNA, 25 bp, Saccharomyces pastorianus
atcatccagggaatctcacgaacgc

SEQ ID NO: 60097 - DNA, 25 bp, Saccharomyces pastorianus
gctatccgagatatccaaagacacg

SEQ ID NO: 60098 - DNA, 25 bp, Saccharomyces pastorianus
cgcctctttcaacgatatcttgcag

SEQ ID NO: 60099 - DNA, 25 bp, Saccharomyces pastorianus
ttactccaagaatcgttgcggatga

SEQ ID NO: 60100 - DNA, 25 bp, Saccharomyces pastorianus
tgtcgccaagcccttcaatggtagc

SEQ ID NO: 60101 - DNA, 25 bp, Saccharomyces pastorianus
cttgaagcagagcacggcagcgtct

SEQ ID NO: 60102 - DNA, 25 bp, Saccharomyces pastorianus
gtctgcggccaactggctgatcttt

SEQ ID NO: 60103 - DNA, 25 bp, Saccharomyces pastorianus
ttgtatcgggctgctcgtccttgaa

SEQ ID NO: 60104 - DNA, 25 bp, Saccharomyces pastorianus
aactggctgatcttttcctggaggg

SEQ ID NO: 60105 - DNA, 25 bp, Saccharomyces pastorianus
ctgcggtgcttgtatcgggctgctc

SEQ ID NO: 60106 - DNA, 25 bp, Saccharomyces pastorianus
agcacggcagcgtctgcggccaact

SEQ ID NO: 60107 - DNA, 25 bp, Saccharomyces pastorianus
aagcccttcaatggtagctgcggtg

SEQ ID NO: 60108 - DNA, 25 bp, Saccharomyces pastorianus
ggctgctcgtccttgaagcagagca

SEQ ID NO: 60109 - DNA, 25 bp, Saccharomyces pastorianus
gatcttttcctggagggcgctggcc

SEQ ID NO: 60110 - DNA, 25 bp, Saccharomyces pastorianus
tcaatggtagctgcggtgcttgtat

SEQ ID NO: 60111 - DNA, 25 bp, Saccharomyces pastorianus
atatggctaccggtggtattactgc

SEQ ID NO: 60112 - DNA, 25 bp, Saccharomyces pastorianus
aatacacacggtggctcaggtggtg

SEQ ID NO: 60113 - DNA, 25 bp, Saccharomyces pastorianus
attactgcgggagcttccgcatcta

SEQ ID NO: 60114 - DNA, 25 bp, Saccharomyces pastorianus
tgtaaatacacacggtggctcaggt

SEQ ID NO: 60115 - DNA, 25 bp, Saccharomyces pastorianus
ctaccggtctgagcggtggtatgac

SEQ ID NO: 60116 - DNA, 25 bp, Saccharomyces pastorianus
ttagtgcgcccagaaatatggctac

SEQ ID NO: 60117 - DNA, 25 bp, Saccharomyces pastorianus
agttatgttagtgcgcccagaaata

SEQ ID NO: 60118 - DNA, 25 bp, Saccharomyces pastorianus
cggtggtattactgcgggagcttcc

SEQ ID NO: 60119 - DNA, 25 bp, Saccharomyces pastorianus
gtccaagttatgttagtgcgcccag

SEQ ID NO: 60120 - DNA, 25 bp, Saccharomyces pastorianus
acaggcaagaatgggtccaagttat

SEQ ID NO: 60121 - DNA, 25 bp, Saccharomyces pastorianus
gagcttccgcatctaccggtctgag

SEQ ID NO: 60122 - DNA, 25 bp, Saccharomyces pastorianus
ggacctgttgccaccatcttgatta

SEQ ID NO: 60123 - DNA, 25 bp, Saccharomyces pastorianus
tcgacttgtttccttgattgttcca

SEQ ID NO: 60124 - DNA, 25 bp, Saccharomyces pastorianus
gtactcttgttcttattgttaccac

SEQ ID NO: 60125 - DNA, 25 bp, Saccharomyces pastorianus
ttcttattgttaccaccccaagtgg

SEQ ID NO: 60126 - DNA, 25 bp, Saccharomyces pastorianus
ttgccaccatcttgattaccccaag

SEQ ID NO: 60127 - DNA, 25 bp, Saccharomyces pastorianus
ttgattaccccaagcagaagctcca

SEQ ID NO: 60128 - DNA, 25 bp, Saccharomyces pastorianus
tgattgttccaagcggacctgttgc

SEQ ID NO: 60129 - DNA, 25 bp, Saccharomyces pastorianus
ttgttcttattgttaccaccccaag

SEQ ID NO: 60130 - DNA, 25 bp, Saccharomyces pastorianus
tattaccaccatagttcgacttgtt

SEQ ID NO: 60131 - DNA, 25 bp, Saccharomyces pastorianus
accatctcttgtactcttgttctta

SEQ ID NO: 60132 - DNA, 25 bp, Saccharomyces pastorianus
gtttccttgattgttccaagcggac

SEQ ID NO: 60133 - DNA, 25 bp, Saccharomyces pastorianus
aacagtgttatcaagctattatcca

SEQ ID NO: 60134 - DNA, 25 bp, Saccharomyces pastorianus
caagctattatccactgcagcgagt

SEQ ID NO: 60135 - DNA, 25 bp, Saccharomyces pastorianus
atcatcttcgtatatatgtgctgaa

SEQ ID NO: 60136 - DNA, 25 bp, Saccharomyces pastorianus
gttccccttcggtatggagcaataa

SEQ ID NO: 60137 - DNA, 25 bp, Saccharomyces pastorianus
agtcaagtccaagaacagtgttatc

SEQ ID NO: 60138 - DNA, 25 bp, Saccharomyces pastorianus
gacaccacaatcatcttcgtatata

SEQ ID NO: 60139 - DNA, 25 bp, Saccharomyces pastorianus
gaaaggtgcacctttagtcactcaa

SEQ ID NO: 60140 - DNA, 25 bp, Saccharomyces pastorianus
actgcagcgagtgggtattctcgtt

SEQ ID NO: 60141 - DNA, 25 bp, Saccharomyces pastorianus
tgggtattctcgttacatatcggta

SEQ ID NO: 60142 - DNA, 25 bp, Saccharomyces pastorianus
ttaactgttccccttcggtatggag

SEQ ID NO: 60143 - DNA, 25 bp, Saccharomyces pastorianus
gagcaataaaactacgacaccacaa

SEQ ID NO: 60144 - DNA, 25 bp, Saccharomyces pastorianus
gaaagatttggtttagccccagaag

SEQ ID NO: 60145 - DNA, 25 bp, Saccharomyces pastorianus
aacaccttcgacagagtttacgcca

SEQ ID NO: 60146 - DNA, 25 bp, Saccharomyces pastorianus
tagtcgccggtggtagatccaagtt

SEQ ID NO: 60147 - DNA, 25 bp, Saccharomyces pastorianus
gatgttccatgtcgatgtagccaag

SEQ ID NO: 60148 - DNA, 25 bp, Saccharomyces pastorianus
gggtgacggtatccccaagatgttc

SEQ ID NO: 60149 - DNA, 25 bp, Saccharomyces pastorianus
aacgctgcagttggtttagtcgccg

SEQ ID NO: 60150 - DNA, 25 bp, Saccharomyces pastorianus
gagtttacgccattgaagccacttg

SEQ ID NO: 60151 - DNA, 25 bp, Saccharomyces pastorianus
tcgtcgctaagaaacctgctgaggt

SEQ ID NO: 60152 - DNA, 25 bp, Saccharomyces pastorianus
ctccaatgatgttattcgtcgctaa

SEQ ID NO: 60153 - DNA, 25 bp, Saccharomyces pastorianus
gaagccacttgtcatgctccaaaat

SEQ ID NO: 60154 - DNA, 25 bp, Saccharomyces pastorianus
aatctagctaacttggccacattct

SEQ ID NO: 60155 - DNA, 25 bp, Saccharomyces pastorianus
aattctcgccacttttccggatatt

SEQ ID NO: 60156 - DNA, 25 bp, Saccharomyces pastorianus
ttcctcgaccacagtgacgatgcat

SEQ ID NO: 60157 - DNA, 25 bp, Saccharomyces pastorianus
gtctcttgccctctagtagacaagg

SEQ ID NO: 60158 - DNA, 25 bp, Saccharomyces pastorianus
atattaatctgggtctcttgccctc

SEQ ID NO: 60159 - DNA, 25 bp, Saccharomyces pastorianus
gataaagacttttgcaccagatgtt

SEQ ID NO: 60160 - DNA, 25 bp, Saccharomyces pastorianus
ttacttgacaaagggtgccagggcc

SEQ ID NO: 60161 - DNA, 25 bp, Saccharomyces pastorianus
gacaagggtggccattagcgcttaa

SEQ ID NO: 60162 - DNA, 25 bp, Saccharomyces pastorianus
atgcgggtataggttatttcacttt

SEQ ID NO: 60163 - DNA, 25 bp, Saccharomyces pastorianus
gaatttcaagctcagcatccagatt

SEQ ID NO: 60164 - DNA, 25 bp, Saccharomyces pastorianus
ttcatttacagggagcttcctcgac

SEQ ID NO: 60165 - DNA, 25 bp, Saccharomyces pastorianus
cagggccctttttgcgtttgaattg

SEQ ID NO: 60166 - DNA, 25 bp, Saccharomyces pastorianus
gtccgtgttaagaacccaaccagat

SEQ ID NO: 60167 - DNA, 25 bp, Saccharomyces pastorianus
gaaggacattgccttcgcactggac

SEQ ID NO: 60168 - DNA, 25 bp, Saccharomyces pastorianus
ggagacagtgttttttcatgcgaaa

SEQ ID NO: 60169 - DNA, 25 bp, Saccharomyces pastorianus
gtaagttgtgatgatgctggcgccc

SEQ ID NO: 60170 - DNA, 25 bp, Saccharomyces pastorianus
tgacccaaatttccagtaccataac

SEQ ID NO: 60171 - DNA, 25 bp, Saccharomyces pastorianus
caaggttatggccacatttgcgtaa

SEQ ID NO: 60172 - DNA, 25 bp, Saccharomyces pastorianus
ccatatctgtttttctgtctctgac

SEQ ID NO: 60173 - DNA, 25 bp, Saccharomyces pastorianus
actggaccccgatggatactggatt

SEQ ID NO: 60174 - DNA, 25 bp, Saccharomyces pastorianus
acaccgtggattcggccatatctgt

SEQ ID NO: 60175 - DNA, 25 bp, Saccharomyces pastorianus
aattcaccttatatttcttgggcta

SEQ ID NO: 60176 - DNA, 25 bp, Saccharomyces pastorianus
tggcgataagattcagtggtctcct

SEQ ID NO: 60177 - DNA, 25 bp, Saccharomyces pastorianus
ggaaggtcaccaatgccaaagctgc

SEQ ID NO: 60178 - DNA, 25 bp, Saccharomyces pastorianus
aaagtacggctggtaccgctagtca

SEQ ID NO: 60179 - DNA, 25 bp, Saccharomyces pastorianus
gagcagcggctgtctgttcaaatca

SEQ ID NO: 60180 - DNA, 25 bp, Saccharomyces pastorianus
agctgccgatgcttttacaacgagc

SEQ ID NO: 60181 - DNA, 25 bp, Saccharomyces pastorianus
aagcatgtctggatcaacgtactat

SEQ ID NO: 60182 - DNA, 25 bp, Saccharomyces pastorianus
gtaccgttcagctattcaaatccat

SEQ ID NO: 60183 - DNA, 25 bp, Saccharomyces pastorianus
agacgcttatgccagccttctgaaa

SEQ ID NO: 60184 - DNA, 25 bp, Saccharomyces pastorianus
atattgtcattcaaagcgagcctga

SEQ ID NO: 60185 - DNA, 25 bp, Saccharomyces pastorianus
gaaacattacggtgaactcttgagt

SEQ ID NO: 60186 - DNA, 25 bp, Saccharomyces pastorianus
gctagtcatattccacttggcggtt

SEQ ID NO: 60187 - DNA, 25 bp, Saccharomyces pastorianus
ggcatttcctagtacagttaaacca

SEQ ID NO: 60188 - DNA, 25 bp, Saccharomyces pastorianus
gcaaatcctcctctactaacaagaa

SEQ ID NO: 60189 - DNA, 25 bp, Saccharomyces pastorianus
caagatgtcttactccgactcagaa

SEQ ID NO: 60190 - DNA, 25 bp, Saccharomyces pastorianus
aagtcagtctcaggtttaggcaaca

SEQ ID NO: 60191 - DNA, 25 bp, Saccharomyces pastorianus
gaacgctactttaccatccgaatgt

SEQ ID NO: 60192 - DNA, 25 bp, Saccharomyces pastorianus
aaaatgggtttgaggccgccacgat

SEQ ID NO: 60193 - DNA, 25 bp, Saccharomyces pastorianus
aactccagacattcgttcaacggta

SEQ ID NO: 60194 - DNA, 25 bp, Saccharomyces pastorianus
agtgactctggattcttaggctgtg

SEQ ID NO: 60195 - DNA, 25 bp, Saccharomyces pastorianus
gttgcgacgcaacaaacttgaccga

SEQ ID NO: 60196 - DNA, 25 bp, Saccharomyces pastorianus
ggtttaaatttgtccttcccatatg

SEQ ID NO: 60197 - DNA, 25 bp, Saccharomyces pastorianus
gaccgatttagattacatcccacct

SEQ ID NO: 60198 - DNA, 25 bp, Saccharomyces pastorianus
aatgccttagtggactactccggat

SEQ ID NO: 60199 - DNA, 25 bp, Saccharomyces pastorianus
caagattggtgtcgcctgttccggt

SEQ ID NO: 60200 - DNA, 25 bp, Saccharomyces pastorianus
tgacaagcactctggcctggaataa

SEQ ID NO: 60201 - DNA, 25 bp, Saccharomyces pastorianus
caacatctctttggccgacgtatgg

SEQ ID NO: 60202 - DNA, 25 bp, Saccharomyces pastorianus
gactgcatccaactcaatctgggac

SEQ ID NO: 60203 - DNA, 25 bp, Saccharomyces pastorianus
aatttctggccaagcttgtaccgtg

SEQ ID NO: 60204 - DNA, 25 bp, Saccharomyces pastorianus
ggcggtatcaacatcttcaagactg

SEQ ID NO: 60205 - DNA, 25 bp, Saccharomyces pastorianus
tacggtcgcagacggtaggtaccca

SEQ ID NO: 60206 - DNA, 25 bp, Saccharomyces pastorianus
tggacctctgtgcaagacatcgtgg

SEQ ID NO: 60207 - DNA, 25 bp, Saccharomyces pastorianus
tggacaaccgtactgttggcgccaa

SEQ ID NO: 60208 - DNA, 25 bp, Saccharomyces pastorianus
tagtaattcctccaacatgcccaag

SEQ ID NO: 60209 - DNA, 25 bp, Saccharomyces pastorianus
aatctgggacatctctcactcgatt

SEQ ID NO: 60210 - DNA, 25 bp, Saccharomyces pastorianus
tgttctccttcttctatgtcttttt

SEQ ID NO: 60211 - DNA, 25 bp, Saccharomyces pastorianus
ttctccttcttctatgtctttttct

SEQ ID NO: 60212 - DNA, 25 bp, Saccharomyces pastorianus
ctccttcttctatgtctttttcttt

SEQ ID NO: 60213 - DNA, 25 bp, Saccharomyces pastorianus
ctttgtctgtgaaactaaaggtttg

SEQ ID NO: 60214 - DNA, 25 bp, Saccharomyces pastorianus
tctccttcttctatgtctttttctt

SEQ ID NO: 60215 - DNA, 25 bp, Saccharomyces pastorianus
gttctccttcttctatgtctttttc

SEQ ID NO: 60216 - DNA, 25 bp, Saccharomyces pastorianus
gtgttctccttcttctatgtctttt

SEQ ID NO: 60217 - DNA, 25 bp, Saccharomyces pastorianus
gtagaaggtgtcaagccatggaagt

SEQ ID NO: 60218 - DNA, 25 bp, Saccharomyces pastorianus
tggtgttctccttcttctatgtctt

SEQ ID NO: 60219 - DNA, 25 bp, Saccharomyces pastorianus
gtctgtgaaactaaaggtttgactt

SEQ ID NO: 60220 - DNA, 25 bp, Saccharomyces pastorianus
ggtgttctccttcttctatgtcttt

SEQ ID NO: 60221 - DNA, 25 bp, Saccharomyces pastorianus
ttttgttatcttctccaccgttggt

SEQ ID NO: 60222 - DNA, 25 bp, Saccharomyces pastorianus
tttctgaatcttatcccttacgtgt

SEQ ID NO: 60223 - DNA, 25 bp, Saccharomyces pastorianus
aaccctcttctaaggctgctggtaa

SEQ ID NO: 60224 - DNA, 25 bp, Saccharomyces pastorianus
agatggtaaggaccaaccctcttct

SEQ ID NO: 60225 - DNA, 25 bp, Saccharomyces pastorianus
ccaccgttggtgttacaagcttgta

SEQ ID NO: 60226 - DNA, 25 bp, Saccharomyces pastorianus
taggtatcgtcaactttgcctctac

SEQ ID NO: 60227 - DNA, 25 bp, Saccharomyces pastorianus
ttctttgctatcagttgggctccaa

SEQ ID NO: 60228 - DNA, 25 bp, Saccharomyces pastorianus
aagtgtctactaggtggctctgctt

SEQ ID NO: 60229 - DNA, 25 bp, Saccharomyces pastorianus
ctgctttcatggctatctgttttgt

SEQ ID NO: 60230 - DNA, 25 bp, Saccharomyces pastorianus
aagggtgccattttacctcgtgtca

SEQ ID NO: 60231 - DNA, 25 bp, Saccharomyces pastorianus
ttgcctctactttcgttgctttata

SEQ ID NO: 60232 - DNA, 25 bp, Saccharomyces pastorianus
cggtcaactgcgtttttcgaatgtt

SEQ ID NO: 60233 - DNA, 25 bp, Saccharomyces pastorianus
gatttccacatttcacgacggtcaa

SEQ ID NO: 60234 - DNA, 25 bp, Saccharomyces pastorianus
cacatttcacgacggtcaactgcgt

SEQ ID NO: 60235 - DNA, 25 bp, Saccharomyces pastorianus
ttcacgacggtcaactgcgtttttc

SEQ ID NO: 60236 - DNA, 25 bp, Saccharomyces pastorianus
acggtcaactgcgtttttcgaatgt

SEQ ID NO: 60237 - DNA, 25 bp, Saccharomyces pastorianus
tttccacatttcacgacggtcaact

SEQ ID NO: 60238 - DNA, 25 bp, Saccharomyces pastorianus
cgacggtcaactgcgtttttcgaat

SEQ ID NO: 60239 - DNA, 25 bp, Saccharomyces pastorianus
atgatttccacatttcacgacggtc

SEQ ID NO: 60240 - DNA, 25 bp, Saccharomyces pastorianus
tttcacgacggtcaactgcgttttt

SEQ ID NO: 60241 - DNA, 25 bp, Saccharomyces pastorianus
cacgacggtcaactgcgtttttcga

SEQ ID NO: 60242 - DNA, 25 bp, Saccharomyces pastorianus
atttcacgacggtcaactgcgtttt

SEQ ID NO: 60243 - DNA, 25 bp, Saccharomyces pastorianus
ggtggctaaacctgtcacaattatt

SEQ ID NO: 60244 - DNA, 25 bp, Saccharomyces pastorianus
gagggattctgccttgcaattagaa

SEQ ID NO: 60245 - DNA, 25 bp, Saccharomyces pastorianus
aaaaattccgggttgccttctgatg

SEQ ID NO: 60246 - DNA, 25 bp, Saccharomyces pastorianus
aatgctccctgaatgcttatggtgc

SEQ ID NO: 60247 - DNA, 25 bp, Saccharomyces pastorianus
ctattcttcgttccctggtggctaa

SEQ ID NO: 60248 - DNA, 25 bp, Saccharomyces pastorianus
agggatcgccgtcacacaaagtaaa

SEQ ID NO: 60249 - DNA, 25 bp, Saccharomyces pastorianus
gagactctaccgacgttttcgatga

SEQ ID NO: 60250 - DNA, 25 bp, Saccharomyces pastorianus
taatatcactaccttgaacgcctca

SEQ ID NO: 60251 - DNA, 25 bp, Saccharomyces pastorianus
atggcgatgatacccctaacaagaa

SEQ ID NO: 60252 - DNA, 25 bp, Saccharomyces pastorianus
gaatcttcgcttggtacagatcatg

SEQ ID NO: 60253 - DNA, 25 bp, Saccharomyces pastorianus
tgtatcatctatatgcacgcaggga

SEQ ID NO: 60254 - DNA, 25 bp, Saccharomyces pastorianus
tgagatcctgaaaaacgacgtgttt

SEQ ID NO: 60255 - DNA, 25 bp, Saccharomyces pastorianus
tatccaatagtgagtgtatcttgca

SEQ ID NO: 60256 - DNA, 25 bp, Saccharomyces pastorianus
aaacttcaaacacctgtctcaatcg

SEQ ID NO: 60257 - DNA, 25 bp, Saccharomyces pastorianus
tcgagtccgattgttgtttccaaaa

SEQ ID NO: 60258 - DNA, 25 bp, Saccharomyces pastorianus
aacacctgtctcaatcgagtgccga

SEQ ID NO: 60259 - DNA, 25 bp, Saccharomyces pastorianus
ataggttcggcgtaagttatccaat

SEQ ID NO: 60260 - DNA, 25 bp, Saccharomyces pastorianus
gacaatgatatcgtcatggccacag

SEQ ID NO: 60261 - DNA, 25 bp, Saccharomyces pastorianus
gatacgcatctgacggaatagctaa

SEQ ID NO: 60262 - DNA, 25 bp, Saccharomyces pastorianus
atcgagtgccgattcgagtccgatt

SEQ ID NO: 60263 - DNA, 25 bp, Saccharomyces pastorianus
atcgtcatggccacagaaaatctaa

SEQ ID NO: 60264 - DNA, 25 bp, Saccharomyces pastorianus
gagttcttgaactctaaagactttg

SEQ ID NO: 60265 - DNA, 25 bp, Saccharomyces pastorianus
caatcttgcaagacgggatcagact

SEQ ID NO: 60266 - DNA, 25 bp, Saccharomyces pastorianus
aaggtcgaaaaatcttcaatcttgc

SEQ ID NO: 60267 - DNA, 25 bp, Saccharomyces pastorianus
aacaatatcaaacgtttacgggatg

SEQ ID NO: 60268 - DNA, 25 bp, Saccharomyces pastorianus
acggatatgatattccatggagtgg

SEQ ID NO: 60269 - DNA, 25 bp, Saccharomyces pastorianus
ttacgggatgaaattttctctttca

SEQ ID NO: 60270 - DNA, 25 bp, Saccharomyces pastorianus
agtcatctttagtgaacaggttaac

SEQ ID NO: 60271 - DNA, 25 bp, Saccharomyces pastorianus
ttgattttgctgatgataatagcca

SEQ ID NO: 60272 - DNA, 25 bp, Saccharomyces pastorianus
aatgttggtaagtcatctttagtga

SEQ ID NO: 60273 - DNA, 25 bp, Saccharomyces pastorianus
ttttctctttcattcaaaaggtcga

SEQ ID NO: 60274 - DNA, 25 bp, Saccharomyces pastorianus
acgggatcagactagtattactcgg

SEQ ID NO: 60275 - DNA, 25 bp, Saccharomyces pastorianus
gacaatacggatatgatattccatg

SEQ ID NO: 60276 - DNA, 25 bp, Saccharomyces pastorianus
aagagcagtgaataggttgtccgga

SEQ ID NO: 60277 - DNA, 25 bp, Saccharomyces pastorianus
atcctcttctttgcaaaagagcagt

SEQ ID NO: 60278 - DNA, 25 bp, Saccharomyces pastorianus
ttcgaatcctcttctttgcaaaaga

SEQ ID NO: 60279 - DNA, 25 bp, Saccharomyces pastorianus
cagtgaataggttgtccggatttac

SEQ ID NO: 60280 - DNA, 25 bp, Saccharomyces pastorianus
gtccggatttacaaagcctgcaact

SEQ ID NO: 60281 - DNA, 25 bp, Saccharomyces pastorianus
tacaaagcctgcaacttcacaccta

SEQ ID NO: 60282 - DNA, 25 bp, Saccharomyces pastorianus
acacctaccaacaatctatgcctgt

SEQ ID NO: 60283 - DNA, 25 bp, Saccharomyces pastorianus
acttcacacctaccaacaatctatg

SEQ ID NO: 60284 - DNA, 25 bp, Saccharomyces pastorianus
ggttgtccggatttacaaagcctgc

SEQ ID NO: 60285 - DNA, 25 bp, Saccharomyces pastorianus
gtttcgaatcctcttctttgcaaaa

SEQ ID NO: 60286 - DNA, 25 bp, Saccharomyces pastorianus
gatttacaaagcctgcaacttcaca

SEQ ID NO: 60287 - DNA, 25 bp, Saccharomyces pastorianus
gtactgttacgaacctcttgctcaa

SEQ ID NO: 60288 - DNA, 25 bp, Saccharomyces pastorianus
agctgccactgatgccttgatgaaa

SEQ ID NO: 60289 - DNA, 25 bp, Saccharomyces pastorianus
gaactggccatgctatgtcgcagag

SEQ ID NO: 60290 - DNA, 25 bp, Saccharomyces pastorianus
aatttctcggagacaagtgcccttg

SEQ ID NO: 60291 - DNA, 25 bp, Saccharomyces pastorianus
ggtagactatccaaatcgcctgttt

SEQ ID NO: 60292 - DNA, 25 bp, Saccharomyces pastorianus
aatggagcctttcgaattcacctta

SEQ ID NO: 60293 - DNA, 25 bp, Saccharomyces pastorianus
aactacatctgttttgtctcgttat

SEQ ID NO: 60294 - DNA, 25 bp, Saccharomyces pastorianus
atcgcctgttttcatcgtacatgta

SEQ ID NO: 60295 - DNA, 25 bp, Saccharomyces pastorianus
tagctgccatttgggccgtgacaga

SEQ ID NO: 60296 - DNA, 25 bp, Saccharomyces pastorianus
gaatgccgcggtaaacgcttacata

SEQ ID NO: 60297 - DNA, 25 bp, Saccharomyces pastorianus
gagagactctcaagcggtttacaaa

SEQ ID NO: 60298 - DNA, 25 bp, Saccharomyces pastorianus
cgacgtacaggtcggtttgcctgaa

SEQ ID NO: 60299 - DNA, 25 bp, Saccharomyces pastorianus
gctaccaacggtatcacgtctttga

SEQ ID NO: 60300 - DNA, 25 bp, Saccharomyces pastorianus
tttgcctgaaggtctcgatgctaaa

SEQ ID NO: 60301 - DNA, 25 bp, Saccharomyces pastorianus
tgaatttttcccaagtggccaaccg

SEQ ID NO: 60302 - DNA, 25 bp, Saccharomyces pastorianus
agacctgagagaccgtgaatttttc

SEQ ID NO: 60303 - DNA, 25 bp, Saccharomyces pastorianus
cagagcccttgatttctttgccaag

SEQ ID NO: 60304 - DNA, 25 bp, Saccharomyces pastorianus
aaggatttcgacatcttagtccaag

SEQ ID NO: 60305 - DNA, 25 bp, Saccharomyces pastorianus
aatgctagcagctttcctgttagaa

SEQ ID NO: 60306 - DNA, 25 bp, Saccharomyces pastorianus
tcttccatgccaaggatatcccata

SEQ ID NO: 60307 - DNA, 25 bp, Saccharomyces pastorianus
gactagccaccaaatgtatcttcca

SEQ ID NO: 60308 - DNA, 25 bp, Saccharomyces pastorianus
tgggcaagttcatttcgagtggcga

SEQ ID NO: 60309 - DNA, 25 bp, Saccharomyces pastorianus
tactcaagggtatttctaatcgtgt

SEQ ID NO: 60310 - DNA, 25 bp, Saccharomyces pastorianus
aaagctagatctgtgctacctgcta

SEQ ID NO: 60311 - DNA, 25 bp, Saccharomyces pastorianus
gtttatggcaagctctactgcgttt

SEQ ID NO: 60312 - DNA, 25 bp, Saccharomyces pastorianus
gaatatgtgcagtgtcctacaataa

SEQ ID NO: 60313 - DNA, 25 bp, Saccharomyces pastorianus
gggcaactattgaaggaccatttaa

SEQ ID NO: 60314 - DNA, 25 bp, Saccharomyces pastorianus
aatatcattattgtcggcggtacta

SEQ ID NO: 60315 - DNA, 25 bp, Saccharomyces pastorianus
ttgggcgctcaaattgtttctaaac

SEQ ID NO: 60316 - DNA, 25 bp, Saccharomyces pastorianus
gtgctacctgctacaacgaaaaaga

SEQ ID NO: 60317 - DNA, 25 bp, Saccharomyces pastorianus
aatatccggactattttcccgagtg

SEQ ID NO: 60318 - DNA, 25 bp, Saccharomyces pastorianus
gcggtactacgtcaattccagggtt

SEQ ID NO: 60319 - DNA, 25 bp, Saccharomyces pastorianus
tactgcgtttatcccaagcatagaa

SEQ ID NO: 60320 - DNA, 25 bp, Saccharomyces pastorianus
aagagtttctagtggttcgtcaata

SEQ ID NO: 60321 - DNA, 25 bp, Saccharomyces pastorianus
tggcttggacaactcatcatatttt

SEQ ID NO: 60322 - DNA, 25 bp, Saccharomyces pastorianus
cgcctccaaaactatctctaaatca

SEQ ID NO: 60323 - DNA, 25 bp, Saccharomyces pastorianus
tcatttaaatttgaaccgcctccaa

SEQ ID NO: 60324 - DNA, 25 bp, Saccharomyces pastorianus
gaaaatttctctcccatattcagta

SEQ ID NO: 60325 - DNA, 25 bp, Saccharomyces pastorianus
taaatcctccatgagcagcaacagt

SEQ ID NO: 60326 - DNA, 25 bp, Saccharomyces pastorianus
gtgaagattttcctagacctgctag

SEQ ID NO: 60327 - DNA, 25 bp, Saccharomyces pastorianus
tacagcatcgtcagcattatcattt

SEQ ID NO: 60328 - DNA, 25 bp, Saccharomyces pastorianus
caggattttacttttgttggttcag

SEQ ID NO: 60329 - DNA, 25 bp, Saccharomyces pastorianus
ccccaatcttcgatgactacagcat

SEQ ID NO: 60330 - DNA, 25 bp, Saccharomyces pastorianus
ggatgacagaagcaccaaccggcaa

SEQ ID NO: 60331 - DNA, 25 bp, Saccharomyces pastorianus
gtccactggctttcgattcgacaaa

SEQ ID NO: 60332 - DNA, 25 bp, Saccharomyces pastorianus
atttcacttcagtatcatccagtcc

SEQ ID NO: 60333 - DNA, 25 bp, Saccharomyces pastorianus
atgccagccattttacaattcgtgt

SEQ ID NO: 60334 - DNA, 25 bp, Saccharomyces pastorianus
gaggtccagctcattttcgagatca

SEQ ID NO: 60335 - DNA, 25 bp, Saccharomyces pastorianus
aaagttctgcatggtgatactcaca

SEQ ID NO: 60336 - DNA, 25 bp, Saccharomyces pastorianus
gaatttagttcccatcgagggccgc

SEQ ID NO: 60337 - DNA, 25 bp, Saccharomyces pastorianus
cgtgttgtattgtagactgccgatt

SEQ ID NO: 60338 - DNA, 25 bp, Saccharomyces pastorianus
attttttccctcgtatatctccaga

SEQ ID NO: 60339 - DNA, 25 bp, Saccharomyces pastorianus
aaaagtgttacgagtcatgcctggg

SEQ ID NO: 60340 - DNA, 25 bp, Saccharomyces pastorianus
atacaggcggccacattatgaattc

SEQ ID NO: 60341 - DNA, 25 bp, Saccharomyces pastorianus
gccgctattggcatcccatttgaga

SEQ ID NO: 60342 - DNA, 25 bp, Saccharomyces pastorianus
gaaacagcccatcaagtacatcgaa

SEQ ID NO: 60343 - DNA, 25 bp, Saccharomyces pastorianus
gagaataccagcacgagcccaaata

SEQ ID NO: 60344 - DNA, 25 bp, Saccharomyces pastorianus
cgcccactacatccaagactaaaga

SEQ ID NO: 60345 - DNA, 25 bp, Saccharomyces pastorianus
tcgaaaacaagacccgcagacacgt

SEQ ID NO: 60346 - DNA, 25 bp, Saccharomyces pastorianus
aactccggcctggtgtacacgttca

SEQ ID NO: 60347 - DNA, 25 bp, Saccharomyces pastorianus
ggaggagccaactactgtcggcaat

SEQ ID NO: 60348 - DNA, 25 bp, Saccharomyces pastorianus
caacggctccagtatcagagtgctg

SEQ ID NO: 60349 - DNA, 25 bp, Saccharomyces pastorianus
gcctccatcggagttggtgcaagac

SEQ ID NO: 60350 - DNA, 25 bp, Saccharomyces pastorianus
agacacgtcaccttctctaaaaggc

SEQ ID NO: 60351 - DNA, 25 bp, Saccharomyces pastorianus
ggcgatcaattcgaacggatccgta

SEQ ID NO: 60352 - DNA, 25 bp, Saccharomyces pastorianus
aaaaggcatacgagctctctgtcct

SEQ ID NO: 60353 - DNA, 25 bp, Saccharomyces pastorianus
acgacgacaatggtgacgacaacga

SEQ ID NO: 60354 - DNA, 25 bp, Saccharomyces pastorianus
gagcctatagctacagaacatgccg

SEQ ID NO: 60355 - DNA, 25 bp, Saccharomyces pastorianus
ggaactcaaggcctttcaagcgtta

SEQ ID NO: 60356 - DNA, 25 bp, Saccharomyces pastorianus
acagatccagttttgagagagtaca

SEQ ID NO: 60357 - DNA, 25 bp, Saccharomyces pastorianus
atgatgcagcagtcttgggaactca

SEQ ID NO: 60358 - DNA, 25 bp, Saccharomyces pastorianus
atctatcacctttctgcgagtaaca

SEQ ID NO: 60359 - DNA, 25 bp, Saccharomyces pastorianus
agaatataccgtctaaggaaccata

SEQ ID NO: 60360 - DNA, 25 bp, Saccharomyces pastorianus
agaacatgccgatgctacgaacgcg

SEQ ID NO: 60361 - DNA, 25 bp, Saccharomyces pastorianus
gaacaagggcctgctgaactgaaca

SEQ ID NO: 60362 - DNA, 25 bp, Saccharomyces pastorianus
agcggcctcactcaatatacaagat

SEQ ID NO: 60363 - DNA, 25 bp, Saccharomyces pastorianus
gcggaactagttacagcggcctcac

SEQ ID NO: 60364 - DNA, 25 bp, Saccharomyces pastorianus
ggttgtttggcaacagttctttgca

SEQ ID NO: 60365 - DNA, 25 bp, Saccharomyces pastorianus
gtaaggccagtatatgctcggcgat

SEQ ID NO: 60366 - DNA, 25 bp, Saccharomyces pastorianus
gacggatttgaagcacgatactatc

SEQ ID NO: 60367 - DNA, 25 bp, Saccharomyces pastorianus
gatctgatgaccactagtaacccct

SEQ ID NO: 60368 - DNA, 25 bp, Saccharomyces pastorianus
agtaacccctcttatgaagctctgt

SEQ ID NO: 60369 - DNA, 25 bp, Saccharomyces pastorianus
gggaacggttgctcagtacgtgaaa

SEQ ID NO: 60370 - DNA, 25 bp, Saccharomyces pastorianus
cttgaagatgttgagccgccgttat

SEQ ID NO: 60371 - DNA, 25 bp, Saccharomyces pastorianus
gagccgccgttatttgacggatttg

SEQ ID NO: 60372 - DNA, 25 bp, Saccharomyces pastorianus
gcagctccttcttcatgagatgcaa

SEQ ID NO: 60373 - DNA, 25 bp, Saccharomyces pastorianus
atgctcggcgatggatcccaagaat

SEQ ID NO: 60374 - DNA, 25 bp, Saccharomyces pastorianus
tattgacaacaagcagcagctcctt

SEQ ID NO: 60375 - DNA, 25 bp, Saccharomyces pastorianus
gacagatctagacacactcgttcat

SEQ ID NO: 60376 - DNA, 25 bp, Saccharomyces pastorianus
tatgcgaagataccaagcgagctat

SEQ ID NO: 60377 - DNA, 25 bp, Saccharomyces pastorianus
aagggcaatcccattaatttgtcac

SEQ ID NO: 60378 - DNA, 25 bp, Saccharomyces pastorianus
tgaaaactgcatttcctccaaggat

SEQ ID NO: 60379 - DNA, 25 bp, Saccharomyces pastorianus
caagtttttcggcagccatcggaat

SEQ ID NO: 60380 - DNA, 25 bp, Saccharomyces pastorianus
gatcctgtgttgctatttcaaactt

SEQ ID NO: 60381 - DNA, 25 bp, Saccharomyces pastorianus
gggtccaacaacagtagctggtcta

SEQ ID NO: 60382 - DNA, 25 bp, Saccharomyces pastorianus
aatttgtcacacgatattctcacga

SEQ ID NO: 60383 - DNA, 25 bp, Saccharomyces pastorianus
gttcataatattcacggaggttccg

SEQ ID NO: 60384 - DNA, 25 bp, Saccharomyces pastorianus
aatgaatgcactctgggtccaacaa

SEQ ID NO: 60385 - DNA, 25 bp, Saccharomyces pastorianus
gatcagtagtggtaagtctcccgtt

SEQ ID NO: 60386 - DNA, 25 bp, Saccharomyces pastorianus
tttggcgacgtcatgattcatcaag

SEQ ID NO: 60387 - DNA, 25 bp, Saccharomyces pastorianus
gaacatctggctcaacaacgacatt

SEQ ID NO: 60388 - DNA, 25 bp, Saccharomyces pastorianus
gttctgcttaaactgtatctcccat

SEQ ID NO: 60389 - DNA, 25 bp, Saccharomyces pastorianus
acgcgttcagttctaaggattcagg

SEQ ID NO: 60390 - DNA, 25 bp, Saccharomyces pastorianus
atacctgcgtctttgggcgctatca

SEQ ID NO: 60391 - DNA, 25 bp, Saccharomyces pastorianus
tggaaggtacctctgcaatgctgca

SEQ ID NO: 60392 - DNA, 25 bp, Saccharomyces pastorianus
tatcactggcacacgcacaattgtc

SEQ ID NO: 60393 - DNA, 25 bp, Saccharomyces pastorianus
atatcaacagtgtcacggacggcac

SEQ ID NO: 60394 - DNA, 25 bp, Saccharomyces pastorianus
attcaggttcgcctttagcggtgat

SEQ ID NO: 60395 - DNA, 25 bp, Saccharomyces pastorianus
gggacatgaccatatcaaacgcgtt

SEQ ID NO: 60396 - DNA, 25 bp, Saccharomyces pastorianus
gattcataccatcgagttctgctta

SEQ ID NO: 60397 - DNA, 25 bp, Saccharomyces pastorianus
gggtatgcacatatgacgtattcct

SEQ ID NO: 60398 - DNA, 25 bp, Saccharomyces pastorianus
caaggatgacaagcctgctccaggt

SEQ ID NO: 60399 - DNA, 25 bp, Saccharomyces pastorianus
ttcaaatctggttggcaatggcccc

SEQ ID NO: 60400 - DNA, 25 bp, Saccharomyces pastorianus
ttttgacatggcatacactggtaga

SEQ ID NO: 60401 - DNA, 25 bp, Saccharomyces pastorianus
gtattcatgcagtcgatatttggtt

SEQ ID NO: 60402 - DNA, 25 bp, Saccharomyces pastorianus
gatcattatttcctggacaagccaa

SEQ ID NO: 60403 - DNA, 25 bp, Saccharomyces pastorianus
gactatgcatggcacggtaccgata

SEQ ID NO: 60404 - DNA, 25 bp, Saccharomyces pastorianus
aatcaatatgtttttggcaccagga

SEQ ID NO: 60405 - DNA, 25 bp, Saccharomyces pastorianus
agttgtactattgcttgcggcgctg

SEQ ID NO: 60406 - DNA, 25 bp, Saccharomyces pastorianus
caatggccccacacctttaggaaag

SEQ ID NO: 60407 - DNA, 25 bp, Saccharomyces pastorianus
ttcatccctggattagtattcatgc

SEQ ID NO: 60408 - DNA, 25 bp, Saccharomyces pastorianus
aaactctgggacttcatgttcgcgt

SEQ ID NO: 60409 - DNA, 25 bp, Saccharomyces pastorianus
gagatttacggaatgccctccatac

SEQ ID NO: 60410 - DNA, 25 bp, Saccharomyces pastorianus
acatcctgtttgttgtagcgttcct

SEQ ID NO: 60411 - DNA, 25 bp, Saccharomyces pastorianus
aggcggaaggcccagttcaacgaat

SEQ ID NO: 60412 - DNA, 25 bp, Saccharomyces pastorianus
ttgacgtttccctcaggatcatcga

SEQ ID NO: 60413 - DNA, 25 bp, Saccharomyces pastorianus
agataataccgacctacttgaccaa

SEQ ID NO: 60414 - DNA, 25 bp, Saccharomyces pastorianus
tactcacgctttccagttgcaataa

SEQ ID NO: 60415 - DNA, 25 bp, Saccharomyces pastorianus
atggcgctaagctacttgacgtttc

SEQ ID NO: 60416 - DNA, 25 bp, Saccharomyces pastorianus
agctgttctccaagctgtgttacga

SEQ ID NO: 60417 - DNA, 25 bp, Saccharomyces pastorianus
tattgccaagattcctgctcagatt

SEQ ID NO: 60418 - DNA, 25 bp, Saccharomyces pastorianus
gttcccggatttcgatgctgatgag

SEQ ID NO: 60419 - DNA, 25 bp, Saccharomyces pastorianus
aagagggcgtctactcgctgtttaa

SEQ ID NO: 60420 - DNA, 25 bp, Saccharomyces pastorianus
tcagggcaggccgttaagtacgacg

SEQ ID NO: 60421 - DNA, 25 bp, Saccharomyces pastorianus
gatgatgacctcagggcaggccgtt

SEQ ID NO: 60422 - DNA, 25 bp, Saccharomyces pastorianus
ggccggtgttatctcgctgtatgac

SEQ ID NO: 60423 - DNA, 25 bp, Saccharomyces pastorianus
tacgacggcgccatggactgtatga

SEQ ID NO: 60424 - DNA, 25 bp, Saccharomyces pastorianus
tgtttaagggttgcggcgccaacat

SEQ ID NO: 60425 - DNA, 25 bp, Saccharomyces pastorianus
gcgtctactcgctgtttaagggttg

SEQ ID NO: 60426 - DNA, 25 bp, Saccharomyces pastorianus
atggactgtatgaggaaaatcgttc

SEQ ID NO: 60427 - DNA, 25 bp, Saccharomyces pastorianus
aatcgttcagcaagagggcgtctac

SEQ ID NO: 60428 - DNA, 25 bp, Saccharomyces pastorianus
tgttatctcgctgtatgaccagttg

SEQ ID NO: 60429 - DNA, 25 bp, Saccharomyces pastorianus
ggcgccaacatcttcagaggcgtgg

SEQ ID NO: 60430 - DNA, 25 bp, Saccharomyces pastorianus
gcaggcgctgaatttcgcgttcaag

SEQ ID NO: 60431 - DNA, 25 bp, Saccharomyces pastorianus
gtggtttgccggtaatctgttttca

SEQ ID NO: 60432 - DNA, 25 bp, Saccharomyces pastorianus
catgagggcattctgtcgttctgga

SEQ ID NO: 60433 - DNA, 25 bp, Saccharomyces pastorianus
gtcgctgatgtttgtgtattcgctg

SEQ ID NO: 60434 - DNA, 25 bp, Saccharomyces pastorianus
gtattcgctggactatgctaggaca

SEQ ID NO: 60435 - DNA, 25 bp, Saccharomyces pastorianus
aaacggaaccgcagactcagaagtc

SEQ ID NO: 60436 - DNA, 25 bp, Saccharomyces pastorianus
cagaagtcgcatttcggcgtggact

SEQ ID NO: 60437 - DNA, 25 bp, Saccharomyces pastorianus
gctggactcgcggtacctgggcatc

SEQ ID NO: 60438 - DNA, 25 bp, Saccharomyces pastorianus
gtaacacggccaatgtgcttcggta

SEQ ID NO: 60439 - DNA, 25 bp, Saccharomyces pastorianus
ctgggcatcgcggagtgctttaaga

SEQ ID NO: 60440 - DNA, 25 bp, Saccharomyces pastorianus
gctttaagaggactgccgcacatga

SEQ ID NO: 60441 - DNA, 25 bp, Saccharomyces pastorianus
gtttaggccttgtccttgtggaaga

SEQ ID NO: 60442 - DNA, 25 bp, Saccharomyces pastorianus
aaggtaatgctgctgccaacacaca

SEQ ID NO: 60443 - DNA, 25 bp, Saccharomyces pastorianus
agattcaaagccgacaaccctggtg

SEQ ID NO: 60444 - DNA, 25 bp, Saccharomyces pastorianus
aacacggcactattccttctgggtt

SEQ ID NO: 60445 - DNA, 25 bp, Saccharomyces pastorianus
acgatgctttgggtgaagttcctca

SEQ ID NO: 60446 - DNA, 25 bp, Saccharomyces pastorianus
gggtattatcacgattgccatctat

SEQ ID NO: 60447 - DNA, 25 bp, Saccharomyces pastorianus
gggtattatcgctatgacattctct

SEQ ID NO: 60448 - DNA, 25 bp, Saccharomyces pastorianus
tggtatccaagatgctcactctcaa

SEQ ID NO: 60449 - DNA, 25 bp, Saccharomyces pastorianus
gtgtcagccctgaagtcttgatgga

SEQ ID NO: 60450 - DNA, 25 bp, Saccharomyces pastorianus
acattctcttgtttcgctggtatct

SEQ ID NO: 60451 - DNA, 25 bp, Saccharomyces pastorianus
tcctcacagtttcgacgcagatgac

SEQ ID NO: 60452 - DNA, 25 bp, Saccharomyces pastorianus
aggtgatcatggcatgtccccagta

SEQ ID NO: 60453 - DNA, 25 bp, Saccharomyces pastorianus
gagaggatacttttggccatcatta

SEQ ID NO: 60454 - DNA, 25 bp, Saccharomyces pastorianus
gtccccagtacagcagacagagttt

SEQ ID NO: 60455 - DNA, 25 bp, Saccharomyces pastorianus
gaaaactttcttacgctggagtgct

SEQ ID NO: 60456 - DNA, 25 bp, Saccharomyces pastorianus
acttttgcaagacgttttaccatgg

SEQ ID NO: 60457 - DNA, 25 bp, Saccharomyces pastorianus
gacagagtttattttgcccatcaat

SEQ ID NO: 60458 - DNA, 25 bp, Saccharomyces pastorianus
gtttactcaaaggacgtcctccaca

SEQ ID NO: 60459 - DNA, 25 bp, Saccharomyces pastorianus
ggacgtcctccacataaattaagca

SEQ ID NO: 60460 - DNA, 25 bp, Saccharomyces pastorianus
gcttgagccaagtctttacacaatt

SEQ ID NO: 60461 - DNA, 25 bp, Saccharomyces pastorianus
acaattatgcgattcagtcactgag

SEQ ID NO: 60462 - DNA, 25 bp, Saccharomyces pastorianus
tttgcccatcaatatgtctcagtac

SEQ ID NO: 60463 - DNA, 25 bp, Saccharomyces pastorianus
tattgagtgtcatacctaaacgcca

SEQ ID NO: 60464 - DNA, 25 bp, Saccharomyces pastorianus
gtgtcatacctaaacgccaatattt

SEQ ID NO: 60465 - DNA, 25 bp, Saccharomyces pastorianus
aactaccagcagaagttcttgattt

SEQ ID NO: 60466 - DNA, 25 bp, Saccharomyces pastorianus
gggctcagaactaccagcagaagtt

SEQ ID NO: 60467 - DNA, 25 bp, Saccharomyces pastorianus
gagtgtcatacctaaacgccaatat

SEQ ID NO: 60468 - DNA, 25 bp, Saccharomyces pastorianus
accagcagaagttcttgatttattg

SEQ ID NO: 60469 - DNA, 25 bp, Saccharomyces pastorianus
tttaacactaatttgctagatgcac

SEQ ID NO: 60470 - DNA, 25 bp, Saccharomyces pastorianus
tcttgatttattgagtgtcatacct

SEQ ID NO: 60471 - DNA, 25 bp, Saccharomyces pastorianus
gctagatgcacaaaagttagttaac

SEQ ID NO: 60472 - DNA, 25 bp, Saccharomyces pastorianus
taaacgccaatattttaacactaat

SEQ ID NO: 60473 - DNA, 25 bp, Saccharomyces pastorianus
gttagttaacttcttgaatgatcaa

SEQ ID NO: 60474 - DNA, 25 bp, Saccharomyces pastorianus
gactcacaaattaaaaccttatttg

SEQ ID NO: 60475 - DNA, 25 bp, Saccharomyces pastorianus
gatccagttgaaagcaatttacaaa

SEQ ID NO: 60476 - DNA, 25 bp, Saccharomyces pastorianus
aaagttcaagatttgatccagttga

SEQ ID NO: 60477 - DNA, 25 bp, Saccharomyces pastorianus
ggaattaacctacatgtacaatgag

SEQ ID NO: 60478 - DNA, 25 bp, Saccharomyces pastorianus
gattttttgaaagattccctcaaga

SEQ ID NO: 60479 - DNA, 25 bp, Saccharomyces pastorianus
gataagctatgaatccaagtttggt

SEQ ID NO: 60480 - DNA, 25 bp, Saccharomyces pastorianus
agattccctcaagaaaacttaattg

SEQ ID NO: 60481 - DNA, 25 bp, Saccharomyces pastorianus
gaaacatccgttgaaaaagttcaag

SEQ ID NO: 60482 - DNA, 25 bp, Saccharomyces pastorianus
gggtctaaaatatttccaaaatgat

SEQ ID NO: 60483 - DNA, 25 bp, Saccharomyces pastorianus
caagatttgatccagttgaaagcaa

SEQ ID NO: 60484 - DNA, 25 bp, Saccharomyces pastorianus
tggaactgggtctaaaatatttcca

SEQ ID NO: 60485 - DNA, 25 bp, Saccharomyces pastorianus
agctatattgacaactctcacgaaa

SEQ ID NO: 60486 - DNA, 25 bp, Saccharomyces pastorianus
taaccgtcgtatcattacaaaaccg

SEQ ID NO: 60487 - DNA, 25 bp, Saccharomyces pastorianus
aactgatgaataacgagtcgctcct

SEQ ID NO: 60488 - DNA, 25 bp, Saccharomyces pastorianus
aaatacatcccagttgtcatccaag

SEQ ID NO: 60489 - DNA, 25 bp, Saccharomyces pastorianus
gtcatccaagaactttgtttcaaat

SEQ ID NO: 60490 - DNA, 25 bp, Saccharomyces pastorianus
gagtcgctcctgaaaagaattccac

SEQ ID NO: 60491 - DNA, 25 bp, Saccharomyces pastorianus
gaagactttgaagccattccagcta

SEQ ID NO: 60492 - DNA, 25 bp, Saccharomyces pastorianus
gagatttggtcagtttattgtcatt

SEQ ID NO: 60493 - DNA, 25 bp, Saccharomyces pastorianus
gtcattattaccatatcctacaaaa

SEQ ID NO: 60494 - DNA, 25 bp, Saccharomyces pastorianus
cttcagatccttcccacttttataa

SEQ ID NO: 60495 - DNA, 25 bp, Saccharomyces pastorianus
aagttccgaatcttcgttatccgct

SEQ ID NO: 60496 - DNA, 25 bp, Saccharomyces pastorianus
aacagagacatttcctgtgtccatg

SEQ ID NO: 60497 - DNA, 25 bp, Saccharomyces pastorianus
attccaccactaccagtaataacgc

SEQ ID NO: 60498 - DNA, 25 bp, Saccharomyces pastorianus
gacatctactgtcgcattctcaaca

SEQ ID NO: 60499 - DNA, 25 bp, Saccharomyces pastorianus
aatcgtggctgaaaagacatctact

SEQ ID NO: 60500 - DNA, 25 bp, Saccharomyces pastorianus
atcttcaactacaacaattccacca

SEQ ID NO: 60501 - DNA, 25 bp, Saccharomyces pastorianus
ctgtgtccatggtgcttgagcagac

SEQ ID NO: 60502 - DNA, 25 bp, Saccharomyces pastorianus
gaagacggcaacagcttcgatccga

SEQ ID NO: 60503 - DNA, 25 bp, Saccharomyces pastorianus
agacaacctcttacagcacatgaaa

SEQ ID NO: 60504 - DNA, 25 bp, Saccharomyces pastorianus
acatccatcaatgccagttttgcga

SEQ ID NO: 60505 - DNA, 25 bp, Saccharomyces pastorianus
gccttcgtccgaccaaaaatacatc

SEQ ID NO: 60506 - DNA, 25 bp, Saccharomyces pastorianus
gcttcgatccgaacatcaagacttt

SEQ ID NO: 60507 - DNA, 25 bp, Saccharomyces pastorianus
gccaggctggcccaattaaaaagca

SEQ ID NO: 60508 - DNA, 25 bp, Saccharomyces pastorianus
gaggtgacaattctgctcctgtagg

SEQ ID NO: 60509 - DNA, 25 bp, Saccharomyces pastorianus
aaaaagcaatggtggcggcgccaat

SEQ ID NO: 60510 - DNA, 25 bp, Saccharomyces pastorianus
gctcctgtaggtgcagctattgcta

SEQ ID NO: 60511 - DNA, 25 bp, Saccharomyces pastorianus
ggatccggagttgcaagccattaga

SEQ ID NO: 60512 - DNA, 25 bp, Saccharomyces pastorianus
cccaggcggtggaggcatatctaaa

SEQ ID NO: 60513 - DNA, 25 bp, Saccharomyces pastorianus
aagctttggagaggttgtcccgcgt

SEQ ID NO: 60514 - DNA, 25 bp, Saccharomyces pastorianus
caagcgtgtgtttagttatggatcc

SEQ ID NO: 60515 - DNA, 25 bp, Saccharomyces pastorianus
gctattgctagcttcttagagcctc

SEQ ID NO: 60516 - DNA, 25 bp, Saccharomyces pastorianus
aatggcgacagaaatggcggtgcta

SEQ ID NO: 60517 - DNA, 25 bp, Saccharomyces pastorianus
gattggcacgaacaatgtcacccat

SEQ ID NO: 60518 - DNA, 25 bp, Saccharomyces pastorianus
aaatacactaccatcaagaagacga

SEQ ID NO: 60519 - DNA, 25 bp, Saccharomyces pastorianus
aatcaaggatattgcctcattaata

SEQ ID NO: 60520 - DNA, 25 bp, Saccharomyces pastorianus
taccgactacagttacaaccgagat

SEQ ID NO: 60521 - DNA, 25 bp, Saccharomyces pastorianus
gaactgtcaaatgtagtggtaccaa

SEQ ID NO: 60522 - DNA, 25 bp, Saccharomyces pastorianus
tttccaatttcaggaggacttaatt

SEQ ID NO: 60523 - DNA, 25 bp, Saccharomyces pastorianus
attccatgcaattcaacgacttttc

SEQ ID NO: 60524 - DNA, 25 bp, Saccharomyces pastorianus
gaatgacggcaacatccaaattatg

SEQ ID NO: 60525 - DNA, 25 bp, Saccharomyces pastorianus
ggtaccaaacgaactaaattccatg

SEQ ID NO: 60526 - DNA, 25 bp, Saccharomyces pastorianus
acgacttttccagtgatgatatcag

SEQ ID NO: 60527 - DNA, 25 bp, Saccharomyces pastorianus
ctatgggaccttaaggaactgtcaa

SEQ ID NO: 60528 - DNA, 25 bp, Saccharomyces pastorianus
aattgggtgccagaatgacggcaac

SEQ ID NO: 60529 - DNA, 25 bp, Saccharomyces pastorianus
aagtcgccttcacattgcgacagtt

SEQ ID NO: 60530 - DNA, 25 bp, Saccharomyces pastorianus
tcagcatcttctctatcttcgactt

SEQ ID NO: 60531 - DNA, 25 bp, Saccharomyces pastorianus
caccagcacgataaccttttacttg

SEQ ID NO: 60532 - DNA, 25 bp, Saccharomyces pastorianus
taaatgaaccctccaccactatgga

SEQ ID NO: 60533 - DNA, 25 bp, Saccharomyces pastorianus
gacagtcctctcagaatgttaatta

SEQ ID NO: 60534 - DNA, 25 bp, Saccharomyces pastorianus
gaaaatcattacttgtgacggtaca

SEQ ID NO: 60535 - DNA, 25 bp, Saccharomyces pastorianus
tatcttcgacttcctccaaagagaa

SEQ ID NO: 60536 - DNA, 25 bp, Saccharomyces pastorianus
aagaaggatgccagcaagtcgcctt

SEQ ID NO: 60537 - DNA, 25 bp, Saccharomyces pastorianus
gaaacgacgtttaaacaccagcacg

SEQ ID NO: 60538 - DNA, 25 bp, Saccharomyces pastorianus
agacctccattactggattgccgtt

SEQ ID NO: 60539 - DNA, 25 bp, Saccharomyces pastorianus
aaaagcgtcctaagagacagtcctc

SEQ ID NO: 60540 - DNA, 25 bp, Saccharomyces pastorianus
gggtattgccattttgtgatgcatt

SEQ ID NO: 60541 - DNA, 25 bp, Saccharomyces pastorianus
ggattcaataatctttttcagacac

SEQ ID NO: 60542 - DNA, 25 bp, Saccharomyces pastorianus
gctggtttgctgttattattgtcgt

SEQ ID NO: 60543 - DNA, 25 bp, Saccharomyces pastorianus
tttagttcgtttggtaccactacat

SEQ ID NO: 60544 - DNA, 25 bp, Saccharomyces pastorianus
ggtaccactacatttgacagttcct

SEQ ID NO: 60545 - DNA, 25 bp, Saccharomyces pastorianus
gaggcaatatccttgattttattat

SEQ ID NO: 60546 - DNA, 25 bp, Saccharomyces pastorianus
gatatcatcactggaaaagtcgttg

SEQ ID NO: 60547 - DNA, 25 bp, Saccharomyces pastorianus
gattttattatcttgggtattgcca

SEQ ID NO: 60548 - DNA, 25 bp, Saccharomyces pastorianus
aggtcccatagtttttgtagattat

SEQ ID NO: 60549 - DNA, 25 bp, Saccharomyces pastorianus
gacagttccttaaggtcccatagtt

SEQ ID NO: 60550 - DNA, 25 bp, Saccharomyces pastorianus
attattgtcgttacttatttggaag

SEQ ID NO: 60551 - DNA, 25 bp, Saccharomyces pastorianus
ttttacccacaatactaccacaaga

SEQ ID NO: 60552 - DNA, 25 bp, Saccharomyces pastorianus
ttaagcctttcttggatcctgttac

SEQ ID NO: 60553 - DNA, 25 bp, Saccharomyces pastorianus
tggccacctggtagagacttcatgt

SEQ ID NO: 60554 - DNA, 25 bp, Saccharomyces pastorianus
gccattgattgccaagttttaccca

SEQ ID NO: 60555 - DNA, 25 bp, Saccharomyces pastorianus
gttacatctgaagagcgcatgctga

SEQ ID NO: 60556 - DNA, 25 bp, Saccharomyces pastorianus
tttctagtgcatacagcgtcatgtc

SEQ ID NO: 60557 - DNA, 25 bp, Saccharomyces pastorianus
ttggatcctgttaccgtttcaaaga

SEQ ID NO: 60558 - DNA, 25 bp, Saccharomyces pastorianus
aatgctccatttggtttctctaccg

SEQ ID NO: 60559 - DNA, 25 bp, Saccharomyces pastorianus
gtaagtccgaagttaatgagtccac

SEQ ID NO: 60560 - DNA, 25 bp, Saccharomyces pastorianus
agattccagccgaaaacttgcctgt

SEQ ID NO: 60561 - DNA, 25 bp, Saccharomyces pastorianus
tcatgtcatacgtcagggaagcctc

SEQ ID NO: 60562 - DNA, 25 bp, Saccharomyces pastorianus
gcgtaccacccgctattagttgtaa

SEQ ID NO: 60563 - DNA, 25 bp, Saccharomyces pastorianus
atgcaccgggtatgcaggcgtacca

SEQ ID NO: 60564 - DNA, 25 bp, Saccharomyces pastorianus
gagcctgttttcaacgcaatgtgga

SEQ ID NO: 60565 - DNA, 25 bp, Saccharomyces pastorianus
taaggtatatcattcacgtcccgac

SEQ ID NO: 60566 - DNA, 25 bp, Saccharomyces pastorianus
tattatttacgatacccattccaac

SEQ ID NO: 60567 - DNA, 25 bp, Saccharomyces pastorianus
gataccatactgttggatctgcaac

SEQ ID NO: 60568 - DNA, 25 bp, Saccharomyces pastorianus
gattcgacaaatcctcttaatacag

SEQ ID NO: 60569 - DNA, 25 bp, Saccharomyces pastorianus
tcagctcctatatttgattcgacaa

SEQ ID NO: 60570 - DNA, 25 bp, Saccharomyces pastorianus
atgctttgatgcatgctccaaacgg

SEQ ID NO: 60571 - DNA, 25 bp, Saccharomyces pastorianus
aaattcattcggctatctgggaggg

SEQ ID NO: 60572 - DNA, 25 bp, Saccharomyces pastorianus
tattatccctgggttatgcaccggg

SEQ ID NO: 60573 - DNA, 25 bp, Saccharomyces pastorianus
cgcctttgtcccaggtatggctaag

SEQ ID NO: 60574 - DNA, 25 bp, Saccharomyces pastorianus
taggcatctagtggctggtctatca

SEQ ID NO: 60575 - DNA, 25 bp, Saccharomyces pastorianus
gaaattgcactaaccacatccaata

SEQ ID NO: 60576 - DNA, 25 bp, Saccharomyces pastorianus
gaaacttcaccagtccttcaggaat

SEQ ID NO: 60577 - DNA, 25 bp, Saccharomyces pastorianus
gggatgaatcctctttagaaccact

SEQ ID NO: 60578 - DNA, 25 bp, Saccharomyces pastorianus
ggcagattggatcgctgtagtttta

SEQ ID NO: 60579 - DNA, 25 bp, Saccharomyces pastorianus
tacggtaatacgctagaaacttcac

SEQ ID NO: 60580 - DNA, 25 bp, Saccharomyces pastorianus
tggtctatcatctggtctactagcc

SEQ ID NO: 60581 - DNA, 25 bp, Saccharomyces pastorianus
agctgtgccgtttctcctagtacgg

SEQ ID NO: 60582 - DNA, 25 bp, Saccharomyces pastorianus
aagcattagatagcgcctttgtccc

SEQ ID NO: 60583 - DNA, 25 bp, Saccharomyces pastorianus
gtaaggtcagcatctgtagtggcag

SEQ ID NO: 60584 - DNA, 25 bp, Saccharomyces pastorianus
ctcgatgtcgctcatagctcaaagg

SEQ ID NO: 60585 - DNA, 25 bp, Saccharomyces pastorianus
acttgcgcgggattgatctttctaa

SEQ ID NO: 60586 - DNA, 25 bp, Saccharomyces pastorianus
aaagtgcctggctgctaacgactat

SEQ ID NO: 60587 - DNA, 25 bp, Saccharomyces pastorianus
aaagacacccgaggagctggccaag

SEQ ID NO: 60588 - DNA, 25 bp, Saccharomyces pastorianus
tcattatccccggtggagagtccac

SEQ ID NO: 60589 - DNA, 25 bp, Saccharomyces pastorianus
tgcctttttggagcacgcaaaccat

SEQ ID NO: 60590 - DNA, 25 bp, Saccharomyces pastorianus
tggccaagtgcgatgctctcattat

SEQ ID NO: 60591 - DNA, 25 bp, Saccharomyces pastorianus
gtgacttttccaaattcatccctgg

SEQ ID NO: 60592 - DNA, 25 bp, Saccharomyces pastorianus
gaacgtggttgtagctgcacagcaa

SEQ ID NO: 60593 - DNA, 25 bp, Saccharomyces pastorianus
gaaattttggatcctattgcggtta

SEQ ID NO: 60594 - DNA, 25 bp, Saccharomyces pastorianus
ataccctcacctatacaagttcgtt

SEQ ID NO: 60595 - DNA, 25 bp, Saccharomyces pastorianus
tatggccaaactttagcttccttgc

SEQ ID NO: 60596 - DNA, 25 bp, Saccharomyces pastorianus
attcagtgatacgttatggccaaac

SEQ ID NO: 60597 - DNA, 25 bp, Saccharomyces pastorianus
catacgattcaaggttcagttcaag

SEQ ID NO: 60598 - DNA, 25 bp, Saccharomyces pastorianus
gggcgatttcacactatacatatgt

SEQ ID NO: 60599 - DNA, 25 bp, Saccharomyces pastorianus
gtatgaaggtgtcccctcaatacta

SEQ ID NO: 60600 - DNA, 25 bp, Saccharomyces pastorianus
gattgtccgattacatgttatggca

SEQ ID NO: 60601 - DNA, 25 bp, Saccharomyces pastorianus
gaagacttctatatcattacatcaa

SEQ ID NO: 60602 - DNA, 25 bp, Saccharomyces pastorianus
atatgttttccatacacatcgagaa

SEQ ID NO: 60603 - DNA, 25 bp, Saccharomyces pastorianus
tagtggtcatagaagattgtccgat

SEQ ID NO: 60604 - DNA, 25 bp, Saccharomyces pastorianus
attactgatcagaactagtggtcat

SEQ ID NO: 60605 - DNA, 25 bp, Saccharomyces pastorianus
agcttccttgccatgtatctaatga

SEQ ID NO: 60606 - DNA, 25 bp, Saccharomyces pastorianus
ggtacctgagcatgtctcctttatc

SEQ ID NO: 60607 - DNA, 25 bp, Saccharomyces pastorianus
gtgtatctgcctatgcattttcaat

SEQ ID NO: 60608 - DNA, 25 bp, Saccharomyces pastorianus
cgttcagtctgttttcatggcttta

SEQ ID NO: 60609 - DNA, 25 bp, Saccharomyces pastorianus
ggtaatcggaggtacgccaaatcac

SEQ ID NO: 60610 - DNA, 25 bp, Saccharomyces pastorianus
gagcagttttgctttgccataaaaa

SEQ ID NO: 60611 - DNA, 25 bp, Saccharomyces pastorianus
tactaaccttactctatatatgcaa

SEQ ID NO: 60612 - DNA, 25 bp, Saccharomyces pastorianus
gtattaagcgtagggccggtacctg

SEQ ID NO: 60613 - DNA, 25 bp, Saccharomyces pastorianus
attcacgataaagctggacgagttt

SEQ ID NO: 60614 - DNA, 25 bp, Saccharomyces pastorianus
agcaggcggattaacattactaacc

SEQ ID NO: 60615 - DNA, 25 bp, Saccharomyces pastorianus
aagaaggctcctggcagagaccaag

SEQ ID NO: 60616 - DNA, 25 bp, Saccharomyces pastorianus
tcgggtggattatgtcgttcagtct

SEQ ID NO: 60617 - DNA, 25 bp, Saccharomyces pastorianus
gagtagcagtggagccgtacctctc

SEQ ID NO: 60618 - DNA, 25 bp, Saccharomyces pastorianus
ttttggtgatggtttggctaatgca

SEQ ID NO: 60619 - DNA, 25 bp, Saccharomyces pastorianus
aatggcactccaacaagtgtttccc

SEQ ID NO: 60620 - DNA, 25 bp, Saccharomyces pastorianus
gaaaccacattctgggagtagcagt

SEQ ID NO: 60621 - DNA, 25 bp, Saccharomyces pastorianus
aatgcactagctgcgagagcaaaca

SEQ ID NO: 60622 - DNA, 25 bp, Saccharomyces pastorianus
ggtttggctaatgcactagctgcga

SEQ ID NO: 60623 - DNA, 25 bp, Saccharomyces pastorianus
caacaagtgtttccccagcagctaa

SEQ ID NO: 60624 - DNA, 25 bp, Saccharomyces pastorianus
aatttctcctcagcctgttcaaaat

SEQ ID NO: 60625 - DNA, 25 bp, Saccharomyces pastorianus
gaacagcagaacaatggcactccaa

SEQ ID NO: 60626 - DNA, 25 bp, Saccharomyces pastorianus
ccccagcagctaaccaagcaagttt

SEQ ID NO: 60627 - DNA, 25 bp, Saccharomyces pastorianus
gaatgtaatttctcctcagcctgtt

SEQ ID NO: 60628 - DNA, 25 bp, Saccharomyces pastorianus
ggaacctatgtttgaggcagcctat

SEQ ID NO: 60629 - DNA, 25 bp, Saccharomyces pastorianus
gcacctgctgctatagttcaaacca

SEQ ID NO: 60630 - DNA, 25 bp, Saccharomyces pastorianus
gccaagtcagtgaatcagctcccaa

SEQ ID NO: 60631 - DNA, 25 bp, Saccharomyces pastorianus
ttcctactgctccaacttcgagaaa

SEQ ID NO: 60632 - DNA, 25 bp, Saccharomyces pastorianus
gctcaatttctccagtgtatcgtac

SEQ ID NO: 60633 - DNA, 25 bp, Saccharomyces pastorianus
ataggcccaacacttgagtaccaaa

SEQ ID NO: 60634 - DNA, 25 bp, Saccharomyces pastorianus
agagaagtactgctgcacctgctgc

SEQ ID NO: 60635 - DNA, 25 bp, Saccharomyces pastorianus
atctagcactatatctgttcgtcgt

SEQ ID NO: 60636 - DNA, 25 bp, Saccharomyces pastorianus
ctcaccatctgagctacctttgaag

SEQ ID NO: 60637 - DNA, 25 bp, Saccharomyces pastorianus
agtgtatcgtactagtccctcggaa

SEQ ID NO: 60638 - DNA, 25 bp, Saccharomyces pastorianus
gcagcctatgactttccgggttcag

SEQ ID NO: 60639 - DNA, 25 bp, Saccharomyces pastorianus
agaggcgtcgcaggtgactttcata

SEQ ID NO: 60640 - DNA, 25 bp, Saccharomyces pastorianus
gtggaaagtcaactgtgctctatgt

SEQ ID NO: 60641 - DNA, 25 bp, Saccharomyces pastorianus
ataaagctcttggacgaaaacgttg

SEQ ID NO: 60642 - DNA, 25 bp, Saccharomyces pastorianus
aaatcaactacgcagttgcgcaagg

SEQ ID NO: 60643 - DNA, 25 bp, Saccharomyces pastorianus
tgaatctgtaaaaccgcaatttgag

SEQ ID NO: 60644 - DNA, 25 bp, Saccharomyces pastorianus
agttgcgcaaggaaataaagctctt

SEQ ID NO: 60645 - DNA, 25 bp, Saccharomyces pastorianus
gcagaagcgtttgaagtcgttaaat

SEQ ID NO: 60646 - DNA, 25 bp, Saccharomyces pastorianus
gcagccaccatatgtgcagaagcgt

SEQ ID NO: 60647 - DNA, 25 bp, Saccharomyces pastorianus
tgctctatgttgcaagaggcgtcgc

SEQ ID NO: 60648 - DNA, 25 bp, Saccharomyces pastorianus
ggaacaagactactacccattaacg

SEQ ID NO: 60649 - DNA, 25 bp, Saccharomyces pastorianus
acgaggaaacacagccatgcagcca

SEQ ID NO: 60650 - DNA, 25 bp, Saccharomyces pastorianus
actgccaccggtatcaaggtcttct

SEQ ID NO: 60651 - DNA, 25 bp, Saccharomyces pastorianus
tgccaccggtatcaaggtcttctct

SEQ ID NO: 60652 - DNA, 25 bp, Saccharomyces pastorianus
caccggtatcaaggtcttctctttg

SEQ ID NO: 60653 - DNA, 25 bp, Saccharomyces pastorianus
ctactgccaccggtatcaaggtctt

SEQ ID NO: 60654 - DNA, 25 bp, Saccharomyces pastorianus
gtctgctcaagacgaagtcttctct

SEQ ID NO: 60655 - DNA, 25 bp, Saccharomyces pastorianus
tattggttagctgccgctactgcca

SEQ ID NO: 60656 - DNA, 25 bp, Saccharomyces pastorianus
acagatattggttagctgccgctac

SEQ ID NO: 60657 - DNA, 25 bp, Saccharomyces pastorianus
aaacagatattggttagctgccgct

SEQ ID NO: 60658 - DNA, 25 bp, Saccharomyces pastorianus
tcaagacgaagtcttctctttggct

SEQ ID NO: 60659 - DNA, 25 bp, Saccharomyces pastorianus
cactttgtctgctcaagacgaagtc

SEQ ID NO: 60660 - DNA, 25 bp, Saccharomyces pastorianus
gatattggttagctgccgctactgc

SEQ ID NO: 60661 - DNA, 25 bp, Saccharomyces pastorianus
ttgttgtccgcttcccgtgataaga

SEQ ID NO: 60662 - DNA, 25 bp, Saccharomyces pastorianus
ggtgtcccagttagatctttcaagg

SEQ ID NO: 60663 - DNA, 25 bp, Saccharomyces pastorianus
gtgataagactttgatctcctggaa

SEQ ID NO: 60664 - DNA, 25 bp, Saccharomyces pastorianus
actttgactgctgacggtgcttacg

SEQ ID NO: 60665 - DNA, 25 bp, Saccharomyces pastorianus
gttcccgtgacaagaccatcaaggt

SEQ ID NO: 60666 - DNA, 25 bp, Saccharomyces pastorianus
gatctcctggaagttgactggtgac

SEQ ID NO: 60667 - DNA, 25 bp, Saccharomyces pastorianus
ttacgctttgtctgcttcttgggac

SEQ ID NO: 60668 - DNA, 25 bp, Saccharomyces pastorianus
acaagtccgatgttatgtccgttga

SEQ ID NO: 60669 - DNA, 25 bp, Saccharomyces pastorianus
gatctttcaagggtcacagtcacat

SEQ ID NO: 60670 - DNA, 25 bp, Saccharomyces pastorianus
ggtttcccaagtcagagttgttcca

SEQ ID NO: 60671 - DNA, 25 bp, Saccharomyces pastorianus
tggctacttctgctggtcaaccaaa

SEQ ID NO: 60672 - DNA, 25 bp, Saccharomyces pastorianus
attagcgaactatccttggtcaagt

SEQ ID NO: 60673 - DNA, 25 bp, Saccharomyces pastorianus
tcgttgcattgctgttgaccttgat

SEQ ID NO: 60674 - DNA, 25 bp, Saccharomyces pastorianus
tgtgtttgaaccagggaccacccca

SEQ ID NO: 60675 - DNA, 25 bp, Saccharomyces pastorianus
atcactgttatctggttcattagcg

SEQ ID NO: 60676 - DNA, 25 bp, Saccharomyces pastorianus
ttatttacgccacgcacggcaacat

SEQ ID NO: 60677 - DNA, 25 bp, Saccharomyces pastorianus
gaaagcgggaacaccactggcagtt

SEQ ID NO: 60678 - DNA, 25 bp, Saccharomyces pastorianus
ctacgttctgttcggcatttctctt

SEQ ID NO: 60679 - DNA, 25 bp, Saccharomyces pastorianus
atttctcttttgctctggatcactg

SEQ ID NO: 60680 - DNA, 25 bp, Saccharomyces pastorianus
tgaccttgatgtggcttatttacgc

SEQ ID NO: 60681 - DNA, 25 bp, Saccharomyces pastorianus
ggcaacattcacttctacgttctgt

SEQ ID NO: 60682 - DNA, 25 bp, Saccharomyces pastorianus
atggctagttttttcgtcaagttat

SEQ ID NO: 60683 - DNA, 25 bp, Saccharomyces pastorianus
tcaaacgggtttcctggtggcagac

SEQ ID NO: 60684 - DNA, 25 bp, Saccharomyces pastorianus
gacaatgctattccacatgaaccaa

SEQ ID NO: 60685 - DNA, 25 bp, Saccharomyces pastorianus
atgcaggtttgattacttccaaaac

SEQ ID NO: 60686 - DNA, 25 bp, Saccharomyces pastorianus
tagcggatagattcattagcggcat

SEQ ID NO: 60687 - DNA, 25 bp, Saccharomyces pastorianus
ataacggtttggttgaagccactgc

SEQ ID NO: 60688 - DNA, 25 bp, Saccharomyces pastorianus
gaagctgttctgacattctggaatt

SEQ ID NO: 60689 - DNA, 25 bp, Saccharomyces pastorianus
tggaattctaatcctcaaacgggtt

SEQ ID NO: 60690 - DNA, 25 bp, Saccharomyces pastorianus
agatctgaagaccatatttgacaag

SEQ ID NO: 60691 - DNA, 25 bp, Saccharomyces pastorianus
gtatgttacagcaattgggttcgtt

SEQ ID NO: 60692 - DNA, 25 bp, Saccharomyces pastorianus
ggtggcagacgccttcaaatatgca

SEQ ID NO: 60693 - DNA, 25 bp, Saccharomyces pastorianus
aagccactgctatcgaagctgtctt

SEQ ID NO: 60694 - DNA, 25 bp, Saccharomyces pastorianus
gcaaccacaaaagcaagctgccgtt

SEQ ID NO: 60695 - DNA, 25 bp, Saccharomyces pastorianus
attcctcccgttgttcaattatgta

SEQ ID NO: 60696 - DNA, 25 bp, Saccharomyces pastorianus
aagctgccgttgctttgttaaccat

SEQ ID NO: 60697 - DNA, 25 bp, Saccharomyces pastorianus
gaagactatttcaatgacgccttat

SEQ ID NO: 60698 - DNA, 25 bp, Saccharomyces pastorianus
aatgaatacggccatgaagactatt

SEQ ID NO: 60699 - DNA, 25 bp, Saccharomyces pastorianus
aagagacaaagaattcctcccgttg

SEQ ID NO: 60700 - DNA, 25 bp, Saccharomyces pastorianus
aacgttgctgggaaaagtatcatca

SEQ ID NO: 60701 - DNA, 25 bp, Saccharomyces pastorianus
atacttcaaatgaaactgggccatg

SEQ ID NO: 60702 - DNA, 25 bp, Saccharomyces pastorianus
gacgccttattgagtacttttaacg

SEQ ID NO: 60703 - DNA, 25 bp, Saccharomyces pastorianus
cgttgctttgttaaccatggtcgta

SEQ ID NO: 60704 - DNA, 25 bp, Saccharomyces pastorianus
agattcttatctattttgtcaccaa

SEQ ID NO: 60705 - DNA, 25 bp, Saccharomyces pastorianus
ccgacctcgatcttgaataacctgg

SEQ ID NO: 60706 - DNA, 25 bp, Saccharomyces pastorianus
atgattaacattccgtacatccccg

SEQ ID NO: 60707 - DNA, 25 bp, Saccharomyces pastorianus
caggttttgtcgatcatgttgccat

SEQ ID NO: 60708 - DNA, 25 bp, Saccharomyces pastorianus
tacatccccgttttgtctacaagga

SEQ ID NO: 60709 - DNA, 25 bp, Saccharomyces pastorianus
gagcagatgctctatttccggatga

SEQ ID NO: 60710 - DNA, 25 bp, Saccharomyces pastorianus
gagcgttactgttatgtggtcccta

SEQ ID NO: 60711 - DNA, 25 bp, Saccharomyces pastorianus
ggaagggtcttctcttgacgtacag

SEQ ID NO: 60712 - DNA, 25 bp, Saccharomyces pastorianus
gtgtgatatcgcaagtacgccatta

SEQ ID NO: 60713 - DNA, 25 bp, Saccharomyces pastorianus
taaagagtgacattcctagcgccat

SEQ ID NO: 60714 - DNA, 25 bp, Saccharomyces pastorianus
ggtccctaggtttggatctacagtg

SEQ ID NO: 60715 - DNA, 25 bp, Saccharomyces pastorianus
ataaacttatcacccacggagcgtt

SEQ ID NO: 60716 - DNA, 25 bp, Saccharomyces pastorianus
catgaccgatggtgtcttactacga

SEQ ID NO: 60717 - DNA, 25 bp, Saccharomyces pastorianus
agtttcctgtatctgttcatttcaa

SEQ ID NO: 60718 - DNA, 25 bp, Saccharomyces pastorianus
agtagacgcaagacagtttcctgta

SEQ ID NO: 60719 - DNA, 25 bp, Saccharomyces pastorianus
ttgcgcctcctgtcttacaagtaga

SEQ ID NO: 60720 - DNA, 25 bp, Saccharomyces pastorianus
aagagtggcagctgtgtctatggcc

SEQ ID NO: 60721 - DNA, 25 bp, Saccharomyces pastorianus
aacaaggctttatttccaattgcgc

SEQ ID NO: 60722 - DNA, 25 bp, Saccharomyces pastorianus
taagattcgactccacaacgaagga

SEQ ID NO: 60723 - DNA, 25 bp, Saccharomyces pastorianus
ggtcggtattacacagcccagaaga

SEQ ID NO: 60724 - DNA, 25 bp, Saccharomyces pastorianus
atttcaatcgtagaaccgcgttcaa

SEQ ID NO: 60725 - DNA, 25 bp, Saccharomyces pastorianus
tgtaagatccaccagaagcttccac

SEQ ID NO: 60726 - DNA, 25 bp, Saccharomyces pastorianus
ggccgggcgtgtgaccaatgaatta

SEQ ID NO: 60727 - DNA, 25 bp, Saccharomyces pastorianus
taactatacacccaattccttcagt

SEQ ID NO: 60728 - DNA, 25 bp, Saccharomyces pastorianus
gatgcgccaaagatccacttattag

SEQ ID NO: 60729 - DNA, 25 bp, Saccharomyces pastorianus
gaaacgcacaaggtcactgatatat

SEQ ID NO: 60730 - DNA, 25 bp, Saccharomyces pastorianus
agatcccaggttgttgaaacgcaca

SEQ ID NO: 60731 - DNA, 25 bp, Saccharomyces pastorianus
gagccaggtgtcatatccatcaatt

SEQ ID NO: 60732 - DNA, 25 bp, Saccharomyces pastorianus
gtcgattttacgaaccctggtctga

SEQ ID NO: 60733 - DNA, 25 bp, Saccharomyces pastorianus
tacaccaccattctgcttaacttat

SEQ ID NO: 60734 - DNA, 25 bp, Saccharomyces pastorianus
atatgacttcaatggcgttcctttg

SEQ ID NO: 60735 - DNA, 25 bp, Saccharomyces pastorianus
tccacttattagatccttccaacga

SEQ ID NO: 60736 - DNA, 25 bp, Saccharomyces pastorianus
tcagtcactgtatctcaagggaatt

SEQ ID NO: 60737 - DNA, 25 bp, Saccharomyces pastorianus
ttcgtttccattactgatgcgccaa

SEQ ID NO: 60738 - DNA, 25 bp, Saccharomyces pastorianus
tagactcctcaattacacaagacgg

SEQ ID NO: 60739 - DNA, 25 bp, Saccharomyces pastorianus
gtgacaatgccagtcgcaccaaata

SEQ ID NO: 60740 - DNA, 25 bp, Saccharomyces pastorianus
gggttcagacattccatatgttgtt

SEQ ID NO: 60741 - DNA, 25 bp, Saccharomyces pastorianus
ggtgctccaacctactattataata

SEQ ID NO: 60742 - DNA, 25 bp, Saccharomyces pastorianus
gccgatcttccaggtacttacaatt

SEQ ID NO: 60743 - DNA, 25 bp, Saccharomyces pastorianus
gttgttagcttatcctatgcagaca

SEQ ID NO: 60744 - DNA, 25 bp, Saccharomyces pastorianus
taaagtgtttcaggccgatcttcca

SEQ ID NO: 60745 - DNA, 25 bp, Saccharomyces pastorianus
gagttgtcatttaccggtgctccaa

SEQ ID NO: 60746 - DNA, 25 bp, Saccharomyces pastorianus
atggaattccacgtgtggcgctaga

SEQ ID NO: 60747 - DNA, 25 bp, Saccharomyces pastorianus
gatggacttcacaagttttccagaa

SEQ ID NO: 60748 - DNA, 25 bp, Saccharomyces pastorianus
gaatccaagttttgtcctggtgtaa

SEQ ID NO: 60749 - DNA, 25 bp, Saccharomyces pastorianus
gaactcggccgaagatccatattgg

SEQ ID NO: 60750 - DNA, 25 bp, Saccharomyces pastorianus
aagccttttggtgcggtttgatgaa

SEQ ID NO: 60751 - DNA, 25 bp, Saccharomyces pastorianus
tgttcaagccagacatccgactagc

SEQ ID NO: 60752 - DNA, 25 bp, Saccharomyces pastorianus
atccgactagctcttgtccaatgta

SEQ ID NO: 60753 - DNA, 25 bp, Saccharomyces pastorianus
ccatattggtggagagcgtgctgaa

SEQ ID NO: 60754 - DNA, 25 bp, Saccharomyces pastorianus
agccgaataggatacgactgtgcag

SEQ ID NO: 60755 - DNA, 25 bp, Saccharomyces pastorianus
gggacattggcggacaacggacatt

SEQ ID NO: 60756 - DNA, 25 bp, Saccharomyces pastorianus
gactgtgcagtcattatcgcactaa

SEQ ID NO: 60757 - DNA, 25 bp, Saccharomyces pastorianus
gggataactacttcgacaagacgca

SEQ ID NO: 60758 - DNA, 25 bp, Saccharomyces pastorianus
gacattgaggccgttttgggataac

SEQ ID NO: 60759 - DNA, 25 bp, Saccharomyces pastorianus
ttgtccaatgtagcgggatcaccgg

SEQ ID NO: 60760 - DNA, 25 bp, Saccharomyces pastorianus
tgacaaaagactcaggtcccgtctc

SEQ ID NO: 60761 - DNA, 25 bp, Saccharomyces pastorianus
aaaagactcttttgcgcacgagcgt

SEQ ID NO: 60762 - DNA, 25 bp, Saccharomyces pastorianus
caacgtatttacttgccgcagagga

SEQ ID NO: 60763 - DNA, 25 bp, Saccharomyces pastorianus
aacctatttccaagccttcatcgag

SEQ ID NO: 60764 - DNA, 25 bp, Saccharomyces pastorianus
gaagaagacttacgtggcacactaa

SEQ ID NO: 60765 - DNA, 25 bp, Saccharomyces pastorianus
acgcctttacaagtggcctagtaca

SEQ ID NO: 60766 - DNA, 25 bp, Saccharomyces pastorianus
tgcgtcttccgtatcaacctatttc

SEQ ID NO: 60767 - DNA, 25 bp, Saccharomyces pastorianus
agcatcgatctgaacgtaggcaccg

SEQ ID NO: 60768 - DNA, 25 bp, Saccharomyces pastorianus
aactgctattgagctacgcctttac

SEQ ID NO: 60769 - DNA, 25 bp, Saccharomyces pastorianus
gaggtgttttggatcatcgtcattt

SEQ ID NO: 60770 - DNA, 25 bp, Saccharomyces pastorianus
aaatctcatgccagccaaggaattg

SEQ ID NO: 60771 - DNA, 25 bp, Saccharomyces pastorianus
ggcacctgtagaatcatcggcacaa

SEQ ID NO: 60772 - DNA, 25 bp, Saccharomyces pastorianus
aaactctttatacgtgtggcacctg

SEQ ID NO: 60773 - DNA, 25 bp, Saccharomyces pastorianus
gatgtgcccatcttaaccaatacta

SEQ ID NO: 60774 - DNA, 25 bp, Saccharomyces pastorianus
taacatggcttacggttcttatcct

SEQ ID NO: 60775 - DNA, 25 bp, Saccharomyces pastorianus
ttgtatgctcgacatatggccctcc

SEQ ID NO: 60776 - DNA, 25 bp, Saccharomyces pastorianus
acacgtttgtcctctccatggagat

SEQ ID NO: 60777 - DNA, 25 bp, Saccharomyces pastorianus
gagtttcaattggtggcctcgacac

SEQ ID NO: 60778 - DNA, 25 bp, Saccharomyces pastorianus
cctccggtttcttcagagtttcaat

SEQ ID NO: 60779 - DNA, 25 bp, Saccharomyces pastorianus
atgttttcgaaccagcatcatctct

SEQ ID NO: 60780 - DNA, 25 bp, Saccharomyces pastorianus
ggttcttatccttatcagtgctatg

SEQ ID NO: 60781 - DNA, 25 bp, Saccharomyces pastorianus
ttagaaatctcttgcattgacacga

SEQ ID NO: 60782 - DNA, 25 bp, Saccharomyces pastorianus
aatactgcgctgtttttaccctact

SEQ ID NO: 60783 - DNA, 25 bp, Saccharomyces pastorianus
atactgcgctgtttttaccctactg

SEQ ID NO: 60784 - DNA, 25 bp, Saccharomyces pastorianus
gttttggcgctaattggacatacgt

SEQ ID NO: 60785 - DNA, 25 bp, Saccharomyces pastorianus
tttggcgctaattggacatacgttt

SEQ ID NO: 60786 - DNA, 25 bp, Saccharomyces pastorianus
gcgctgtttttaccctactgttcgt

SEQ ID NO: 60787 - DNA, 25 bp, Saccharomyces pastorianus
actgcgctgtttttaccctactgtt

SEQ ID NO: 60788 - DNA, 25 bp, Saccharomyces pastorianus
ttcgttttggcgctaattggacata

SEQ ID NO: 60789 - DNA, 25 bp, Saccharomyces pastorianus
ggaatactgcgctgtttttacccta

SEQ ID NO: 60790 - DNA, 25 bp, Saccharomyces pastorianus
ctactgttcgttttggcgctaattg

SEQ ID NO: 60791 - DNA, 25 bp, Saccharomyces pastorianus
taccctactgttcgttttggcgcta

SEQ ID NO: 60792 - DNA, 25 bp, Saccharomyces pastorianus
ccctactgttcgttttggcgctaat

SEQ ID NO: 60793 - DNA, 25 bp, Saccharomyces pastorianus
aattacataggttcgccagtgcgcc

SEQ ID NO: 60794 - DNA, 25 bp, Saccharomyces pastorianus
tggtctatcaggcatggtattttca

SEQ ID NO: 60795 - DNA, 25 bp, Saccharomyces pastorianus
ggtgacgtgcggtagcatgatctta

SEQ ID NO: 60796 - DNA, 25 bp, Saccharomyces pastorianus
tcttcaccagccgttcatgaaaatt

SEQ ID NO: 60797 - DNA, 25 bp, Saccharomyces pastorianus
gaaacttcagaattttatggccttg

SEQ ID NO: 60798 - DNA, 25 bp, Saccharomyces pastorianus
tatcgaatcgaccattgttaccgcc

SEQ ID NO: 60799 - DNA, 25 bp, Saccharomyces pastorianus
tacaaagcttaaagtcttcgacctt

SEQ ID NO: 60800 - DNA, 25 bp, Saccharomyces pastorianus
gatcttagctggttacttttcattg

SEQ ID NO: 60801 - DNA, 25 bp, Saccharomyces pastorianus
tcctgtgtcactttatggtctatca

SEQ ID NO: 60802 - DNA, 25 bp, Saccharomyces pastorianus
tttctccccacgtactaagtatgac

SEQ ID NO: 60803 - DNA, 25 bp, Saccharomyces pastorianus
tcgacctttatttgttattacgtag

SEQ ID NO: 60804 - DNA, 25 bp, Saccharomyces pastorianus
ttattccaagacaatagtggcgcaa

SEQ ID NO: 60805 - DNA, 25 bp, Saccharomyces pastorianus
gaggcccatttgagcgaattattcc

SEQ ID NO: 60806 - DNA, 25 bp, Saccharomyces pastorianus
gacgatgctttactgaagaccctga

SEQ ID NO: 60807 - DNA, 25 bp, Saccharomyces pastorianus
gtaacactatccaccatgacgatgc

SEQ ID NO: 60808 - DNA, 25 bp, Saccharomyces pastorianus
atgccgagaggctaaatgacgaact

SEQ ID NO: 60809 - DNA, 25 bp, Saccharomyces pastorianus
gaagaccctgacagtactgcaacaa

SEQ ID NO: 60810 - DNA, 25 bp, Saccharomyces pastorianus
agtggcactatcgaaaacaacgttt

SEQ ID NO: 60811 - DNA, 25 bp, Saccharomyces pastorianus
gagcattcaaaattggtcaccaggt

SEQ ID NO: 60812 - DNA, 25 bp, Saccharomyces pastorianus
gtggcgcaattggtggtaacactat

SEQ ID NO: 60813 - DNA, 25 bp, Saccharomyces pastorianus
atgacgaactcatcagtggcactat

SEQ ID NO: 60814 - DNA, 25 bp, Saccharomyces pastorianus
gatcgaaacaatagagaggcccatt

SEQ ID NO: 60815 - DNA, 25 bp, Saccharomyces pastorianus
aagggagattctgagcgttttagcc

SEQ ID NO: 60816 - DNA, 25 bp, Saccharomyces pastorianus
aacccactgagtcctaagcatttgt

SEQ ID NO: 60817 - DNA, 25 bp, Saccharomyces pastorianus
gcattgcaactaaaaccggacctgt

SEQ ID NO: 60818 - DNA, 25 bp, Saccharomyces pastorianus
agatctcgatactcctacgagcata

SEQ ID NO: 60819 - DNA, 25 bp, Saccharomyces pastorianus
ggtattaaggctttccatctcatta

SEQ ID NO: 60820 - DNA, 25 bp, Saccharomyces pastorianus
tactctgatatttacgacgacgatt

SEQ ID NO: 60821 - DNA, 25 bp, Saccharomyces pastorianus
gaaaataccggttcctcatcaacgt

SEQ ID NO: 60822 - DNA, 25 bp, Saccharomyces pastorianus
tcatcaacgtctttactaccagaag

SEQ ID NO: 60823 - DNA, 25 bp, Saccharomyces pastorianus
aatgactttttgcagtttgtacagt

SEQ ID NO: 60824 - DNA, 25 bp, Saccharomyces pastorianus
aacttatcaagactggtctccacct

SEQ ID NO: 60825 - DNA, 25 bp, Saccharomyces pastorianus
aatggtcctcaattcaaccacgaac

SEQ ID NO: 60826 - DNA, 25 bp, Saccharomyces pastorianus
atgaaggccagtaacgttccccagt

SEQ ID NO: 60827 - DNA, 25 bp, Saccharomyces pastorianus
ccttagctgcttcgtcttatgtaga

SEQ ID NO: 60828 - DNA, 25 bp, Saccharomyces pastorianus
gttatcaatgtccagagccggttcc

SEQ ID NO: 60829 - DNA, 25 bp, Saccharomyces pastorianus
gttccccagttacatgtcagcagca

SEQ ID NO: 60830 - DNA, 25 bp, Saccharomyces pastorianus
gtagaaaacgcctcgtctcatgatg

SEQ ID NO: 60831 - DNA, 25 bp, Saccharomyces pastorianus
ggttcctggatctccacctaataaa

SEQ ID NO: 60832 - DNA, 25 bp, Saccharomyces pastorianus
atcttcggccacagcaacgagtatt

SEQ ID NO: 60833 - DNA, 25 bp, Saccharomyces pastorianus
gtcgacgcccaataaatcctcaaaa

SEQ ID NO: 60834 - DNA, 25 bp, Saccharomyces pastorianus
tgaattaggctcacctcttgcgtca

SEQ ID NO: 60835 - DNA, 25 bp, Saccharomyces pastorianus
taaaagtagctcaacgtcgacgccc

SEQ ID NO: 60836 - DNA, 25 bp, Saccharomyces pastorianus
atcaaggagggcatcttcggccaca

SEQ ID NO: 60837 - DNA, 25 bp, Saccharomyces pastorianus
tcatcagtgacattgacggcaccat

SEQ ID NO: 60838 - DNA, 25 bp, Saccharomyces pastorianus
gtgccggacaagctgactcaacgag

SEQ ID NO: 60839 - DNA, 25 bp, Saccharomyces pastorianus
cgagatttctcggaatggctacaat

SEQ ID NO: 60840 - DNA, 25 bp, Saccharomyces pastorianus
gccctaggtcatgtcttggctatga

SEQ ID NO: 60841 - DNA, 25 bp, Saccharomyces pastorianus
acaaaatccgatgccctaggtcatg

SEQ ID NO: 60842 - DNA, 25 bp, Saccharomyces pastorianus
cttgaagttttcagtggaccacggg

SEQ ID NO: 60843 - DNA, 25 bp, Saccharomyces pastorianus
gaagtgcttgaatctaacctatggt

SEQ ID NO: 60844 - DNA, 25 bp, Saccharomyces pastorianus
gggatgttccgattgtcatcagtga

SEQ ID NO: 60845 - DNA, 25 bp, Saccharomyces pastorianus
ggacctgtcattttgtcaccagata

SEQ ID NO: 60846 - DNA, 25 bp, Saccharomyces pastorianus
agcaaactgcccaacggacctgtca

SEQ ID NO: 60847 - DNA, 25 bp, Saccharomyces pastorianus
cacgggaaagccattgtcacttcaa

SEQ ID NO: 60848 - DNA, 25 bp, Saccharomyces pastorianus
cgtccaatgacgaagatgttactgt

SEQ ID NO: 60849 - DNA, 25 bp, Saccharomyces pastorianus
cgaagatgttactgttccttttggt

SEQ ID NO: 60850 - DNA, 25 bp, Saccharomyces pastorianus
atgacgaagatgttactgttccttt

SEQ ID NO: 60851 - DNA, 25 bp, Saccharomyces pastorianus
acaggaggagatattcggaccggtc

SEQ ID NO: 60852 - DNA, 25 bp, Saccharomyces pastorianus
aggacaaagtggtgtcgatacctat

SEQ ID NO: 60853 - DNA, 25 bp, Saccharomyces pastorianus
aatcgtctagattgttacaggagga

SEQ ID NO: 60854 - DNA, 25 bp, Saccharomyces pastorianus
aactgtttgggtgaactcgtccaat

SEQ ID NO: 60855 - DNA, 25 bp, Saccharomyces pastorianus
ttactgacgtcccacaatcgtctag

SEQ ID NO: 60856 - DNA, 25 bp, Saccharomyces pastorianus
atttttactgacgtcccacaatcgt

SEQ ID NO: 60857 - DNA, 25 bp, Saccharomyces pastorianus
tgacgtcccacaatcgtctagattg

SEQ ID NO: 60858 - DNA, 25 bp, Saccharomyces pastorianus
tttgggtgaactcgtccaatgacga

SEQ ID NO: 60859 - DNA, 25 bp, Saccharomyces pastorianus
tatgcagccgccaagttattcagat

SEQ ID NO: 60860 - DNA, 25 bp, Saccharomyces pastorianus
taatctggactccttacctatgcag

SEQ ID NO: 60861 - DNA, 25 bp, Saccharomyces pastorianus
gaagactacgggaaggacactctat

SEQ ID NO: 60862 - DNA, 25 bp, Saccharomyces pastorianus
agtccggcgcactattggaacaagc

SEQ ID NO: 60863 - DNA, 25 bp, Saccharomyces pastorianus
agacaaaatcttaccagtccggcgc

SEQ ID NO: 60864 - DNA, 25 bp, Saccharomyces pastorianus
gggattcgaattcaccatgtcacct

SEQ ID NO: 60865 - DNA, 25 bp, Saccharomyces pastorianus
gacgatgatctttcagatggcgaca

SEQ ID NO: 60866 - DNA, 25 bp, Saccharomyces pastorianus
taaatttcggtacttatggcttcgt

SEQ ID NO: 60867 - DNA, 25 bp, Saccharomyces pastorianus
taattggctccaatgtgccttgtca

SEQ ID NO: 60868 - DNA, 25 bp, Saccharomyces pastorianus
aagcggcggcgaagacaatgatttt

SEQ ID NO: 60869 - DNA, 25 bp, Saccharomyces pastorianus
atggcttcgtttacatcgaggcaaa

SEQ ID NO: 60870 - DNA, 25 bp, Saccharomyces pastorianus
ttacaggatactaaaggcacccact

SEQ ID NO: 60871 - DNA, 25 bp, Saccharomyces pastorianus
agaagttctaccttaccatcgcact

SEQ ID NO: 60872 - DNA, 25 bp, Saccharomyces pastorianus
gaaagtctctgccaataagcgtaga

SEQ ID NO: 60873 - DNA, 25 bp, Saccharomyces pastorianus
aagcatcacgatgagccagcaggca

SEQ ID NO: 60874 - DNA, 25 bp, Saccharomyces pastorianus
taacgttgacgacgatggttatcaa

SEQ ID NO: 60875 - DNA, 25 bp, Saccharomyces pastorianus
aggcacccactgacgtgaagacaat

SEQ ID NO: 60876 - DNA, 25 bp, Saccharomyces pastorianus
agccagcaggcagacacaactcaaa

SEQ ID NO: 60877 - DNA, 25 bp, Saccharomyces pastorianus
gaggtgattctctcaatggtagaag

SEQ ID NO: 60878 - DNA, 25 bp, Saccharomyces pastorianus
gggaaaccgtctatcaagtaccttg

SEQ ID NO: 60879 - DNA, 25 bp, Saccharomyces pastorianus
gacggaaaagactctacaagttcat

SEQ ID NO: 60880 - DNA, 25 bp, Saccharomyces pastorianus
tcaagtaccttgagtccaaatacgg

SEQ ID NO: 60881 - DNA, 25 bp, Saccharomyces pastorianus
gttccaacaataatgattcttatgg

SEQ ID NO: 60882 - DNA, 25 bp, Saccharomyces pastorianus
tatggttccaacaataatgattctt

SEQ ID NO: 60883 - DNA, 25 bp, Saccharomyces pastorianus
ttccaacaataatgattcttatggt

SEQ ID NO: 60884 - DNA, 25 bp, Saccharomyces pastorianus
tcgtatggttccaacaataatgatt

SEQ ID NO: 60885 - DNA, 25 bp, Saccharomyces pastorianus
aacgatggttcgtatggttccaaca

SEQ ID NO: 60886 - DNA, 25 bp, Saccharomyces pastorianus
ttatggttcatctaacaatggtggc

SEQ ID NO: 60887 - DNA, 25 bp, Saccharomyces pastorianus
atggttccaacaataatgattctta

SEQ ID NO: 60888 - DNA, 25 bp, Saccharomyces pastorianus
cgtatggttccaacaataatgattc

SEQ ID NO: 60889 - DNA, 25 bp, Saccharomyces pastorianus
gtatggttccaacaataatgattct

SEQ ID NO: 60890 - DNA, 25 bp, Saccharomyces pastorianus
tggttccaacaataatgattcttat

SEQ ID NO: 60891 - DNA, 25 bp, Saccharomyces pastorianus
ggttccaacaataatgattcttatg

SEQ ID NO: 60892 - DNA, 25 bp, Saccharomyces pastorianus
gatgattcgtatggttcatccaaca

SEQ ID NO: 60893 - DNA, 25 bp, Saccharomyces pastorianus
aacaactcttctaacgattctaaca

SEQ ID NO: 60894 - DNA, 25 bp, Saccharomyces pastorianus
gtcaagatagactcgaccgtttaaa

SEQ ID NO: 60895 - DNA, 25 bp, Saccharomyces pastorianus
ttctttaagtgacaacagcgacaac

SEQ ID NO: 60896 - DNA, 25 bp, Saccharomyces pastorianus
ctagagttcgtgataagctttccaa

SEQ ID NO: 60897 - DNA, 25 bp, Saccharomyces pastorianus
gattctaacaacaagtcctcctacg

SEQ ID NO: 60898 - DNA, 25 bp, Saccharomyces pastorianus
gttctggcaacgatggtcaaaatga

SEQ ID NO: 60899 - DNA, 25 bp, Saccharomyces pastorianus
gtgataagctttccaaaacttcttt

SEQ ID NO: 60900 - DNA, 25 bp, Saccharomyces pastorianus
aaatgattatctctccaaggctgaa

SEQ ID NO: 60901 - DNA, 25 bp, Saccharomyces pastorianus
aacgacaacaatagttctggcaacg

SEQ ID NO: 60902 - DNA, 25 bp, Saccharomyces pastorianus
gtgaggcaattcaccaacaacgaca

SEQ ID NO: 60903 - DNA, 25 bp, Saccharomyces pastorianus
gttaccgacacgaccatttctaatt

SEQ ID NO: 60904 - DNA, 25 bp, Saccharomyces pastorianus
aagtgcctggttacaacgattgccc

SEQ ID NO: 60905 - DNA, 25 bp, Saccharomyces pastorianus
gagctttcaaaattgcctcgaggct

SEQ ID NO: 60906 - DNA, 25 bp, Saccharomyces pastorianus
aacgattgccccacagttttgttct

SEQ ID NO: 60907 - DNA, 25 bp, Saccharomyces pastorianus
agattttacacaccgatcacacgag

SEQ ID NO: 60908 - DNA, 25 bp, Saccharomyces pastorianus
aacgatacccagtcacaggtggtga

SEQ ID NO: 60909 - DNA, 25 bp, Saccharomyces pastorianus
ttctaattggtgtcctgctttctta

SEQ ID NO: 60910 - DNA, 25 bp, Saccharomyces pastorianus
gaaattgtgcctgcaatgggccaaa

SEQ ID NO: 60911 - DNA, 25 bp, Saccharomyces pastorianus
gcctggctcaaagttggcctcgaaa

SEQ ID NO: 60912 - DNA, 25 bp, Saccharomyces pastorianus
caatgatctttgtgggcctggctca

SEQ ID NO: 60913 - DNA, 25 bp, Saccharomyces pastorianus
gtaggccctactcaacaagaaccgg

SEQ ID NO: 60914 - DNA, 25 bp, Saccharomyces pastorianus
atacctccccttgttgatttttatg

SEQ ID NO: 60915 - DNA, 25 bp, Saccharomyces pastorianus
gaagttttcatcaactacatccgat

SEQ ID NO: 60916 - DNA, 25 bp, Saccharomyces pastorianus
gtacagtacgggactcgacatgctc

SEQ ID NO: 60917 - DNA, 25 bp, Saccharomyces pastorianus
tgaggtccaatgataaaacgccgtt

SEQ ID NO: 60918 - DNA, 25 bp, Saccharomyces pastorianus
attaaagggcttactgcattgtgcg

SEQ ID NO: 60919 - DNA, 25 bp, Saccharomyces pastorianus
gcattgtgcgaattagaccctgaaa

SEQ ID NO: 60920 - DNA, 25 bp, Saccharomyces pastorianus
gaacggccacataatcatcctgagg

SEQ ID NO: 60921 - DNA, 25 bp, Saccharomyces pastorianus
gaagggccttccagatcgaattcat

SEQ ID NO: 60922 - DNA, 25 bp, Saccharomyces pastorianus
atctgtctcgatatcgtgaggtcca

SEQ ID NO: 60923 - DNA, 25 bp, Saccharomyces pastorianus
gtacacttgatacacgacctgttgt

SEQ ID NO: 60924 - DNA, 25 bp, Saccharomyces pastorianus
ggtatgtgccttcaagttaatgcga

SEQ ID NO: 60925 - DNA, 25 bp, Saccharomyces pastorianus
ataggttgcggtactgcagccgtca

SEQ ID NO: 60926 - DNA, 25 bp, Saccharomyces pastorianus
ttgctaagcattccactgacttctt

SEQ ID NO: 60927 - DNA, 25 bp, Saccharomyces pastorianus
acgcagttggtataccgttttagca

SEQ ID NO: 60928 - DNA, 25 bp, Saccharomyces pastorianus
agccgtcagctggtcgagtctgaag

SEQ ID NO: 60929 - DNA, 25 bp, Saccharomyces pastorianus
ggaggtcttctgctgaacatttttc

SEQ ID NO: 60930 - DNA, 25 bp, Saccharomyces pastorianus
aatggtcacctaattgttctccttc

SEQ ID NO: 60931 - DNA, 25 bp, Saccharomyces pastorianus
aatatcgtcaaagccgccggaaaca

SEQ ID NO: 60932 - DNA, 25 bp, Saccharomyces pastorianus
aaccatgtggtttctgttgatgagt

SEQ ID NO: 60933 - DNA, 25 bp, Saccharomyces pastorianus
gtcgagtctgaagctctacgctaat

SEQ ID NO: 60934 - DNA, 25 bp, Saccharomyces pastorianus
agagattcctcgacctaatgtacaa

SEQ ID NO: 60935 - DNA, 25 bp, Saccharomyces pastorianus
aatactctattcgaatttggccaca

SEQ ID NO: 60936 - DNA, 25 bp, Saccharomyces pastorianus
tttcagacccaactaattcgccgaa

SEQ ID NO: 60937 - DNA, 25 bp, Saccharomyces pastorianus
atatgggacacacgacctatttggg

SEQ ID NO: 60938 - DNA, 25 bp, Saccharomyces pastorianus
aacgttgctacattaagtggctata

SEQ ID NO: 60939 - DNA, 25 bp, Saccharomyces pastorianus
accagtcttaagtgcctagttgatg

SEQ ID NO: 60940 - DNA, 25 bp, Saccharomyces pastorianus
taattcgccgaagggtgccgatcta

SEQ ID NO: 60941 - DNA, 25 bp, Saccharomyces pastorianus
gtatgataccacatggctgctgcac

SEQ ID NO: 60942 - DNA, 25 bp, Saccharomyces pastorianus
gcatgttgagcttttcctttcagac

SEQ ID NO: 60943 - DNA, 25 bp, Saccharomyces pastorianus
gatctacccatcataaccagtctta

SEQ ID NO: 60944 - DNA, 25 bp, Saccharomyces pastorianus
atgactactttctcattgactgaaa

SEQ ID NO: 60945 - DNA, 25 bp, Saccharomyces pastorianus
gatatgcctagaagaatccacgtat

SEQ ID NO: 60946 - DNA, 25 bp, Saccharomyces pastorianus
gcacacatgctgttgcaacctacaa

SEQ ID NO: 60947 - DNA, 25 bp, Saccharomyces pastorianus
tagtactgctttttcacccgttcta

SEQ ID NO: 60948 - DNA, 25 bp, Saccharomyces pastorianus
aatccagcccattatttgccgaaaa

SEQ ID NO: 60949 - DNA, 25 bp, Saccharomyces pastorianus
aggtacatcctcaacctgttgcgtt

SEQ ID NO: 60950 - DNA, 25 bp, Saccharomyces pastorianus
tgtggtctcttgttgacgaagcctc

SEQ ID NO: 60951 - DNA, 25 bp, Saccharomyces pastorianus
atatgctgatgcttctctggacatt

SEQ ID NO: 60952 - DNA, 25 bp, Saccharomyces pastorianus
ctgttgcgttcaagaggctgtctca

SEQ ID NO: 60953 - DNA, 25 bp, Saccharomyces pastorianus
gaaaaattatggttcgttgcccaca

SEQ ID NO: 60954 - DNA, 25 bp, Saccharomyces pastorianus
acaagatccgagtacacttcccaaa

SEQ ID NO: 60955 - DNA, 25 bp, Saccharomyces pastorianus
atgtcatttctagatcccgctttgt

SEQ ID NO: 60956 - DNA, 25 bp, Saccharomyces pastorianus
ttgcccacaacttttcatcgaaaca

SEQ ID NO: 60957 - DNA, 25 bp, Saccharomyces pastorianus
atgaatcagcttctgtacccatgtc

SEQ ID NO: 60958 - DNA, 25 bp, Saccharomyces pastorianus
aacttattcaagatgctatgacgga

SEQ ID NO: 60959 - DNA, 25 bp, Saccharomyces pastorianus
aaaccgatacggaaagtgatcctct

SEQ ID NO: 60960 - DNA, 25 bp, Saccharomyces pastorianus
gtgacaattgcaaacgaactagtga

SEQ ID NO: 60961 - DNA, 25 bp, Saccharomyces pastorianus
gtgatcctctttccttaaacaattg

SEQ ID NO: 60962 - DNA, 25 bp, Saccharomyces pastorianus
gtttcaatcgtatatgttcctaatg

SEQ ID NO: 60963 - DNA, 25 bp, Saccharomyces pastorianus
aaccggttgaagatcgagtccgtat

SEQ ID NO: 60964 - DNA, 25 bp, Saccharomyces pastorianus
gagcagtacaaatcaatcaccgaaa

SEQ ID NO: 60965 - DNA, 25 bp, Saccharomyces pastorianus
atggctgaagcaattagcactgcaa

SEQ ID NO: 60966 - DNA, 25 bp, Saccharomyces pastorianus
gcactgcaagcaaaaacggtgtttt

SEQ ID NO: 60967 - DNA, 25 bp, Saccharomyces pastorianus
gatcgagtccgtattgaatgaaaac

SEQ ID NO: 60968 - DNA, 25 bp, Saccharomyces pastorianus
acagaagcatgtacgcaaattggaa

SEQ ID NO: 60969 - DNA, 25 bp, Saccharomyces pastorianus
tgaccccagccccaaagatctctta

SEQ ID NO: 60970 - DNA, 25 bp, Saccharomyces pastorianus
cagatctttggttagagaaatcgcc

SEQ ID NO: 60971 - DNA, 25 bp, Saccharomyces pastorianus
gagattgggttctttcatcagagcc

SEQ ID NO: 60972 - DNA, 25 bp, Saccharomyces pastorianus
cgatctaataagaaactctggtgaa

SEQ ID NO: 60973 - DNA, 25 bp, Saccharomyces pastorianus
agaagattgatcgatctaataagaa

SEQ ID NO: 60974 - DNA, 25 bp, Saccharomyces pastorianus
cagaaccaagttcgtcagatctttg

SEQ ID NO: 60975 - DNA, 25 bp, Saccharomyces pastorianus
agccccaaagatctcttacaagaag

SEQ ID NO: 60976 - DNA, 25 bp, Saccharomyces pastorianus
gccggtttgtctccatacgaaagaa

SEQ ID NO: 60977 - DNA, 25 bp, Saccharomyces pastorianus
ggttctttcatcagagccaaggcta

SEQ ID NO: 60978 - DNA, 25 bp, Saccharomyces pastorianus
aagggtgctgcttccaacagaacca

SEQ ID NO: 60979 - DNA, 25 bp, Saccharomyces pastorianus
agaaatcgccggtttgtctccatac

SEQ ID NO: 60980 - DNA, 25 bp, Saccharomyces pastorianus
ccccatctctggtcgaagtctataa

SEQ ID NO: 60981 - DNA, 25 bp, Saccharomyces pastorianus
tacttcgaccaaaacgcttcttcat

SEQ ID NO: 60982 - DNA, 25 bp, Saccharomyces pastorianus
attcagttccactaacatcgaccat

SEQ ID NO: 60983 - DNA, 25 bp, Saccharomyces pastorianus
accaaagtgcttgcgacagtactat

SEQ ID NO: 60984 - DNA, 25 bp, Saccharomyces pastorianus
ggcgccaactatactccaatgagaa

SEQ ID NO: 60985 - DNA, 25 bp, Saccharomyces pastorianus
gcatatgtacaccttcaaccagttc

SEQ ID NO: 60986 - DNA, 25 bp, Saccharomyces pastorianus
agcctgcctaatcagacccaaaatg

SEQ ID NO: 60987 - DNA, 25 bp, Saccharomyces pastorianus
gcaattggcctctaccatagatcta

SEQ ID NO: 60988 - DNA, 25 bp, Saccharomyces pastorianus
ggccacggaccatcatcaagtaatt

SEQ ID NO: 60989 - DNA, 25 bp, Saccharomyces pastorianus
atctttagtgttctcatcaatggca

SEQ ID NO: 60990 - DNA, 25 bp, Saccharomyces pastorianus
gtggtatcttccagaactcagctga

SEQ ID NO: 60991 - DNA, 25 bp, Saccharomyces pastorianus
tgggcacatgtctttggttggcagc

SEQ ID NO: 60992 - DNA, 25 bp, Saccharomyces pastorianus
tcgtatacctcgtctttctgaattg

SEQ ID NO: 60993 - DNA, 25 bp, Saccharomyces pastorianus
cggtcccaatccaagagctcgtata

SEQ ID NO: 60994 - DNA, 25 bp, Saccharomyces pastorianus
agacaatctcaatcttccgaagaca

SEQ ID NO: 60995 - DNA, 25 bp, Saccharomyces pastorianus
gttctccgcaaagcactggattgga

SEQ ID NO: 60996 - DNA, 25 bp, Saccharomyces pastorianus
tggtaggttctacggtcccaatcca

SEQ ID NO: 60997 - DNA, 25 bp, Saccharomyces pastorianus
catatcttggataccttgagctggg

SEQ ID NO: 60998 - DNA, 25 bp, Saccharomyces pastorianus
ggatgtttacgaacccatgattaat

SEQ ID NO: 60999 - DNA, 25 bp, Saccharomyces pastorianus
gattggatggcgctacaaccaccat

SEQ ID NO: 61000 - DNA, 25 bp, Saccharomyces pastorianus
gtacgaaatcagcaacggcgtattt

SEQ ID NO: 61001 - DNA, 25 bp, Saccharomyces pastorianus
gaacacatcagcagttctccgcaaa

SEQ ID NO: 61002 - DNA, 25 bp, Saccharomyces pastorianus
gatctcttcaagctgcaagtctgca

SEQ ID NO: 61003 - DNA, 25 bp, Saccharomyces pastorianus
tcctcattctggtacctttgcaaga

SEQ ID NO: 61004 - DNA, 25 bp, Saccharomyces pastorianus
gggctcaagaatacaccaacaggtt

SEQ ID NO: 61005 - DNA, 25 bp, Saccharomyces pastorianus
aaggcccatgttcataacttcagtg

SEQ ID NO: 61006 - DNA, 25 bp, Saccharomyces pastorianus
ttgagaagcccaatcctcattctgg

SEQ ID NO: 61007 - DNA, 25 bp, Saccharomyces pastorianus
gaccacccagaaaaatacgccttat

SEQ ID NO: 61008 - DNA, 25 bp, Saccharomyces pastorianus
gacgaagagttgttccataggcttg

SEQ ID NO: 61009 - DNA, 25 bp, Saccharomyces pastorianus
gcgaagtggaggcttttgcattcaa

SEQ ID NO: 61010 - DNA, 25 bp, Saccharomyces pastorianus
actgctgtatgaaaatgctccgccc

SEQ ID NO: 61011 - DNA, 25 bp, Saccharomyces pastorianus
gagatggaccctgttttacacgatc

SEQ ID NO: 61012 - DNA, 25 bp, Saccharomyces pastorianus
gactgatcccgaattgaatgacgaa

SEQ ID NO: 61013 - DNA, 25 bp, Saccharomyces pastorianus
tcagcatgttcatctatgtccgtct

SEQ ID NO: 61014 - DNA, 25 bp, Saccharomyces pastorianus
gctaacactaaccaccagttcatag

SEQ ID NO: 61015 - DNA, 25 bp, Saccharomyces pastorianus
gtggccagcctttggacatatcgag

SEQ ID NO: 61016 - DNA, 25 bp, Saccharomyces pastorianus
aagaaaactccctgacgacgacaat

SEQ ID NO: 61017 - DNA, 25 bp, Saccharomyces pastorianus
atatgtacttcaactgcagctctcg

SEQ ID NO: 61018 - DNA, 25 bp, Saccharomyces pastorianus
tatgtccgtctcagatccgaataac

SEQ ID NO: 61019 - DNA, 25 bp, Saccharomyces pastorianus
gcggcgacttcaagggcggctaaac

SEQ ID NO: 61020 - DNA, 25 bp, Saccharomyces pastorianus
gaaattccatcgctgttaagtttga

SEQ ID NO: 61021 - DNA, 25 bp, Saccharomyces pastorianus
aatgcgtgcataacttgtcgccaag

SEQ ID NO: 61022 - DNA, 25 bp, Saccharomyces pastorianus
atatgaaacgaatagcgcccgccct

SEQ ID NO: 61023 - DNA, 25 bp, Saccharomyces pastorianus
gctaggaggttcagcgattcgcaca

SEQ ID NO: 61024 - DNA, 25 bp, Saccharomyces pastorianus
aaaggcgtaattgttggcagagcac

SEQ ID NO: 61025 - DNA, 25 bp, Saccharomyces pastorianus
gatcccaccattaatccagagcaaa

SEQ ID NO: 61026 - DNA, 25 bp, Saccharomyces pastorianus
atggatcgttcattgttgacgcttt

SEQ ID NO: 61027 - DNA, 25 bp, Saccharomyces pastorianus
gggttgttgtagatcccaccattaa

SEQ ID NO: 61028 - DNA, 25 bp, Saccharomyces pastorianus
aggctcgttttttgagacgttgtct

SEQ ID NO: 61029 - DNA, 25 bp, Saccharomyces pastorianus
gttaccactgattattttagccaat

SEQ ID NO: 61030 - DNA, 25 bp, Saccharomyces pastorianus
aggtattcctgtgggtgtgattgca

SEQ ID NO: 61031 - DNA, 25 bp, Saccharomyces pastorianus
atatatcccgcctttaggtgaacta

SEQ ID NO: 61032 - DNA, 25 bp, Saccharomyces pastorianus
gactggattcgacgtatggacattt

SEQ ID NO: 61033 - DNA, 25 bp, Saccharomyces pastorianus
tatcgaagacgtgatccctgctgat

SEQ ID NO: 61034 - DNA, 25 bp, Saccharomyces pastorianus
gctgatccagctaacctgaagtcat

SEQ ID NO: 61035 - DNA, 25 bp, Saccharomyces pastorianus
agacagtattcacccaacgctaaaa

SEQ ID NO: 61036 - DNA, 25 bp, Saccharomyces pastorianus
aaacggctacgtgagattcgtggtt

SEQ ID NO: 61037 - DNA, 25 bp, Saccharomyces pastorianus
gaccttttacacaacagtattcggg

SEQ ID NO: 61038 - DNA, 25 bp, Saccharomyces pastorianus
gttcgcccttggatatgaccgggat

SEQ ID NO: 61039 - DNA, 25 bp, Saccharomyces pastorianus
gaccgggatgtgaaaatacgacctt

SEQ ID NO: 61040 - DNA, 25 bp, Saccharomyces pastorianus
cagttgagggctttatcggcggatt

SEQ ID NO: 61041 - DNA, 25 bp, Saccharomyces pastorianus
tatgagtctatgtaccaaggttact

SEQ ID NO: 61042 - DNA, 25 bp, Saccharomyces pastorianus
gattccattgaattgtcagcattga

SEQ ID NO: 61043 - DNA, 25 bp, Saccharomyces pastorianus
gaaggatcttgtgcaaacgtacgaa

SEQ ID NO: 61044 - DNA, 25 bp, Saccharomyces pastorianus
acatatgtaacttgttcgcccttgg

SEQ ID NO: 61045 - DNA, 25 bp, Saccharomyces pastorianus
acagtattcgggtcaaacagagttt

SEQ ID NO: 61046 - DNA, 25 bp, Saccharomyces pastorianus
gtgtgatgacacaggctagctcctt

SEQ ID NO: 61047 - DNA, 25 bp, Saccharomyces pastorianus
actaatatagttttggcccttgtag

SEQ ID NO: 61048 - DNA, 25 bp, Saccharomyces pastorianus
aagtcaatatctcgtcacctagtct

SEQ ID NO: 61049 - DNA, 25 bp, Saccharomyces pastorianus
tatctcgtcacctagtctgaaacta

SEQ ID NO: 61050 - DNA, 25 bp, Saccharomyces pastorianus
ggctagctccttgacaactaatata

SEQ ID NO: 61051 - DNA, 25 bp, Saccharomyces pastorianus
tttgatgactctactaaggcagaac

SEQ ID NO: 61052 - DNA, 25 bp, Saccharomyces pastorianus
gaacaagtcgttgcagaagtggttt

SEQ ID NO: 61053 - DNA, 25 bp, Saccharomyces pastorianus
gtatcgaatgtggaaaagcttttgt

SEQ ID NO: 61054 - DNA, 25 bp, Saccharomyces pastorianus
accagcacaacccaaaaagtcaata

SEQ ID NO: 61055 - DNA, 25 bp, Saccharomyces pastorianus
gaatccagacatacgatattgtgtg

SEQ ID NO: 61056 - DNA, 25 bp, Saccharomyces pastorianus
tggcccttgtagtagttttgatgac

SEQ ID NO: 61057 - DNA, 25 bp, Saccharomyces pastorianus
tagagacttcaactggaggccacgt

SEQ ID NO: 61058 - DNA, 25 bp, Saccharomyces pastorianus
gatcgaatgcgctatttccatgagt

SEQ ID NO: 61059 - DNA, 25 bp, Saccharomyces pastorianus
gttccactcttcgtatttcattaat

SEQ ID NO: 61060 - DNA, 25 bp, Saccharomyces pastorianus
tgaaatccaatccttacactctgct

SEQ ID NO: 61061 - DNA, 25 bp, Saccharomyces pastorianus
aatgggttcacatttctactcgcct

SEQ ID NO: 61062 - DNA, 25 bp, Saccharomyces pastorianus
agaactccattcgtagctgtgcatg

SEQ ID NO: 61063 - DNA, 25 bp, Saccharomyces pastorianus
aatccattcgatttgttccactctt

SEQ ID NO: 61064 - DNA, 25 bp, Saccharomyces pastorianus
gctgtgcatgctatggatgacccaa

SEQ ID NO: 61065 - DNA, 25 bp, Saccharomyces pastorianus
aatccgcacggttaagcaattcgac

SEQ ID NO: 61066 - DNA, 25 bp, Saccharomyces pastorianus
gggccaaaacttgctacgtatggtt

SEQ ID NO: 61067 - DNA, 25 bp, Saccharomyces pastorianus
gtagtgataatcttcccattggccc

SEQ ID NO: 61068 - DNA, 25 bp, Saccharomyces pastorianus
aggcgacctggtcatcgagttcaga

SEQ ID NO: 61069 - DNA, 25 bp, Saccharomyces pastorianus
gggtcatagtgcaagtgctccgcat

SEQ ID NO: 61070 - DNA, 25 bp, Saccharomyces pastorianus
cacgcggtggtctccaatggtgaga

SEQ ID NO: 61071 - DNA, 25 bp, Saccharomyces pastorianus
tacgtagtcgtcatgccaaaggcac

SEQ ID NO: 61072 - DNA, 25 bp, Saccharomyces pastorianus
gctccgcatgggtatcatgacgcaa

SEQ ID NO: 61073 - DNA, 25 bp, Saccharomyces pastorianus
gtacagaacagaagtcctctcggcc

SEQ ID NO: 61074 - DNA, 25 bp, Saccharomyces pastorianus
gttaagttatccagacccgcacacg

SEQ ID NO: 61075 - DNA, 25 bp, Saccharomyces pastorianus
aactggcccagtgtccagattgtca

SEQ ID NO: 61076 - DNA, 25 bp, Saccharomyces pastorianus
gaaaagggtccggacttcgacgcag

SEQ ID NO: 61077 - DNA, 25 bp, Saccharomyces pastorianus
gttgccatggtagtggttccgccga

SEQ ID NO: 61078 - DNA, 25 bp, Saccharomyces pastorianus
acgaacaaattcttccacgtcgacg

SEQ ID NO: 61079 - DNA, 25 bp, Saccharomyces pastorianus
tatgaagtatcctcggacacaccga

SEQ ID NO: 61080 - DNA, 25 bp, Saccharomyces pastorianus
tcagaccgacgaaaaccctgttgat

SEQ ID NO: 61081 - DNA, 25 bp, Saccharomyces pastorianus
atgttgcctcggatgattcacccag

SEQ ID NO: 61082 - DNA, 25 bp, Saccharomyces pastorianus
agttgtgacgcaacagcgcctgtat

SEQ ID NO: 61083 - DNA, 25 bp, Saccharomyces pastorianus
gcgcctgtattagatgttgcctcgg

SEQ ID NO: 61084 - DNA, 25 bp, Saccharomyces pastorianus
tgattcacccagtcataatgtaggc

SEQ ID NO: 61085 - DNA, 25 bp, Saccharomyces pastorianus
gaagatagtgctcctggtacaagaa

SEQ ID NO: 61086 - DNA, 25 bp, Saccharomyces pastorianus
ttctgatcctccatccgatacggaa

SEQ ID NO: 61087 - DNA, 25 bp, Saccharomyces pastorianus
cggacacaccgattgaagttctagt

SEQ ID NO: 61088 - DNA, 25 bp, Saccharomyces pastorianus
tgggaacaggtgacgcactactcaa

SEQ ID NO: 61089 - DNA, 25 bp, Saccharomyces pastorianus
ggaattataccatcgacggaccttc

SEQ ID NO: 61090 - DNA, 25 bp, Saccharomyces pastorianus
tgtttccgactattcttccaaggtt

SEQ ID NO: 61091 - DNA, 25 bp, Saccharomyces pastorianus
tggacgcataccacattcaacatga

SEQ ID NO: 61092 - DNA, 25 bp, Saccharomyces pastorianus
gaacccattccctataaatcttgtc

SEQ ID NO: 61093 - DNA, 25 bp, Saccharomyces pastorianus
tctattttcgatgtgttgcttccaa

SEQ ID NO: 61094 - DNA, 25 bp, Saccharomyces pastorianus
gtggcgttgtttctataccgttcat

SEQ ID NO: 61095 - DNA, 25 bp, Saccharomyces pastorianus
ggatagccctcctggtagtatatag

SEQ ID NO: 61096 - DNA, 25 bp, Saccharomyces pastorianus
attattcactacttctactgccata

SEQ ID NO: 61097 - DNA, 25 bp, Saccharomyces pastorianus
ggtcctgcatgggaaatctgcctta

SEQ ID NO: 61098 - DNA, 25 bp, Saccharomyces pastorianus
tttgcacttgttgccatgctaagaa

SEQ ID NO: 61099 - DNA, 25 bp, Saccharomyces pastorianus
gggttgattccaaattctttcacct

SEQ ID NO: 61100 - DNA, 25 bp, Saccharomyces pastorianus
accgttcatcgggttgctcttggat

SEQ ID NO: 61101 - DNA, 25 bp, Saccharomyces pastorianus
gatccagtcagaaatcatctcagac

SEQ ID NO: 61102 - DNA, 25 bp, Saccharomyces pastorianus
atcccgccagcacaacgaaacatgg

SEQ ID NO: 61103 - DNA, 25 bp, Saccharomyces pastorianus
ttgccagactagtgcttgctgccat

SEQ ID NO: 61104 - DNA, 25 bp, Saccharomyces pastorianus
aagcccattgtgaaagtgacataca

SEQ ID NO: 61105 - DNA, 25 bp, Saccharomyces pastorianus
aagagttggaagtcgacccgtcgag

SEQ ID NO: 61106 - DNA, 25 bp, Saccharomyces pastorianus
gacccgtcgagtatgaatttccaag

SEQ ID NO: 61107 - DNA, 25 bp, Saccharomyces pastorianus
tatcagccaaggttgccagactagt

SEQ ID NO: 61108 - DNA, 25 bp, Saccharomyces pastorianus
acaatagacaacatcggtttccgat

SEQ ID NO: 61109 - DNA, 25 bp, Saccharomyces pastorianus
ggtttccgatcttcttatcagccaa

SEQ ID NO: 61110 - DNA, 25 bp, Saccharomyces pastorianus
catgggcacgcagatccagtcagaa

SEQ ID NO: 61111 - DNA, 25 bp, Saccharomyces pastorianus
gactacaataaggtcaagcccattg

SEQ ID NO: 61112 - DNA, 25 bp, Saccharomyces pastorianus
atgctactctaaatcacggtacatg

SEQ ID NO: 61113 - DNA, 25 bp, Saccharomyces pastorianus
acaaggctctcaatgattctacaga

SEQ ID NO: 61114 - DNA, 25 bp, Saccharomyces pastorianus
gagacaggtctagtcaataatcttg

SEQ ID NO: 61115 - DNA, 25 bp, Saccharomyces pastorianus
atagccaactgtgataccgtcagga

SEQ ID NO: 61116 - DNA, 25 bp, Saccharomyces pastorianus
aggatctacaaaacaaggctctcaa

SEQ ID NO: 61117 - DNA, 25 bp, Saccharomyces pastorianus
tactttaatccataatacggttgaa

SEQ ID NO: 61118 - DNA, 25 bp, Saccharomyces pastorianus
tggcccttccttggagatcctagtg

SEQ ID NO: 61119 - DNA, 25 bp, Saccharomyces pastorianus
gtaagaaaagactggcccttccttg

SEQ ID NO: 61120 - DNA, 25 bp, Saccharomyces pastorianus
tcttgacatcctacaatgctactct

SEQ ID NO: 61121 - DNA, 25 bp, Saccharomyces pastorianus
attccactcgcaaaaatcatagcca

SEQ ID NO: 61122 - DNA, 25 bp, Saccharomyces pastorianus
tacggttgaatgtatcttactgaac

SEQ ID NO: 61123 - DNA, 25 bp, Saccharomyces pastorianus
atcgaccatgtgtttgtcatacata

SEQ ID NO: 61124 - DNA, 25 bp, Saccharomyces pastorianus
ctggttcatcaagcttttattcgga

SEQ ID NO: 61125 - DNA, 25 bp, Saccharomyces pastorianus
aagcaactccatgtataacttcagt

SEQ ID NO: 61126 - DNA, 25 bp, Saccharomyces pastorianus
atgccatttggaactgctccgttag

SEQ ID NO: 61127 - DNA, 25 bp, Saccharomyces pastorianus
gacattattgattccagtttacaga

SEQ ID NO: 61128 - DNA, 25 bp, Saccharomyces pastorianus
aaaagttatgcttctcgacacggga

SEQ ID NO: 61129 - DNA, 25 bp, Saccharomyces pastorianus
cttctctactttctggttcatcaag

SEQ ID NO: 61130 - DNA, 25 bp, Saccharomyces pastorianus
gtgaggcacctttcggtgcattttt

SEQ ID NO: 61131 - DNA, 25 bp, Saccharomyces pastorianus
gagactgttagtgatacctctagta

SEQ ID NO: 61132 - DNA, 25 bp, Saccharomyces pastorianus
gcatcttttaaagcctccagacaac

SEQ ID NO: 61133 - DNA, 25 bp, Saccharomyces pastorianus
tgaagacccgttttcgcatctttta

SEQ ID NO: 61134 - DNA, 25 bp, Saccharomyces pastorianus
aaagcccttcaaatcctattttcag

SEQ ID NO: 61135 - DNA, 25 bp, Saccharomyces pastorianus
attttcagttgatttggaccctcaa

SEQ ID NO: 61136 - DNA, 25 bp, Saccharomyces pastorianus
gaatgacttacagaaccccgaggat

SEQ ID NO: 61137 - DNA, 25 bp, Saccharomyces pastorianus
aggactgaaagcactgactctaaca

SEQ ID NO: 61138 - DNA, 25 bp, Saccharomyces pastorianus
atcggctcctctacagaagtttctg

SEQ ID NO: 61139 - DNA, 25 bp, Saccharomyces pastorianus
gaagatggtgcccatttttggtaaa

SEQ ID NO: 61140 - DNA, 25 bp, Saccharomyces pastorianus
gcgtccaacccagatgaaataagtc

SEQ ID NO: 61141 - DNA, 25 bp, Saccharomyces pastorianus
aggaggtccttatcaatcgagatca

SEQ ID NO: 61142 - DNA, 25 bp, Saccharomyces pastorianus
gaaaagttcttttatcggctcctct

SEQ ID NO: 61143 - DNA, 25 bp, Saccharomyces pastorianus
agaaccccgaggatcgtcgagaaat

SEQ ID NO: 61144 - DNA, 25 bp, Saccharomyces pastorianus
actctaacagcatttcagtccgaaa

SEQ ID NO: 61145 - DNA, 25 bp, Saccharomyces pastorianus
ttttctgagcctgtggctcaactgg

SEQ ID NO: 61146 - DNA, 25 bp, Saccharomyces pastorianus
ttctgagcctgtggctcaactggtt

SEQ ID NO: 61147 - DNA, 25 bp, Saccharomyces pastorianus
ctgtggctcaactggttgacgataa

SEQ ID NO: 61148 - DNA, 25 bp, Saccharomyces pastorianus
gctcaactggttgacgataacattc

SEQ ID NO: 61149 - DNA, 25 bp, Saccharomyces pastorianus
gattttctgagcctgtggctcaact

SEQ ID NO: 61150 - DNA, 25 bp, Saccharomyces pastorianus
tgagcctgtggctcaactggttgac

SEQ ID NO: 61151 - DNA, 25 bp, Saccharomyces pastorianus
ctagattttctgagcctgtggctca

SEQ ID NO: 61152 - DNA, 25 bp, Saccharomyces pastorianus
agcctgtggctcaactggttgacga

SEQ ID NO: 61153 - DNA, 25 bp, Saccharomyces pastorianus
gtggctcaactggttgacgataaca

SEQ ID NO: 61154 - DNA, 25 bp, Saccharomyces pastorianus
tctagattttctgagcctgtggctc

SEQ ID NO: 61155 - DNA, 25 bp, Saccharomyces pastorianus
gcctgtggctcaactggttgacgat

SEQ ID NO: 61156 - DNA, 25 bp, Saccharomyces pastorianus
acagttttcatggtcgggttcggtg

SEQ ID NO: 61157 - DNA, 25 bp, Saccharomyces pastorianus
ggtctataccgtggtgttactccaa

SEQ ID NO: 61158 - DNA, 25 bp, Saccharomyces pastorianus
gagtgtgttcaagactatttaccaa

SEQ ID NO: 61159 - DNA, 25 bp, Saccharomyces pastorianus
attacaagacacaaatccgccactg

SEQ ID NO: 61160 - DNA, 25 bp, Saccharomyces pastorianus
ggtgtcactcaagcttatttgacca

SEQ ID NO: 61161 - DNA, 25 bp, Saccharomyces pastorianus
aaatacatttatcagtccaacggtt

SEQ ID NO: 61162 - DNA, 25 bp, Saccharomyces pastorianus
aaaggtgtcaatgctgttgccatca

SEQ ID NO: 61163 - DNA, 25 bp, Saccharomyces pastorianus
aaagatcagtgccagtgccgtaggt

SEQ ID NO: 61164 - DNA, 25 bp, Saccharomyces pastorianus
cagtccaacggtttgaagggtctat

SEQ ID NO: 61165 - DNA, 25 bp, Saccharomyces pastorianus
gttgccatcagacaaatgaccaatt

SEQ ID NO: 61166 - DNA, 25 bp, Saccharomyces pastorianus
aagcaactttgcatcgggtataatg

SEQ ID NO: 61167 - DNA, 25 bp, Saccharomyces pastorianus
agagttgctgctgttgaaactttat

SEQ ID NO: 61168 - DNA, 25 bp, Saccharomyces pastorianus
tgttgaaactttataccaagacatg

SEQ ID NO: 61169 - DNA, 25 bp, Saccharomyces pastorianus
tctagagttgctgctgttgaaactt

SEQ ID NO: 61170 - DNA, 25 bp, Saccharomyces pastorianus
gagacgtttctagagttgctgctgt

SEQ ID NO: 61171 - DNA, 25 bp, Saccharomyces pastorianus
acgtttctagagttgctgctgttga

SEQ ID NO: 61172 - DNA, 25 bp, Saccharomyces pastorianus
agacgtttctagagttgctgctgtt

SEQ ID NO: 61173 - DNA, 25 bp, Saccharomyces pastorianus
cgtttctagagttgctgctgttgaa

SEQ ID NO: 61174 - DNA, 25 bp, Saccharomyces pastorianus
gctgctgttgaaactttataccaag

SEQ ID NO: 61175 - DNA, 25 bp, Saccharomyces pastorianus
tacaaggaaattagagacgtttcta

SEQ ID NO: 61176 - DNA, 25 bp, Saccharomyces pastorianus
gttgctgctgttgaaactttatacc

SEQ ID NO: 61177 - DNA, 25 bp, Saccharomyces pastorianus
tgccgacgttaagagacaatacgtc

SEQ ID NO: 61178 - DNA, 25 bp, Saccharomyces pastorianus
taagaacttcggtgtctgggtcaga

SEQ ID NO: 61179 - DNA, 25 bp, Saccharomyces pastorianus
tgttgaaactttataccaagacatg

SEQ ID NO: 61180 - DNA, 25 bp, Saccharomyces pastorianus
tctagagttgctgctgttgaaactt

SEQ ID NO: 61181 - DNA, 25 bp, Saccharomyces pastorianus
gagacgtttctagagttgctgctgt

SEQ ID NO: 61182 - DNA, 25 bp, Saccharomyces pastorianus
acgtttctagagttgctgctgttga

SEQ ID NO: 61183 - DNA, 25 bp, Saccharomyces pastorianus
ggacttgaaattcccattgccacac

SEQ ID NO: 61184 - DNA, 25 bp, Saccharomyces pastorianus
gctgctgttgaaactttataccaag

SEQ ID NO: 61185 - DNA, 25 bp, Saccharomyces pastorianus
tacaaggaaattagagacgtttcta

SEQ ID NO: 61186 - DNA, 25 bp, Saccharomyces pastorianus
taacgaagctcacccaactaaggtt

SEQ ID NO: 61187 - DNA, 25 bp, Saccharomyces pastorianus
gttgctgctgttgaaactttatacc

SEQ ID NO: 61188 - DNA, 25 bp, Saccharomyces pastorianus
tgccgacgttaagagacaatacgtc

SEQ ID NO: 61189 - DNA, 25 bp, Saccharomyces pastorianus
aggcactggaagaacacgtccctgg

SEQ ID NO: 61190 - DNA, 25 bp, Saccharomyces pastorianus
agaacattggctctgtccaggcact

SEQ ID NO: 61191 - DNA, 25 bp, Saccharomyces pastorianus
acattggctctgtccaggcactgga

SEQ ID NO: 61192 - DNA, 25 bp, Saccharomyces pastorianus
gtccaggcactggaagaacacgtcc

SEQ ID NO: 61193 - DNA, 25 bp, Saccharomyces pastorianus
tggcgtccagaacattggctctgtc

SEQ ID NO: 61194 - DNA, 25 bp, Saccharomyces pastorianus
gtccagaacattggctctgtccagg

SEQ ID NO: 61195 - DNA, 25 bp, Saccharomyces pastorianus
atgatcttgccgttcttggggtcgg

SEQ ID NO: 61196 - DNA, 25 bp, Saccharomyces pastorianus
gcactggaagaacacgtccctggac

SEQ ID NO: 61197 - DNA, 25 bp, Saccharomyces pastorianus
ttggctctgtccaggcactggaaga

SEQ ID NO: 61198 - DNA, 25 bp, Saccharomyces pastorianus
ggtggcgtccagaacattggctctg

SEQ ID NO: 61199 - DNA, 25 bp, Saccharomyces pastorianus
tcggtggcgtccagaacattggctc

SEQ ID NO: 61200 - DNA, 25 bp, Saccharomyces pastorianus
tcgctttgactgaggacggttggtt

SEQ ID NO: 61201 - DNA, 25 bp, Saccharomyces pastorianus
gaattactactaaagggtgcacccg

SEQ ID NO: 61202 - DNA, 25 bp, Saccharomyces pastorianus
aaatgggcttgttacatccgctcag

SEQ ID NO: 61203 - DNA, 25 bp, Saccharomyces pastorianus
aacccttatgtgcaaaacgtctgtg

SEQ ID NO: 61204 - DNA, 25 bp, Saccharomyces pastorianus
aacgtctgtgtttatgctgatgaaa

SEQ ID NO: 61205 - DNA, 25 bp, Saccharomyces pastorianus
acaactgccacatctcaaggtttga

SEQ ID NO: 61206 - DNA, 25 bp, Saccharomyces pastorianus
gtgcacccgtcttatctgaatacta

SEQ ID NO: 61207 - DNA, 25 bp, Saccharomyces pastorianus
gtgacgtcgctgagtggacttccag

SEQ ID NO: 61208 - DNA, 25 bp, Saccharomyces pastorianus
gaagagatatcttagccgccgtctt

SEQ ID NO: 61209 - DNA, 25 bp, Saccharomyces pastorianus
ttggttccgtactggtgacgtcgct

SEQ ID NO: 61210 - DNA, 25 bp, Saccharomyces pastorianus
tgggacctttatccaatctggccat

SEQ ID NO: 61211 - DNA, 25 bp, Saccharomyces pastorianus
gaagccatcgatcccaatgacaaga

SEQ ID NO: 61212 - DNA, 25 bp, Saccharomyces pastorianus
gtgacttggtcgagttcaagcccac

SEQ ID NO: 61213 - DNA, 25 bp, Saccharomyces pastorianus
gtcgccgccgtatgggaaacaatca

SEQ ID NO: 61214 - DNA, 25 bp, Saccharomyces pastorianus
ggtattgacccatcgcaacattgtt

SEQ ID NO: 61215 - DNA, 25 bp, Saccharomyces pastorianus
ggatggatcaactcttcagaccgtg

SEQ ID NO: 61216 - DNA, 25 bp, Saccharomyces pastorianus
gcccctggctcatattttcgaattg

SEQ ID NO: 61217 - DNA, 25 bp, Saccharomyces pastorianus
ggcaaggccgccgttgataagatca

SEQ ID NO: 61218 - DNA, 25 bp, Saccharomyces pastorianus
ggtgtgggccacaatgtctacggat

SEQ ID NO: 61219 - DNA, 25 bp, Saccharomyces pastorianus
ggaacagtcttctagggtacgccag

SEQ ID NO: 61220 - DNA, 25 bp, Saccharomyces pastorianus
cgagttgcctagcttgtcccaaaag

SEQ ID NO: 61221 - DNA, 25 bp, Saccharomyces pastorianus
gggtacgccagcatcaagactttga

SEQ ID NO: 61222 - DNA, 25 bp, Saccharomyces pastorianus
gaacgggtccgtgttagattctttg

SEQ ID NO: 61223 - DNA, 25 bp, Saccharomyces pastorianus
taacgttggttctttgacgaacact

SEQ ID NO: 61224 - DNA, 25 bp, Saccharomyces pastorianus
tgctgtggataggaagctaccttca

SEQ ID NO: 61225 - DNA, 25 bp, Saccharomyces pastorianus
aaattcgtctctcaatttgtctccc

SEQ ID NO: 61226 - DNA, 25 bp, Saccharomyces pastorianus
aatggttcaggtcttcgggcaataa

SEQ ID NO: 61227 - DNA, 25 bp, Saccharomyces pastorianus
gggcatgtctttacaaatggttcag

SEQ ID NO: 61228 - DNA, 25 bp, Saccharomyces pastorianus
gttactctatcttacatgctgtgga

SEQ ID NO: 61229 - DNA, 25 bp, Saccharomyces pastorianus
atcattggcatgaacgggtccgtgt

SEQ ID NO: 61230 - DNA, 25 bp, Saccharomyces pastorianus
gttggagatctctttcagattacca

SEQ ID NO: 61231 - DNA, 25 bp, Saccharomyces pastorianus
gaatgtgccatttgttactctatct

SEQ ID NO: 61232 - DNA, 25 bp, Saccharomyces pastorianus
gatggatcggctaacgtctagtgac

SEQ ID NO: 61233 - DNA, 25 bp, Saccharomyces pastorianus
atgctcttccatctgataagtggga

SEQ ID NO: 61234 - DNA, 25 bp, Saccharomyces pastorianus
tatttcactgttgcgtatactctca

SEQ ID NO: 61235 - DNA, 25 bp, Saccharomyces pastorianus
ttatgtatgatattccaacctgggt

SEQ ID NO: 61236 - DNA, 25 bp, Saccharomyces pastorianus
gaaacggtgccgaagttcttaatga

SEQ ID NO: 61237 - DNA, 25 bp, Saccharomyces pastorianus
aaatcttgctggtatcatgacacat

SEQ ID NO: 61238 - DNA, 25 bp, Saccharomyces pastorianus
gcaattatttccttgtttgacttcc

SEQ ID NO: 61239 - DNA, 25 bp, Saccharomyces pastorianus
tccttggctgagttcacgtttttga

SEQ ID NO: 61240 - DNA, 25 bp, Saccharomyces pastorianus
tgtttgacttcctttccgaattaat

SEQ ID NO: 61241 - DNA, 25 bp, Saccharomyces pastorianus
accaaactctttgtgatgctcttcc

SEQ ID NO: 61242 - DNA, 25 bp, Saccharomyces pastorianus
tatttgctttactagttatcgccac

SEQ ID NO: 61243 - DNA, 25 bp, Saccharomyces pastorianus
aaatccttcaaatgtccttaccaga

SEQ ID NO: 61244 - DNA, 25 bp, Saccharomyces pastorianus
cagaattacctacaacttactcaaa

SEQ ID NO: 61245 - DNA, 25 bp, Saccharomyces pastorianus
aagtctaatcactccaggttgcatt

SEQ ID NO: 61246 - DNA, 25 bp, Saccharomyces pastorianus
cttgctatttgatttcacaggctag

SEQ ID NO: 61247 - DNA, 25 bp, Saccharomyces pastorianus
cacgtgattttaaacatgcttgcta

SEQ ID NO: 61248 - DNA, 25 bp, Saccharomyces pastorianus
gaaaaggtcagcttacatgtcaact

SEQ ID NO: 61249 - DNA, 25 bp, Saccharomyces pastorianus
ttacatgtcaactacaactcccgtt

SEQ ID NO: 61250 - DNA, 25 bp, Saccharomyces pastorianus
ggaactgcaatcaaagcgcaagtct

SEQ ID NO: 61251 - DNA, 25 bp, Saccharomyces pastorianus
atgacatccttgaagctagccgcaa

SEQ ID NO: 61252 - DNA, 25 bp, Saccharomyces pastorianus
gcggactacaaattccaaggactag

SEQ ID NO: 61253 - DNA, 25 bp, Saccharomyces pastorianus
tgttggacacttctgataataggca

SEQ ID NO: 61254 - DNA, 25 bp, Saccharomyces pastorianus
tacaactcccgttgacaccaaggag

SEQ ID NO: 61255 - DNA, 25 bp, Saccharomyces pastorianus
tttgctgaaacttttactggccctg

SEQ ID NO: 61256 - DNA, 25 bp, Saccharomyces pastorianus
gaatgtgatatttttgctgccgaaa

SEQ ID NO: 61257 - DNA, 25 bp, Saccharomyces pastorianus
acgggcaatgcgtttgtttgacatt

SEQ ID NO: 61258 - DNA, 25 bp, Saccharomyces pastorianus
ttactggccctgacgtcatagaaga

SEQ ID NO: 61259 - DNA, 25 bp, Saccharomyces pastorianus
agttgtggtcacagctgtttcaata

SEQ ID NO: 61260 - DNA, 25 bp, Saccharomyces pastorianus
aaagatattccagggcgttacaagg

SEQ ID NO: 61261 - DNA, 25 bp, Saccharomyces pastorianus
gcaacgaacattctctttactacag

SEQ ID NO: 61262 - DNA, 25 bp, Saccharomyces pastorianus
gagaacatcagagactgtcccattg

SEQ ID NO: 61263 - DNA, 25 bp, Saccharomyces pastorianus
gtcccattggctggtgttctaatgc

SEQ ID NO: 61264 - DNA, 25 bp, Saccharomyces pastorianus
tttagtcgcctatcctggtagtgac

SEQ ID NO: 61265 - DNA, 25 bp, Saccharomyces pastorianus
gattcagtgctacttttcttcagaa

SEQ ID NO: 61266 - DNA, 25 bp, Saccharomyces pastorianus
gacaatccagatccagcgtaccaag

SEQ ID NO: 61267 - DNA, 25 bp, Saccharomyces pastorianus
tagcaagggagttcgacggcacact

SEQ ID NO: 61268 - DNA, 25 bp, Saccharomyces pastorianus
accgtgtctttgtgagcttgtccaa

SEQ ID NO: 61269 - DNA, 25 bp, Saccharomyces pastorianus
aaagagacgctcttgggccaatggc

SEQ ID NO: 61270 - DNA, 25 bp, Saccharomyces pastorianus
gagggccatgattcctcacaggcta

SEQ ID NO: 61271 - DNA, 25 bp, Saccharomyces pastorianus
caggcggttctgtcagttggccaga

SEQ ID NO: 61272 - DNA, 25 bp, Saccharomyces pastorianus
ctgctcgtccgtcaagatatgcttg

SEQ ID NO: 61273 - DNA, 25 bp, Saccharomyces pastorianus
aatggctcaagacgttctctccgga

SEQ ID NO: 61274 - DNA, 25 bp, Saccharomyces pastorianus
aaacgggttctacacgcaaggcgag

SEQ ID NO: 61275 - DNA, 25 bp, Saccharomyces pastorianus
atatgcttgcactcgtacacagggt

SEQ ID NO: 61276 - DNA, 25 bp, Saccharomyces pastorianus
gataagctttttagactacccgcaa

SEQ ID NO: 61277 - DNA, 25 bp, Saccharomyces pastorianus
acggcagcacagcagcagtacatca

SEQ ID NO: 61278 - DNA, 25 bp, Saccharomyces pastorianus
aatacacagggacagcacgacgcaa

SEQ ID NO: 61279 - DNA, 25 bp, Saccharomyces pastorianus
cctccagggcggtggttacgcaaat

SEQ ID NO: 61280 - DNA, 25 bp, Saccharomyces pastorianus
gactgcataccgcaattcatatata

SEQ ID NO: 61281 - DNA, 25 bp, Saccharomyces pastorianus
acaagaaggatctcgccaacgtggt

SEQ ID NO: 61282 - DNA, 25 bp, Saccharomyces pastorianus
tgcagggataccttctgggctctaa

SEQ ID NO: 61283 - DNA, 25 bp, Saccharomyces pastorianus
ttttcaattggacgtgcccgacaac

SEQ ID NO: 61284 - DNA, 25 bp, Saccharomyces pastorianus
gcatttcgacgagcattccatcaaa

SEQ ID NO: 61285 - DNA, 25 bp, Saccharomyces pastorianus
gggcgcaaagacctactcgtacaag

SEQ ID NO: 61286 - DNA, 25 bp, Saccharomyces pastorianus
gaataaccatgctgatctgcgccca

SEQ ID NO: 61287 - DNA, 25 bp, Saccharomyces pastorianus
tctgggctctaaactgggcgcaaag

SEQ ID NO: 61288 - DNA, 25 bp, Saccharomyces pastorianus
tatccgctggactcctttagataag

SEQ ID NO: 61289 - DNA, 25 bp, Saccharomyces pastorianus
atccctgtgctcgaaaccgttaaga

SEQ ID NO: 61290 - DNA, 25 bp, Saccharomyces pastorianus
gtggcatcgcatcggttgctatcga

SEQ ID NO: 61291 - DNA, 25 bp, Saccharomyces pastorianus
atgacatctccacttttgattccga

SEQ ID NO: 61292 - DNA, 25 bp, Saccharomyces pastorianus
atgcatggttcgtttccaagtcacc

SEQ ID NO: 61293 - DNA, 25 bp, Saccharomyces pastorianus
atatcccatgtatataccctgtgcg

SEQ ID NO: 61294 - DNA, 25 bp, Saccharomyces pastorianus
ggaattcacagtcacgggtcatttt

SEQ ID NO: 61295 - DNA, 25 bp, Saccharomyces pastorianus
acagactggtttcatccttaccgtg

SEQ ID NO: 61296 - DNA, 25 bp, Saccharomyces pastorianus
atagatacactttctcgttgttccc

SEQ ID NO: 61297 - DNA, 25 bp, Saccharomyces pastorianus
gaggtctatttcagggccataccgg

SEQ ID NO: 61298 - DNA, 25 bp, Saccharomyces pastorianus
ggaacctggcaatagcatccctgtg

SEQ ID NO: 61299 - DNA, 25 bp, Saccharomyces pastorianus
atgcttatgactatccagccgttag

SEQ ID NO: 61300 - DNA, 25 bp, Saccharomyces pastorianus
gagtatcaatttaacccaacctatg

SEQ ID NO: 61301 - DNA, 25 bp, Saccharomyces pastorianus
gaaacctcacgtctattattcttat

SEQ ID NO: 61302 - DNA, 25 bp, Saccharomyces pastorianus
attgattgccgatgttgccggcgtt

SEQ ID NO: 61303 - DNA, 25 bp, Saccharomyces pastorianus
tatggtttggtcgatcctactgaaa

SEQ ID NO: 61304 - DNA, 25 bp, Saccharomyces pastorianus
gccggcgttgtcgatatgtctgata

SEQ ID NO: 61305 - DNA, 25 bp, Saccharomyces pastorianus
agccgttagcgcagaatgtccacta

SEQ ID NO: 61306 - DNA, 25 bp, Saccharomyces pastorianus
gatccctcaagatccttatgggttt

SEQ ID NO: 61307 - DNA, 25 bp, Saccharomyces pastorianus
ggtgacacaatgaagatccctcctg

SEQ ID NO: 61308 - DNA, 25 bp, Saccharomyces pastorianus
gaagatgttccgttattagcagatg

SEQ ID NO: 61309 - DNA, 25 bp, Saccharomyces pastorianus
aagacatgccaccttcttacgaaga

SEQ ID NO: 61310 - DNA, 25 bp, Saccharomyces pastorianus
gtttgacgggcatttgaagaatttg

SEQ ID NO: 61311 - DNA, 25 bp, Saccharomyces pastorianus
cctctatacagatggttcgtcaaag

SEQ ID NO: 61312 - DNA, 25 bp, Saccharomyces pastorianus
gttgcatctgccgtatcgaaaagca

SEQ ID NO: 61313 - DNA, 25 bp, Saccharomyces pastorianus
atggtggtatcacatttactcaaaa

SEQ ID NO: 61314 - DNA, 25 bp, Saccharomyces pastorianus
aaatgaagtagttgcatctgccgta

SEQ ID NO: 61315 - DNA, 25 bp, Saccharomyces pastorianus
aagccagtattgtgatatcggatgc

SEQ ID NO: 61316 - DNA, 25 bp, Saccharomyces pastorianus
gagtatcttatatcgtatggttgga

SEQ ID NO: 61317 - DNA, 25 bp, Saccharomyces pastorianus
agcatggtgggaaagactgtttgac

SEQ ID NO: 61318 - DNA, 25 bp, Saccharomyces pastorianus
gaagaatttggacgtcagcaccgac

SEQ ID NO: 61319 - DNA, 25 bp, Saccharomyces pastorianus
gacgtcagcaccgactcaagtaatg

SEQ ID NO: 61320 - DNA, 25 bp, Saccharomyces pastorianus
taacgcacccggtgggaacgatggt

SEQ ID NO: 61321 - DNA, 25 bp, Saccharomyces pastorianus
gggcgttttgattagcttcacttac

SEQ ID NO: 61322 - DNA, 25 bp, Saccharomyces pastorianus
taattattcagcgtccctctgctta

SEQ ID NO: 61323 - DNA, 25 bp, Saccharomyces pastorianus
ggacctgcctttttgttatgttttg

SEQ ID NO: 61324 - DNA, 25 bp, Saccharomyces pastorianus
atatctaggcgttgggctagcttcc

SEQ ID NO: 61325 - DNA, 25 bp, Saccharomyces pastorianus
ttggtatggacttgtcattccctgc

SEQ ID NO: 61326 - DNA, 25 bp, Saccharomyces pastorianus
gatcgctgcatttatggttgcccta

SEQ ID NO: 61327 - DNA, 25 bp, Saccharomyces pastorianus
ggttgccctaaccatcaagagagta

SEQ ID NO: 61328 - DNA, 25 bp, Saccharomyces pastorianus
catgtctttccaactcaacttgagg

SEQ ID NO: 61329 - DNA, 25 bp, Saccharomyces pastorianus
cattccctgcttcatcgattatatt

SEQ ID NO: 61330 - DNA, 25 bp, Saccharomyces pastorianus
ataatgtttagtgtgctgccggtaa

SEQ ID NO: 61331 - DNA, 25 bp, Saccharomyces pastorianus
gtgatcttcggtacgatcgctgcat

SEQ ID NO: 61332 - DNA, 25 bp, Saccharomyces pastorianus
aggatgatgaaatcggacccggaaa

SEQ ID NO: 61333 - DNA, 25 bp, Saccharomyces pastorianus
attcaatctcgagcagacattctga

SEQ ID NO: 61334 - DNA, 25 bp, Saccharomyces pastorianus
aaagccgctatgtttcagccaagct

SEQ ID NO: 61335 - DNA, 25 bp, Saccharomyces pastorianus
acggcaagtcgtaactcatcaacat

SEQ ID NO: 61336 - DNA, 25 bp, Saccharomyces pastorianus
acttcgtcgatttccggatctgata

SEQ ID NO: 61337 - DNA, 25 bp, Saccharomyces pastorianus
caaccgtctaatctggccaattcaa

SEQ ID NO: 61338 - DNA, 25 bp, Saccharomyces pastorianus
gcatccaagcactaagcattatccc

SEQ ID NO: 61339 - DNA, 25 bp, Saccharomyces pastorianus
gccaagctcaaatcaaccgtctaat

SEQ ID NO: 61340 - DNA, 25 bp, Saccharomyces pastorianus
gatattggaccgtaacatccccact

SEQ ID NO: 61341 - DNA, 25 bp, Saccharomyces pastorianus
gtttttcctgacctatcgtttgcta

SEQ ID NO: 61342 - DNA, 25 bp, Saccharomyces pastorianus
gatctgcagatccatcgtcattgca

SEQ ID NO: 61343 - DNA, 25 bp, Saccharomyces pastorianus
aacaatgctgttatctttggtgagg

SEQ ID NO: 61344 - DNA, 25 bp, Saccharomyces pastorianus
gtcgaatttccctaaagctacgtat

SEQ ID NO: 61345 - DNA, 25 bp, Saccharomyces pastorianus
ggattcttagtatacctgacagcga

SEQ ID NO: 61346 - DNA, 25 bp, Saccharomyces pastorianus
gatcttggccaatacgttagcgggt

SEQ ID NO: 61347 - DNA, 25 bp, Saccharomyces pastorianus
aaacagctaccactggatgcgatag

SEQ ID NO: 61348 - DNA, 25 bp, Saccharomyces pastorianus
tgttgacgttaaaattctccctaag

SEQ ID NO: 61349 - DNA, 25 bp, Saccharomyces pastorianus
acatcatctaacgtcctagtgtcgg

SEQ ID NO: 61350 - DNA, 25 bp, Saccharomyces pastorianus
atgaaggcgaactgactgaggtatc

SEQ ID NO: 61351 - DNA, 25 bp, Saccharomyces pastorianus
atgctacccgagtctatatgtcgct

SEQ ID NO: 61352 - DNA, 25 bp, Saccharomyces pastorianus
atatgtcgcttatctgatttgggaa

SEQ ID NO: 61353 - DNA, 25 bp, Saccharomyces pastorianus
gaggtatcattttcagaccaagcgg

SEQ ID NO: 61354 - DNA, 25 bp, Saccharomyces pastorianus
catggtacctttttatcctgttacg

SEQ ID NO: 61355 - DNA, 25 bp, Saccharomyces pastorianus
ggatgcctttattcacctactaaat

SEQ ID NO: 61356 - DNA, 25 bp, Saccharomyces pastorianus
ggtgtccttaaagctatgtcgttta

SEQ ID NO: 61357 - DNA, 25 bp, Saccharomyces pastorianus
ggttatttcatccagcaaagaccgt

SEQ ID NO: 61358 - DNA, 25 bp, Saccharomyces pastorianus
catatacttcattacgccgttgttg

SEQ ID NO: 61359 - DNA, 25 bp, Saccharomyces pastorianus
ggtactggacacgaggatgccttta

SEQ ID NO: 61360 - DNA, 25 bp, Saccharomyces pastorianus
aagtcatttggctctgaactgtgca

SEQ ID NO: 61361 - DNA, 25 bp, Saccharomyces pastorianus
aagcggttggtcctggtatgttcat

SEQ ID NO: 61362 - DNA, 25 bp, Saccharomyces pastorianus
tttgagacttcaccgcatgctattt

SEQ ID NO: 61363 - DNA, 25 bp, Saccharomyces pastorianus
gatagagatttagtccaccgtcaga

SEQ ID NO: 61364 - DNA, 25 bp, Saccharomyces pastorianus
gttgttggaagacgcgctcactgat

SEQ ID NO: 61365 - DNA, 25 bp, Saccharomyces pastorianus
atgaaaccttttctggcacctatta

SEQ ID NO: 61366 - DNA, 25 bp, Saccharomyces pastorianus
aaattcgtcggacttattgccaagt

SEQ ID NO: 61367 - DNA, 25 bp, Saccharomyces pastorianus
tacctactttaaccccaatcttgag

SEQ ID NO: 61368 - DNA, 25 bp, Saccharomyces pastorianus
aatctacaacctccagttaaccaga

SEQ ID NO: 61369 - DNA, 25 bp, Saccharomyces pastorianus
aaaactcctttgatccgtcagcatg

SEQ ID NO: 61370 - DNA, 25 bp, Saccharomyces pastorianus
gggcagttactttatcgcttgacat

SEQ ID NO: 61371 - DNA, 25 bp, Saccharomyces pastorianus
tattgcagaggccatcggaccacaa

SEQ ID NO: 61372 - DNA, 25 bp, Saccharomyces pastorianus
agcatgcagctgatctgtgtgcgat

SEQ ID NO: 61373 - DNA, 25 bp, Saccharomyces pastorianus
caacgtaatgcgctgtattttgagt

SEQ ID NO: 61374 - DNA, 25 bp, Saccharomyces pastorianus
gaagttctaggttcaatcatcaacg

SEQ ID NO: 61375 - DNA, 25 bp, Saccharomyces pastorianus
tattgccaagttagcaccaacccat

SEQ ID NO: 61376 - DNA, 25 bp, Saccharomyces pastorianus
gatcattggtccatttctttctcac

SEQ ID NO: 61377 - DNA, 25 bp, Saccharomyces pastorianus
aaggtcgatgccgatcattggtcca

SEQ ID NO: 61378 - DNA, 25 bp, Saccharomyces pastorianus
ggctcctttatcactaactattcat

SEQ ID NO: 61379 - DNA, 25 bp, Saccharomyces pastorianus
gaatctttttggtgatttcttcggg

SEQ ID NO: 61380 - DNA, 25 bp, Saccharomyces pastorianus
aataagagacgtggctcgctcttct

SEQ ID NO: 61381 - DNA, 25 bp, Saccharomyces pastorianus
atgcacactgcttttcctaatcaac

SEQ ID NO: 61382 - DNA, 25 bp, Saccharomyces pastorianus
tgggctttataatcgaatcactggg

SEQ ID NO: 61383 - DNA, 25 bp, Saccharomyces pastorianus
tggccttcactttcggtggttttct

SEQ ID NO: 61384 - DNA, 25 bp, Saccharomyces pastorianus
accctgctgtttctccaatagtaga

SEQ ID NO: 61385 - DNA, 25 bp, Saccharomyces pastorianus
ttttatagaattcggcgtggccttc

SEQ ID NO: 61386 - DNA, 25 bp, Saccharomyces pastorianus
tttcctaatcaacctggctccttta

SEQ ID NO: 61387 - DNA, 25 bp, Saccharomyces pastorianus
gaagcagcttcaaacttgtcgaggt

SEQ ID NO: 61388 - DNA, 25 bp, Saccharomyces pastorianus
ttgctcccaccaggttcaaatttgg

SEQ ID NO: 61389 - DNA, 25 bp, Saccharomyces pastorianus
taccctgtatccattccgtcagtaa

SEQ ID NO: 61390 - DNA, 25 bp, Saccharomyces pastorianus
atttcaccaattatatccctctttt

SEQ ID NO: 61391 - DNA, 25 bp, Saccharomyces pastorianus
gtcatctaagcttcctgagaccata

SEQ ID NO: 61392 - DNA, 25 bp, Saccharomyces pastorianus
atacattatccccagcagaagcagc

SEQ ID NO: 61393 - DNA, 25 bp, Saccharomyces pastorianus
gacaggatcttcaaattcccgaatg

SEQ ID NO: 61394 - DNA, 25 bp, Saccharomyces pastorianus
ggaaagtaaatctccggccaattct

SEQ ID NO: 61395 - DNA, 25 bp, Saccharomyces pastorianus
ccggccaattcttacatcaacgatg

SEQ ID NO: 61396 - DNA, 25 bp, Saccharomyces pastorianus
gatacgggtacagggattccaaact

SEQ ID NO: 61397 - DNA, 25 bp, Saccharomyces pastorianus
aagtttgcccaatgaatttcaccaa

SEQ ID NO: 61398 - DNA, 25 bp, Saccharomyces pastorianus
gttgataaactgcttgttcaccgta

SEQ ID NO: 61399 - DNA, 25 bp, Saccharomyces pastorianus
ataggccacagcagatccgaacatg

SEQ ID NO: 61400 - DNA, 25 bp, Saccharomyces pastorianus
tgttgaggcataccgttcgcgtcat

SEQ ID NO: 61401 - DNA, 25 bp, Saccharomyces pastorianus
gaacccataggtgggagtctccaac

SEQ ID NO: 61402 - DNA, 25 bp, Saccharomyces pastorianus
gtcaggtcttacacggaacccatag

SEQ ID NO: 61403 - DNA, 25 bp, Saccharomyces pastorianus
gaagaagcacccatctgttgaggca

SEQ ID NO: 61404 - DNA, 25 bp, Saccharomyces pastorianus
aacgtgctgttgtggttgataaact

SEQ ID NO: 61405 - DNA, 25 bp, Saccharomyces pastorianus
gcttgttcaccgtacatttggttgg

SEQ ID NO: 61406 - DNA, 25 bp, Saccharomyces pastorianus
attctaccgaataaacctctcttct

SEQ ID NO: 61407 - DNA, 25 bp, Saccharomyces pastorianus
tttctccccagtttcaacgtgctgt

SEQ ID NO: 61408 - DNA, 25 bp, Saccharomyces pastorianus
gttcgcgtcataggccacagcagat

SEQ ID NO: 61409 - DNA, 25 bp, Saccharomyces pastorianus
gtactagacttgatggactcgaaca

SEQ ID NO: 61410 - DNA, 25 bp, Saccharomyces pastorianus
gtattggttccaacgcctactgttt

SEQ ID NO: 61411 - DNA, 25 bp, Saccharomyces pastorianus
ggaacaccatcgtgctgaagcatga

SEQ ID NO: 61412 - DNA, 25 bp, Saccharomyces pastorianus
cagattgtccgcacatttgcacgaa

SEQ ID NO: 61413 - DNA, 25 bp, Saccharomyces pastorianus
gcaacgtccgtctccaaagtactag

SEQ ID NO: 61414 - DNA, 25 bp, Saccharomyces pastorianus
atgtgccaccaccaacgtattggtt

SEQ ID NO: 61415 - DNA, 25 bp, Saccharomyces pastorianus
attcagatcccgcaagtttggctac

SEQ ID NO: 61416 - DNA, 25 bp, Saccharomyces pastorianus
gactcgaacaacgactctgtgcaga

SEQ ID NO: 61417 - DNA, 25 bp, Saccharomyces pastorianus
attactgcaagccatagtcgaccac

SEQ ID NO: 61418 - DNA, 25 bp, Saccharomyces pastorianus
cactcccagtggtttcaagcttgaa

SEQ ID NO: 61419 - DNA, 25 bp, Saccharomyces pastorianus
tccacttgcaactgacaccggaatt

SEQ ID NO: 61420 - DNA, 25 bp, Saccharomyces pastorianus
gtgctacccagcattgcaagacatc

SEQ ID NO: 61421 - DNA, 25 bp, Saccharomyces pastorianus
ggagactggatgaagccctaccaca

SEQ ID NO: 61422 - DNA, 25 bp, Saccharomyces pastorianus
gtaacaaggcatggaccgacgtctt

SEQ ID NO: 61423 - DNA, 25 bp, Saccharomyces pastorianus
gaagtcgaccgttatgaatcctgta

SEQ ID NO: 61424 - DNA, 25 bp, Saccharomyces pastorianus
gctggtgacaaggacttcatctgca

SEQ ID NO: 61425 - DNA, 25 bp, Saccharomyces pastorianus
gacatcgacgactacttgaaccaag

SEQ ID NO: 61426 - DNA, 25 bp, Saccharomyces pastorianus
gtgttccagccactatctactgtaa

SEQ ID NO: 61427 - DNA, 25 bp, Saccharomyces pastorianus
ttgtctaggtttgatcgagtcgtgc

SEQ ID NO: 61428 - DNA, 25 bp, Saccharomyces pastorianus
gaatcaagatttgcccatcctggtc

SEQ ID NO: 61429 - DNA, 25 bp, Saccharomyces pastorianus
agccgtcacggaccttttgaatcaa

SEQ ID NO: 61430 - DNA, 25 bp, Saccharomyces pastorianus
aagtcctacaagcatttcacctact

SEQ ID NO: 61431 - DNA, 25 bp, Saccharomyces pastorianus
gaactaccagctgcgtgtcaacaag

SEQ ID NO: 61432 - DNA, 25 bp, Saccharomyces pastorianus
tgcagacatcgaccaagcctaagtt

SEQ ID NO: 61433 - DNA, 25 bp, Saccharomyces pastorianus
agaacgatgctaccgagaactacca

SEQ ID NO: 61434 - DNA, 25 bp, Saccharomyces pastorianus
gttggactccaacgtgctggacgca

SEQ ID NO: 61435 - DNA, 25 bp, Saccharomyces pastorianus
acttggacctggaccatcttttgaa

SEQ ID NO: 61436 - DNA, 25 bp, Saccharomyces pastorianus
tattatgtggactgggcctgtctac

SEQ ID NO: 61437 - DNA, 25 bp, Saccharomyces pastorianus
ttccccgaggccattaagaccaaga

SEQ ID NO: 61438 - DNA, 25 bp, Saccharomyces pastorianus
ggataaggacatcttgcgccagacc

SEQ ID NO: 61439 - DNA, 25 bp, Saccharomyces pastorianus
agacggactgggacttcgtggtcaa

SEQ ID NO: 61440 - DNA, 25 bp, Saccharomyces pastorianus
aggtcatgagcctgcagacatcgac

SEQ ID NO: 61441 - DNA, 25 bp, Saccharomyces pastorianus
agagatgaacgacctgttccccaac

SEQ ID NO: 61442 - DNA, 25 bp, Saccharomyces pastorianus
aggttcactggctcatattgctaga

SEQ ID NO: 61443 - DNA, 25 bp, Saccharomyces pastorianus
gaaacactaccgcatggcaatcagc

SEQ ID NO: 61444 - DNA, 25 bp, Saccharomyces pastorianus
gacaagtatgcggacttcgttcctg

SEQ ID NO: 61445 - DNA, 25 bp, Saccharomyces pastorianus
taagcttcatccgttatcttctttc

SEQ ID NO: 61446 - DNA, 25 bp, Saccharomyces pastorianus
ggcaatcagcccatatagactttat

SEQ ID NO: 61447 - DNA, 25 bp, Saccharomyces pastorianus
gaaagctcattgatctacgtagatg

SEQ ID NO: 61448 - DNA, 25 bp, Saccharomyces pastorianus
atgacatttccctatggtgcttaaa

SEQ ID NO: 61449 - DNA, 25 bp, Saccharomyces pastorianus
aaatgagctattcggtactttcaac

SEQ ID NO: 61450 - DNA, 25 bp, Saccharomyces pastorianus
ataacgggaaaccatgccatgatct

SEQ ID NO: 61451 - DNA, 25 bp, Saccharomyces pastorianus
atcttctttccaggtcgacattcaa

SEQ ID NO: 61452 - DNA, 25 bp, Saccharomyces pastorianus
gacttcgttcctgcgatagatgcaa

SEQ ID NO: 61453 - DNA, 25 bp, Saccharomyces pastorianus
agtcctgaccagaaactgtgcaaaa

SEQ ID NO: 61454 - DNA, 25 bp, Saccharomyces pastorianus
agcttgtcgatcagaagtgggaaga

SEQ ID NO: 61455 - DNA, 25 bp, Saccharomyces pastorianus
gagttaagccttagggaaagtcctg

SEQ ID NO: 61456 - DNA, 25 bp, Saccharomyces pastorianus
ttgtcgatcagaagtgggaagagag

SEQ ID NO: 61457 - DNA, 25 bp, Saccharomyces pastorianus
gcaaaagtagactggactatttatc

SEQ ID NO: 61458 - DNA, 25 bp, Saccharomyces pastorianus
gaaagtcctgaccagaaactgtgca

SEQ ID NO: 61459 - DNA, 25 bp, Saccharomyces pastorianus
aactgtgcaaaagtagactggacta

SEQ ID NO: 61460 - DNA, 25 bp, Saccharomyces pastorianus
gccttagggaaagtcctgaccagaa

SEQ ID NO: 61461 - DNA, 25 bp, Saccharomyces pastorianus
cttgtcgatcagaagtgggaagaga

SEQ ID NO: 61462 - DNA, 25 bp, Saccharomyces pastorianus
taagccttagggaaagtcctgacca

SEQ ID NO: 61463 - DNA, 25 bp, Saccharomyces pastorianus
tcgatcagaagtgggaagagagtta

SEQ ID NO: 61464 - DNA, 25 bp, Saccharomyces pastorianus
gtaccgatgccgatggtgttttcgt

SEQ ID NO: 61465 - DNA, 25 bp, Saccharomyces pastorianus
tcgacgaaattgattctgtggcccc

SEQ ID NO: 61466 - DNA, 25 bp, Saccharomyces pastorianus
cacaggtgcggatttttatgctctc

SEQ ID NO: 61467 - DNA, 25 bp, Saccharomyces pastorianus
ggtgcgaacatttcgacacgtcgtt

SEQ ID NO: 61468 - DNA, 25 bp, Saccharomyces pastorianus
aatcaaggtgactcaggtggcgtta

SEQ ID NO: 61469 - DNA, 25 bp, Saccharomyces pastorianus
gacactgacgtgaacctcattgagt

SEQ ID NO: 61470 - DNA, 25 bp, Saccharomyces pastorianus
tcgctccgagtgtgtcccaggaaga

SEQ ID NO: 61471 - DNA, 25 bp, Saccharomyces pastorianus
cattgagttggcgacactgtgtcca

SEQ ID NO: 61472 - DNA, 25 bp, Saccharomyces pastorianus
gctctctgttctgatgcaatgctaa

SEQ ID NO: 61473 - DNA, 25 bp, Saccharomyces pastorianus
gtataccagacaccgatgcaaagca

SEQ ID NO: 61474 - DNA, 25 bp, Saccharomyces pastorianus
gtttctcaattactagccgagctag

SEQ ID NO: 61475 - DNA, 25 bp, Saccharomyces pastorianus
aaccacttggacgaaaagctcctga

SEQ ID NO: 61476 - DNA, 25 bp, Saccharomyces pastorianus
aggccatggtacagaaccatccgga

SEQ ID NO: 61477 - DNA, 25 bp, Saccharomyces pastorianus
gaaaacacagaaaggccatggtaca

SEQ ID NO: 61478 - DNA, 25 bp, Saccharomyces pastorianus
acaaaggcggaagtccctacatggc

SEQ ID NO: 61479 - DNA, 25 bp, Saccharomyces pastorianus
tgacagaacctgaagctttgctcat

SEQ ID NO: 61480 - DNA, 25 bp, Saccharomyces pastorianus
gaacctgaagctttgctcatcttgg

SEQ ID NO: 61481 - DNA, 25 bp, Saccharomyces pastorianus
ttggacgaaaagctcctgaaaagaa

SEQ ID NO: 61482 - DNA, 25 bp, Saccharomyces pastorianus
acctgaagctttgctcatcttggat

SEQ ID NO: 61483 - DNA, 25 bp, Saccharomyces pastorianus
gagattaaccacttggacgaaaagc

SEQ ID NO: 61484 - DNA, 25 bp, Saccharomyces pastorianus
ggcagccaagataaacgaggccaaa

SEQ ID NO: 61485 - DNA, 25 bp, Saccharomyces pastorianus
gtacagaaccatccggacaaaggcg

SEQ ID NO: 61486 - DNA, 25 bp, Saccharomyces pastorianus
tattcatctctgttttggcgttcac

SEQ ID NO: 61487 - DNA, 25 bp, Saccharomyces pastorianus
gacagctatggagcagatacacagt

SEQ ID NO: 61488 - DNA, 25 bp, Saccharomyces pastorianus
taggttcttcaatcgctaattggca

SEQ ID NO: 61489 - DNA, 25 bp, Saccharomyces pastorianus
gcgctgttagccattgcaatattca

SEQ ID NO: 61490 - DNA, 25 bp, Saccharomyces pastorianus
tacacaactttctacgcgttcttgg

SEQ ID NO: 61491 - DNA, 25 bp, Saccharomyces pastorianus
tatgaactcgggacttggtttcgtt

SEQ ID NO: 61492 - DNA, 25 bp, Saccharomyces pastorianus
gagtggttacttcctatcgagacat

SEQ ID NO: 61493 - DNA, 25 bp, Saccharomyces pastorianus
tcttggtcctaatctactcgtgtta

SEQ ID NO: 61494 - DNA, 25 bp, Saccharomyces pastorianus
ggtttcgttctggtagctttaatca

SEQ ID NO: 61495 - DNA, 25 bp, Saccharomyces pastorianus
tggcgttcactgctttcagcattta

SEQ ID NO: 61496 - DNA, 25 bp, Saccharomyces pastorianus
gaagctttttattcagttccttatg

SEQ ID NO: 61497 - DNA, 25 bp, Saccharomyces pastorianus
gggcaacactatcactgtgcagacc

SEQ ID NO: 61498 - DNA, 25 bp, Saccharomyces pastorianus
gaagaccgtttctcataacgaggct

SEQ ID NO: 61499 - DNA, 25 bp, Saccharomyces pastorianus
tgtgcagaccacattcgtccagcgt

SEQ ID NO: 61500 - DNA, 25 bp, Saccharomyces pastorianus
gaggctcagcacctaaatatgaaat

SEQ ID NO: 61501 - DNA, 25 bp, Saccharomyces pastorianus
aatctgcaatgaagaagaccgtttc

SEQ ID NO: 61502 - DNA, 25 bp, Saccharomyces pastorianus
ctcgttgtcgggtactgtaggtgtc

SEQ ID NO: 61503 - DNA, 25 bp, Saccharomyces pastorianus
actgttgtcagacagggcaacacta

SEQ ID NO: 61504 - DNA, 25 bp, Saccharomyces pastorianus
tgaaatcgtttacttcaactttggg

SEQ ID NO: 61505 - DNA, 25 bp, Saccharomyces pastorianus
ctgtaggtgtcatcaaatctgcaat

SEQ ID NO: 61506 - DNA, 25 bp, Saccharomyces pastorianus
gtttctcataacgaggctcagcacc

SEQ ID NO: 61507 - DNA, 25 bp, Saccharomyces pastorianus
ccctccgcagggtccatcgggttgg

SEQ ID NO: 61508 - DNA, 25 bp, Saccharomyces pastorianus
gcagaccgtcgacagagcaaccatg

SEQ ID NO: 61509 - DNA, 25 bp, Saccharomyces pastorianus
gagcaaccatgctggcaacttcgac

SEQ ID NO: 61510 - DNA, 25 bp, Saccharomyces pastorianus
gggtcaccgttgttctgacgcagac

SEQ ID NO: 61511 - DNA, 25 bp, Saccharomyces pastorianus
tatcactgtctctcgtttcgttgct

SEQ ID NO: 61512 - DNA, 25 bp, Saccharomyces pastorianus
tcagaccactatatgggaccctgcc

SEQ ID NO: 61513 - DNA, 25 bp, Saccharomyces pastorianus
gctaccactgcgacggcaaagacgg

SEQ ID NO: 61514 - DNA, 25 bp, Saccharomyces pastorianus
atgttgcgtcgcacgctatcactgt

SEQ ID NO: 61515 - DNA, 25 bp, Saccharomyces pastorianus
ttcaccacggtgtttacaactacca

SEQ ID NO: 61516 - DNA, 25 bp, Saccharomyces pastorianus
catgaccacccaggttaccgtggaa

SEQ ID NO: 61517 - DNA, 25 bp, Saccharomyces pastorianus
gggtttttggtcactcagaccacta

SEQ ID NO: 61518 - DNA, 25 bp, Saccharomyces pastorianus
gctgtggccggctgctattctggca

SEQ ID NO: 61519 - DNA, 25 bp, Saccharomyces pastorianus
ttggtagcgaaacagcggctcgttt

SEQ ID NO: 61520 - DNA, 25 bp, Saccharomyces pastorianus
gatctgattgttcttcaacgtctga

SEQ ID NO: 61521 - DNA, 25 bp, Saccharomyces pastorianus
gatcctggttctttagtggacgttt

SEQ ID NO: 61522 - DNA, 25 bp, Saccharomyces pastorianus
actacactgataagaacgccccaaa

SEQ ID NO: 61523 - DNA, 25 bp, Saccharomyces pastorianus
aaatgtaaacattggtgcctctggg

SEQ ID NO: 61524 - DNA, 25 bp, Saccharomyces pastorianus
cattttgcatgtagccattggtagc

SEQ ID NO: 61525 - DNA, 25 bp, Saccharomyces pastorianus
aagcccaagtcatcgaacactcaat

SEQ ID NO: 61526 - DNA, 25 bp, Saccharomyces pastorianus
aaatatattcgcacccacaagtttg

SEQ ID NO: 61527 - DNA, 25 bp, Saccharomyces pastorianus
aatttccacaagtcacatttagcag

SEQ ID NO: 61528 - DNA, 25 bp, Saccharomyces pastorianus
ttaacttttactacccgtcaagatg

SEQ ID NO: 61529 - DNA, 25 bp, Saccharomyces pastorianus
gactcattcgcttaacatgtgctct

SEQ ID NO: 61530 - DNA, 25 bp, Saccharomyces pastorianus
ggaggatgctgatacttctgccggt

SEQ ID NO: 61531 - DNA, 25 bp, Saccharomyces pastorianus
ttctgccggtggtagtccattacaa

SEQ ID NO: 61532 - DNA, 25 bp, Saccharomyces pastorianus
aagtacttccaatgaaaacggtcag

SEQ ID NO: 61533 - DNA, 25 bp, Saccharomyces pastorianus
aaagcaatgtgatggcaaggacgca

SEQ ID NO: 61534 - DNA, 25 bp, Saccharomyces pastorianus
attgttgtacgactttgactgacca

SEQ ID NO: 61535 - DNA, 25 bp, Saccharomyces pastorianus
aaggacgcaaactcattcgctgttc

SEQ ID NO: 61536 - DNA, 25 bp, Saccharomyces pastorianus
actgaccaaggtttcatttatccaa

SEQ ID NO: 61537 - DNA, 25 bp, Saccharomyces pastorianus
aaacggtcagtccttgtttgtcaag

SEQ ID NO: 61538 - DNA, 25 bp, Saccharomyces pastorianus
gaaacgaccgtcagaaattgttgta

SEQ ID NO: 61539 - DNA, 25 bp, Saccharomyces pastorianus
attcgctgttccgattccgttgatt

SEQ ID NO: 61540 - DNA, 25 bp, Saccharomyces pastorianus
gattccgttgatttctcaatctcta

SEQ ID NO: 61541 - DNA, 25 bp, Saccharomyces pastorianus
caaaacgttgttgcgcagcggcatg

SEQ ID NO: 61542 - DNA, 25 bp, Saccharomyces pastorianus
tgaagatctttcacgacgaccacgt

SEQ ID NO: 61543 - DNA, 25 bp, Saccharomyces pastorianus
cacgtcaccgtggaacagctgatga

SEQ ID NO: 61544 - DNA, 25 bp, Saccharomyces pastorianus
acaagaaccctgttgcctcgtgtaa

SEQ ID NO: 61545 - DNA, 25 bp, Saccharomyces pastorianus
aatttgtgtcgcactttccctagag

SEQ ID NO: 61546 - DNA, 25 bp, Saccharomyces pastorianus
gcggcatgctgtactctagatgcat

SEQ ID NO: 61547 - DNA, 25 bp, Saccharomyces pastorianus
aggcacttgatagcagaccatttga

SEQ ID NO: 61548 - DNA, 25 bp, Saccharomyces pastorianus
agaaatgtaatacgcggtcctcgca

SEQ ID NO: 61549 - DNA, 25 bp, Saccharomyces pastorianus
ggtcctcgcacacaatgtcaaagca

SEQ ID NO: 61550 - DNA, 25 bp, Saccharomyces pastorianus
catgatttcttgtccgcactgtaaa

SEQ ID NO: 61551 - DNA, 25 bp, Saccharomyces pastorianus
gtacaccagcgtcatcagatataat

SEQ ID NO: 61552 - DNA, 25 bp, Saccharomyces pastorianus
gtaaaaatgcctactacaccacgct

SEQ ID NO: 61553 - DNA, 25 bp, Saccharomyces pastorianus
atgcctttctggacatgagtgcaaa

SEQ ID NO: 61554 - DNA, 25 bp, Saccharomyces pastorianus
tcatcctccaatgcttctacaataa

SEQ ID NO: 61555 - DNA, 25 bp, Saccharomyces pastorianus
ggttttctcacattaagccttcagc

SEQ ID NO: 61556 - DNA, 25 bp, Saccharomyces pastorianus
ttacgcgtcgcaacttaatatgaac

SEQ ID NO: 61557 - DNA, 25 bp, Saccharomyces pastorianus
tcttcaacagaccacttcgagtatg

SEQ ID NO: 61558 - DNA, 25 bp, Saccharomyces pastorianus
ttctcgggtgattctctcatggatt

SEQ ID NO: 61559 - DNA, 25 bp, Saccharomyces pastorianus
tatgtcaactgggatttcctcggcg

SEQ ID NO: 61560 - DNA, 25 bp, Saccharomyces pastorianus
acaatagcggtaatgcccaggcggc

SEQ ID NO: 61561 - DNA, 25 bp, Saccharomyces pastorianus
aatcttttcagtccttctccaagag

SEQ ID NO: 61562 - DNA, 25 bp, Saccharomyces pastorianus
aatctcttatcgcatttctcgggtg

SEQ ID NO: 61563 - DNA, 25 bp, Saccharomyces pastorianus
tatctccgagaagaattcttgccca

SEQ ID NO: 61564 - DNA, 25 bp, Saccharomyces pastorianus
aggctacgccgaaccaatcaaacta

SEQ ID NO: 61565 - DNA, 25 bp, Saccharomyces pastorianus
ttgcccatccattcttcgatgaatt

SEQ ID NO: 61566 - DNA, 25 bp, Saccharomyces pastorianus
ggatgacgctttcttgccaagaggc

SEQ ID NO: 61567 - DNA, 25 bp, Saccharomyces pastorianus
ggaaggatgacgctttcttgccaag

SEQ ID NO: 61568 - DNA, 25 bp, Saccharomyces pastorianus
tactagtttacgaaccacagcaaag

SEQ ID NO: 61569 - DNA, 25 bp, Saccharomyces pastorianus
gaaccacagcaaagattatctccga

SEQ ID NO: 61570 - DNA, 25 bp, Saccharomyces pastorianus
gccgaaccaatcaaactaccaaact

SEQ ID NO: 61571 - DNA, 25 bp, Saccharomyces pastorianus
attacaaatcttgggtgaattcgct

SEQ ID NO: 61572 - DNA, 25 bp, Saccharomyces pastorianus
gagaagaattcttgcccatccattc

SEQ ID NO: 61573 - DNA, 25 bp, Saccharomyces pastorianus
tttcttgccaagaggctacgccgaa

SEQ ID NO: 61574 - DNA, 25 bp, Saccharomyces pastorianus
aaccctgcttatgacggtcctttat

SEQ ID NO: 61575 - DNA, 25 bp, Saccharomyces pastorianus
gagaattgctgaccatccgaatatc

SEQ ID NO: 61576 - DNA, 25 bp, Saccharomyces pastorianus
taaaccctccaatgttctagtagac

SEQ ID NO: 61577 - DNA, 25 bp, Saccharomyces pastorianus
tatctttcaaggtcaggaacccctc

SEQ ID NO: 61578 - DNA, 25 bp, Saccharomyces pastorianus
aatatgtgattttggctctgctaaa

SEQ ID NO: 61579 - DNA, 25 bp, Saccharomyces pastorianus
attgctaaattactgggtcctcctg

SEQ ID NO: 61580 - DNA, 25 bp, Saccharomyces pastorianus
tgatcattggctgtacccagtacac

SEQ ID NO: 61581 - DNA, 25 bp, Saccharomyces pastorianus
cagtacaccacccaaatcgatattt

SEQ ID NO: 61582 - DNA, 25 bp, Saccharomyces pastorianus
tttacacggtcttggtgtgtgccat

SEQ ID NO: 61583 - DNA, 25 bp, Saccharomyces pastorianus
cacacgcgggatgctgtatttacac

SEQ ID NO: 61584 - DNA, 25 bp, Saccharomyces pastorianus
gtgtgccatcgtgatattaaaccct

SEQ ID NO: 61585 - DNA, 25 bp, Saccharomyces pastorianus
gttgcttattttgccggtaaggcca

SEQ ID NO: 61586 - DNA, 25 bp, Saccharomyces pastorianus
ggttcttcaacgtcatactgtggga

SEQ ID NO: 61587 - DNA, 25 bp, Saccharomyces pastorianus
ggcaagtgactcattacgacgtaat

SEQ ID NO: 61588 - DNA, 25 bp, Saccharomyces pastorianus
gaaacggtacagctccaatgatttt

SEQ ID NO: 61589 - DNA, 25 bp, Saccharomyces pastorianus
gaacgcggtgatactgacgtacgac

SEQ ID NO: 61590 - DNA, 25 bp, Saccharomyces pastorianus
ggcaagattctttctggtgggcaat

SEQ ID NO: 61591 - DNA, 25 bp, Saccharomyces pastorianus
aacgaatgccaagtctttccagaat

SEQ ID NO: 61592 - DNA, 25 bp, Saccharomyces pastorianus
gctatcattccatcgctatacaaga

SEQ ID NO: 61593 - DNA, 25 bp, Saccharomyces pastorianus
tttacttcccacgatttgtccaggg

SEQ ID NO: 61594 - DNA, 25 bp, Saccharomyces pastorianus
taaggccagcgagttcgggagcttt

SEQ ID NO: 61595 - DNA, 25 bp, Saccharomyces pastorianus
ctggcggacccacatgagattataa

SEQ ID NO: 61596 - DNA, 25 bp, Saccharomyces pastorianus
cttccggttccatcaacagaagagt

SEQ ID NO: 61597 - DNA, 25 bp, Saccharomyces pastorianus
tccggttccatcaacagaagagttt

SEQ ID NO: 61598 - DNA, 25 bp, Saccharomyces pastorianus
ccatcaacagaagagttttgcaagc

SEQ ID NO: 61599 - DNA, 25 bp, Saccharomyces pastorianus
ggttccatcaacagaagagttttgc

SEQ ID NO: 61600 - DNA, 25 bp, Saccharomyces pastorianus
tccatcaacagaagagttttgcaag

SEQ ID NO: 61601 - DNA, 25 bp, Saccharomyces pastorianus
ttccggttccatcaacagaagagtt

SEQ ID NO: 61602 - DNA, 25 bp, Saccharomyces pastorianus
cggttccatcaacagaagagttttg

SEQ ID NO: 61603 - DNA, 25 bp, Saccharomyces pastorianus
ccggttccatcaacagaagagtttt

SEQ ID NO: 61604 - DNA, 25 bp, Saccharomyces pastorianus
ttccatcaacagaagagttttgcaa

SEQ ID NO: 61605 - DNA, 25 bp, Saccharomyces pastorianus
gcttccggttccatcaacagaagag

SEQ ID NO: 61606 - DNA, 25 bp, Saccharomyces pastorianus
gttccatcaacagaagagttttgca

SEQ ID NO: 61607 - DNA, 25 bp, Saccharomyces pastorianus
gctccaaagtccgataatgtttatc

SEQ ID NO: 61608 - DNA, 25 bp, Saccharomyces pastorianus
gaccgctccaaagtccgataatgtt

SEQ ID NO: 61609 - DNA, 25 bp, Saccharomyces pastorianus
aggaccgctccaaagtccgataatg

SEQ ID NO: 61610 - DNA, 25 bp, Saccharomyces pastorianus
aagtccgataatgtttatctaaagt

SEQ ID NO: 61611 - DNA, 25 bp, Saccharomyces pastorianus
gggtatcgatcacacttccaagcaa

SEQ ID NO: 61612 - DNA, 25 bp, Saccharomyces pastorianus
taggaccgctccaaagtccgataat

SEQ ID NO: 61613 - DNA, 25 bp, Saccharomyces pastorianus
aagcaacacaaaagatccggccata

SEQ ID NO: 61614 - DNA, 25 bp, Saccharomyces pastorianus
tccggccataggaccgctccaaagt

SEQ ID NO: 61615 - DNA, 25 bp, Saccharomyces pastorianus
ccgctccaaagtccgataatgttta

SEQ ID NO: 61616 - DNA, 25 bp, Saccharomyces pastorianus
gccataggaccgctccaaagtccga

SEQ ID NO: 61617 - DNA, 25 bp, Saccharomyces pastorianus
accgctccaaagtccgataatgttt

SEQ ID NO: 61618 - DNA, 25 bp, Saccharomyces pastorianus
gaatccaatccaccggtagaaagtt

SEQ ID NO: 61619 - DNA, 25 bp, Saccharomyces pastorianus
tccaccggtagaaagttcgaaagag

SEQ ID NO: 61620 - DNA, 25 bp, Saccharomyces pastorianus
gtaaggccccaagaatccaatccac

SEQ ID NO: 61621 - DNA, 25 bp, Saccharomyces pastorianus
ccccaagaatccaatccaccggtag

SEQ ID NO: 61622 - DNA, 25 bp, Saccharomyces pastorianus
gtccacacaagggtaaggccccaag

SEQ ID NO: 61623 - DNA, 25 bp, Saccharomyces pastorianus
aggccccaagaatccaatccaccgg

SEQ ID NO: 61624 - DNA, 25 bp, Saccharomyces pastorianus
gccccaagaatccaatccaccggta

SEQ ID NO: 61625 - DNA, 25 bp, Saccharomyces pastorianus
taaggccccaagaatccaatccacc

SEQ ID NO: 61626 - DNA, 25 bp, Saccharomyces pastorianus
ggccccaagaatccaatccaccggt

SEQ ID NO: 61627 - DNA, 25 bp, Saccharomyces pastorianus
aaggccccaagaatccaatccaccg

SEQ ID NO: 61628 - DNA, 25 bp, Saccharomyces pastorianus
aagaatccaatccaccggtagaaag

SEQ ID NO: 61629 - DNA, 25 bp, Saccharomyces pastorianus
gaagacagtgaaccccagtccaaat

SEQ ID NO: 61630 - DNA, 25 bp, Saccharomyces pastorianus
atgccttgatgggactttctgacaa

SEQ ID NO: 61631 - DNA, 25 bp, Saccharomyces pastorianus
acaatcccaccatagatgccttgat

SEQ ID NO: 61632 - DNA, 25 bp, Saccharomyces pastorianus
ggcgattctcgaaaacgaacgctac

SEQ ID NO: 61633 - DNA, 25 bp, Saccharomyces pastorianus
taacaacatcagtagagggtccttt

SEQ ID NO: 61634 - DNA, 25 bp, Saccharomyces pastorianus
tcccgcttccgaggtagcagtaaag

SEQ ID NO: 61635 - DNA, 25 bp, Saccharomyces pastorianus
tctacaaacttgatgagcctcttaa

SEQ ID NO: 61636 - DNA, 25 bp, Saccharomyces pastorianus
agattccgccacctttaaagatcgt

SEQ ID NO: 61637 - DNA, 25 bp, Saccharomyces pastorianus
ggcagattttcgcttgccattcaag

SEQ ID NO: 61638 - DNA, 25 bp, Saccharomyces pastorianus
aatgctgggagctagattccgccac

SEQ ID NO: 61639 - DNA, 25 bp, Saccharomyces pastorianus
gccattcaagatcccggtgatccaa

SEQ ID NO: 61640 - DNA, 25 bp, Saccharomyces pastorianus
ttacacgacaatactatcttccctg

SEQ ID NO: 61641 - DNA, 25 bp, Saccharomyces pastorianus
ttgtcagatgagatcccgtccacat

SEQ ID NO: 61642 - DNA, 25 bp, Saccharomyces pastorianus
actatcttccctgacacattcaaaa

SEQ ID NO: 61643 - DNA, 25 bp, Saccharomyces pastorianus
atatacgcggtatcctactaatttg

SEQ ID NO: 61644 - DNA, 25 bp, Saccharomyces pastorianus
gattgtaacgcgcttgtcagatgag

SEQ ID NO: 61645 - DNA, 25 bp, Saccharomyces pastorianus
ccgtccacatacttctttcaagatg

SEQ ID NO: 61646 - DNA, 25 bp, Saccharomyces pastorianus
gagtggattgtatcattcaacccag

SEQ ID NO: 61647 - DNA, 25 bp, Saccharomyces pastorianus
gatacaccaagagacacaacacatt

SEQ ID NO: 61648 - DNA, 25 bp, Saccharomyces pastorianus
ggaccatatgtatccagtttacacg

SEQ ID NO: 61649 - DNA, 25 bp, Saccharomyces pastorianus
cccagccccattcataatttcaaaa

SEQ ID NO: 61650 - DNA, 25 bp, Saccharomyces pastorianus
agacgttcaagtgagtttcaatgac

SEQ ID NO: 61651 - DNA, 25 bp, Saccharomyces pastorianus
gaagccattcaaactcgtacgtgtt

SEQ ID NO: 61652 - DNA, 25 bp, Saccharomyces pastorianus
gaggccgatgttcatgctaatccgt

SEQ ID NO: 61653 - DNA, 25 bp, Saccharomyces pastorianus
gaagttcttcccaatattcagttga

SEQ ID NO: 61654 - DNA, 25 bp, Saccharomyces pastorianus
ttactagataccctaagttccgcca

SEQ ID NO: 61655 - DNA, 25 bp, Saccharomyces pastorianus
ggaacagccctcattgtcacataaa

SEQ ID NO: 61656 - DNA, 25 bp, Saccharomyces pastorianus
aaagttgcctctactgaccatattc

SEQ ID NO: 61657 - DNA, 25 bp, Saccharomyces pastorianus
caagcttcccctccgatgtaagaaa

SEQ ID NO: 61658 - DNA, 25 bp, Saccharomyces pastorianus
tgttgtctcgaaactgaagccattc

SEQ ID NO: 61659 - DNA, 25 bp, Saccharomyces pastorianus
aatttgcatttgctggttcccaaag

SEQ ID NO: 61660 - DNA, 25 bp, Saccharomyces pastorianus
gcctgtgataccgtgggatgcatcc

SEQ ID NO: 61661 - DNA, 25 bp, Saccharomyces pastorianus
ggccgaagatgactaccggttctaa

SEQ ID NO: 61662 - DNA, 25 bp, Saccharomyces pastorianus
tagttctgagatatgcgatttgcaa

SEQ ID NO: 61663 - DNA, 25 bp, Saccharomyces pastorianus
ttagggctggacagacctggtgtat

SEQ ID NO: 61664 - DNA, 25 bp, Saccharomyces pastorianus
ggaggcccatttttgaagaggaaca

SEQ ID NO: 61665 - DNA, 25 bp, Saccharomyces pastorianus
gacctggtgtatacatttactcgac

SEQ ID NO: 61666 - DNA, 25 bp, Saccharomyces pastorianus
gttttcaattcagaccaagactacg

SEQ ID NO: 61667 - DNA, 25 bp, Saccharomyces pastorianus
tgccttgagggttcaaaacgcatta

SEQ ID NO: 61668 - DNA, 25 bp, Saccharomyces pastorianus
gtagtgctcgcgacaagattttata

SEQ ID NO: 61669 - DNA, 25 bp, Saccharomyces pastorianus
aaatgaggacaccaaacggcgaaag

SEQ ID NO: 61670 - DNA, 25 bp, Saccharomyces pastorianus
tatctcgctatgacccagaggatca

SEQ ID NO: 61671 - DNA, 25 bp, Saccharomyces pastorianus
atccgaaggtaggagtatcgaccaa

SEQ ID NO: 61672 - DNA, 25 bp, Saccharomyces pastorianus
gatttgcaaaccatatctcgctatg

SEQ ID NO: 61673 - DNA, 25 bp, Saccharomyces pastorianus
gtgccaatgtcaacacagatgccaa

SEQ ID NO: 61674 - DNA, 25 bp, Saccharomyces pastorianus
gtatggattcaaaaagagcctagct

SEQ ID NO: 61675 - DNA, 25 bp, Saccharomyces pastorianus
tcttggaagcgcaacatcagaagca

SEQ ID NO: 61676 - DNA, 25 bp, Saccharomyces pastorianus
gatgtcgaaaattcgttgcggcaca

SEQ ID NO: 61677 - DNA, 25 bp, Saccharomyces pastorianus
acatatggtgagcttcttggaagcg

SEQ ID NO: 61678 - DNA, 25 bp, Saccharomyces pastorianus
aagacactattgaaccctaacgaga

SEQ ID NO: 61679 - DNA, 25 bp, Saccharomyces pastorianus
gaaccctaacgagatatttgagaag

SEQ ID NO: 61680 - DNA, 25 bp, Saccharomyces pastorianus
gaagcagaattgaccagtgccaatg

SEQ ID NO: 61681 - DNA, 25 bp, Saccharomyces pastorianus
atgccaaaggtacccacatcacaag

SEQ ID NO: 61682 - DNA, 25 bp, Saccharomyces pastorianus
tgatacagacattccccaagacact

SEQ ID NO: 61683 - DNA, 25 bp, Saccharomyces pastorianus
ttgcggcacaacgtctcaagtttaa

SEQ ID NO: 61684 - DNA, 25 bp, Saccharomyces pastorianus
gaatcgcattttttgttcaagacct

SEQ ID NO: 61685 - DNA, 25 bp, Saccharomyces pastorianus
tttccaagacaaagcctcgtagcaa

SEQ ID NO: 61686 - DNA, 25 bp, Saccharomyces pastorianus
gaatttttgtacaggctaccgccaa

SEQ ID NO: 61687 - DNA, 25 bp, Saccharomyces pastorianus
agctgctttgttggaattgtgccga

SEQ ID NO: 61688 - DNA, 25 bp, Saccharomyces pastorianus
attgtgccgatagagacgacgctaa

SEQ ID NO: 61689 - DNA, 25 bp, Saccharomyces pastorianus
gtagcaattcgcttaaccattcttg

SEQ ID NO: 61690 - DNA, 25 bp, Saccharomyces pastorianus
taaaccttccattgatcatcaccag

SEQ ID NO: 61691 - DNA, 25 bp, Saccharomyces pastorianus
aaccattcttggacttctaacacga

SEQ ID NO: 61692 - DNA, 25 bp, Saccharomyces pastorianus
tcaagacctcgctggcagtgttaaa

SEQ ID NO: 61693 - DNA, 25 bp, Saccharomyces pastorianus
taccgccaattactctgtgtacagc

SEQ ID NO: 61694 - DNA, 25 bp, Saccharomyces pastorianus
gagtgagcacgaactttccaagaca

SEQ ID NO: 61695 - DNA, 25 bp, Saccharomyces pastorianus
gaaagcctggccaaagctgaccgaa

SEQ ID NO: 61696 - DNA, 25 bp, Saccharomyces pastorianus
aaggcaactgttgttttcaagagaa

SEQ ID NO: 61697 - DNA, 25 bp, Saccharomyces pastorianus
gaatggacgttattttgacggccaa

SEQ ID NO: 61698 - DNA, 25 bp, Saccharomyces pastorianus
gagagagcccaattcgatgacagag

SEQ ID NO: 61699 - DNA, 25 bp, Saccharomyces pastorianus
gacaacctttctgtatctaccgata

SEQ ID NO: 61700 - DNA, 25 bp, Saccharomyces pastorianus
atgcttcagaaatcaatcgcgagag

SEQ ID NO: 61701 - DNA, 25 bp, Saccharomyces pastorianus
gccgggcgaatcagaacgaccagta

SEQ ID NO: 61702 - DNA, 25 bp, Saccharomyces pastorianus
ttggccaagtggacaacctttctgt

SEQ ID NO: 61703 - DNA, 25 bp, Saccharomyces pastorianus
ggtacttgccaatgtgttcgatatt

SEQ ID NO: 61704 - DNA, 25 bp, Saccharomyces pastorianus
aatagtaccaaagcgccgggcgaat

SEQ ID NO: 61705 - DNA, 25 bp, Saccharomyces pastorianus
agatgccctagaatgttgtaaaacc

SEQ ID NO: 61706 - DNA, 25 bp, Saccharomyces pastorianus
tcagatcatgaatccgtgcctgtca

SEQ ID NO: 61707 - DNA, 25 bp, Saccharomyces pastorianus
attcacagcacgatactacacaccg

SEQ ID NO: 61708 - DNA, 25 bp, Saccharomyces pastorianus
ggaaaatttcattacagtctaccaa

SEQ ID NO: 61709 - DNA, 25 bp, Saccharomyces pastorianus
agaggcttcgagagcatccgcaaag

SEQ ID NO: 61710 - DNA, 25 bp, Saccharomyces pastorianus
acctggaacgtattcaatggtttca

SEQ ID NO: 61711 - DNA, 25 bp, Saccharomyces pastorianus
tttaccaatgcgaatgccaaaccgt

SEQ ID NO: 61712 - DNA, 25 bp, Saccharomyces pastorianus
atccgcaaaggctattgaggccatt

SEQ ID NO: 61713 - DNA, 25 bp, Saccharomyces pastorianus
aaattggcttggtcactgggcctat

SEQ ID NO: 61714 - DNA, 25 bp, Saccharomyces pastorianus
tccgtgcctgtcatatctagatcta

SEQ ID NO: 61715 - DNA, 25 bp, Saccharomyces pastorianus
aagggcacaccttaatccagaatgg

SEQ ID NO: 61716 - DNA, 25 bp, Saccharomyces pastorianus
gtctaccaatttctatagaggcttc

SEQ ID NO: 61717 - DNA, 25 bp, Saccharomyces pastorianus
ttctccagttgcgaattcggtatgt

SEQ ID NO: 61718 - DNA, 25 bp, Saccharomyces pastorianus
tgcagttggttttcaagaagttcac

SEQ ID NO: 61719 - DNA, 25 bp, Saccharomyces pastorianus
gttggttttcaagaagttcacaatt

SEQ ID NO: 61720 - DNA, 25 bp, Saccharomyces pastorianus
ggcatcgtggccttctggagactcg

SEQ ID NO: 61721 - DNA, 25 bp, Saccharomyces pastorianus
gtttatcagcttgaattccaacaaa

SEQ ID NO: 61722 - DNA, 25 bp, Saccharomyces pastorianus
gcgaattcggtatgtattcagccaa

SEQ ID NO: 61723 - DNA, 25 bp, Saccharomyces pastorianus
gattttctccagttgcgaattcggt

SEQ ID NO: 61724 - DNA, 25 bp, Saccharomyces pastorianus
gttcacaattagtttgtttatcagc

SEQ ID NO: 61725 - DNA, 25 bp, Saccharomyces pastorianus
gtggccttctggagactcgattttc

SEQ ID NO: 61726 - DNA, 25 bp, Saccharomyces pastorianus
gagactcgattttctccagttgcga

SEQ ID NO: 61727 - DNA, 25 bp, Saccharomyces pastorianus
gactcgattttctccagttgcgaat

SEQ ID NO: 61728 - DNA, 25 bp, Saccharomyces pastorianus
aaagggtgtccttgctgatttagaa

SEQ ID NO: 61729 - DNA, 25 bp, Saccharomyces pastorianus
atgagagctcttacggtagttacct

SEQ ID NO: 61730 - DNA, 25 bp, Saccharomyces pastorianus
ggtgcgcttcaggagtcagataatt

SEQ ID NO: 61731 - DNA, 25 bp, Saccharomyces pastorianus
gatcttgaagatgccaaacctccag

SEQ ID NO: 61732 - DNA, 25 bp, Saccharomyces pastorianus
atccgaatgatctacaaagggccga

SEQ ID NO: 61733 - DNA, 25 bp, Saccharomyces pastorianus
ttgacagagctgttggtgcgcttca

SEQ ID NO: 61734 - DNA, 25 bp, Saccharomyces pastorianus
tcaacgttattctagctgtcggtaa

SEQ ID NO: 61735 - DNA, 25 bp, Saccharomyces pastorianus
gaaactatgccccatattctaccga

SEQ ID NO: 61736 - DNA, 25 bp, Saccharomyces pastorianus
aagggccgatcagatttacctgcaa

SEQ ID NO: 61737 - DNA, 25 bp, Saccharomyces pastorianus
aaggcctttgctgctagggaaatca

SEQ ID NO: 61738 - DNA, 25 bp, Saccharomyces pastorianus
atgtactcttcactttcagttgtcg

SEQ ID NO: 61739 - DNA, 25 bp, Saccharomyces pastorianus
aactgatgaagtagcacgtcgtgca

SEQ ID NO: 61740 - DNA, 25 bp, Saccharomyces pastorianus
gcaacagctggaatctgaactggaa

SEQ ID NO: 61741 - DNA, 25 bp, Saccharomyces pastorianus
attcggtatgacacttcaacccaac

SEQ ID NO: 61742 - DNA, 25 bp, Saccharomyces pastorianus
aacgcctcgaacctcctatagagat

SEQ ID NO: 61743 - DNA, 25 bp, Saccharomyces pastorianus
gagggattcccttagtgaaaagcta

SEQ ID NO: 61744 - DNA, 25 bp, Saccharomyces pastorianus
agcacgggctcgttgggcaattaga

SEQ ID NO: 61745 - DNA, 25 bp, Saccharomyces pastorianus
agagatcgtatactggctaagaacc

SEQ ID NO: 61746 - DNA, 25 bp, Saccharomyces pastorianus
aaactccagacctgaggatggtttt

SEQ ID NO: 61747 - DNA, 25 bp, Saccharomyces pastorianus
gaaccaaagggttatgcaacagctg

SEQ ID NO: 61748 - DNA, 25 bp, Saccharomyces pastorianus
agcacgtcgtgcaatactagaaagt

SEQ ID NO: 61749 - DNA, 25 bp, Saccharomyces pastorianus
aattcaagcagagagggattccctt

SEQ ID NO: 61750 - DNA, 25 bp, Saccharomyces pastorianus
aaactagatgctgggtttgtcgctg

SEQ ID NO: 61751 - DNA, 25 bp, Saccharomyces pastorianus
agaaaagcccatactagccttagat

SEQ ID NO: 61752 - DNA, 25 bp, Saccharomyces pastorianus
aactggatgattctctatcctcgtc

SEQ ID NO: 61753 - DNA, 25 bp, Saccharomyces pastorianus
taacggatcatatcgatgttcctga

SEQ ID NO: 61754 - DNA, 25 bp, Saccharomyces pastorianus
tgacgagaatgacaccgcggatgct

SEQ ID NO: 61755 - DNA, 25 bp, Saccharomyces pastorianus
atttctttaggctctactggtgctc

SEQ ID NO: 61756 - DNA, 25 bp, Saccharomyces pastorianus
tttgtcgctgggattataacggatc

SEQ ID NO: 61757 - DNA, 25 bp, Saccharomyces pastorianus
aatgctctccttcggtgccaaaaga

SEQ ID NO: 61758 - DNA, 25 bp, Saccharomyces pastorianus
tcgtcctcttctagcatttctttag

SEQ ID NO: 61759 - DNA, 25 bp, Saccharomyces pastorianus
gaggaacttgtcgacttatatttaa

SEQ ID NO: 61760 - DNA, 25 bp, Saccharomyces pastorianus
gaacgtatgacgtgccttacagtaa

SEQ ID NO: 61761 - DNA, 25 bp, Saccharomyces pastorianus
gaagcaaaacttcttggagggcaaa

SEQ ID NO: 61762 - DNA, 25 bp, Saccharomyces pastorianus
ggattttgacgattcactgacttta

SEQ ID NO: 61763 - DNA, 25 bp, Saccharomyces pastorianus
ctcaagggccattgctggagatatt

SEQ ID NO: 61764 - DNA, 25 bp, Saccharomyces pastorianus
ggacaattcttatagctcttcaacg

SEQ ID NO: 61765 - DNA, 25 bp, Saccharomyces pastorianus
aaaatatccatactgttcgcacatt

SEQ ID NO: 61766 - DNA, 25 bp, Saccharomyces pastorianus
ctgttcgcacattaataaacggttt

SEQ ID NO: 61767 - DNA, 25 bp, Saccharomyces pastorianus
agtaggattccagagattcatcatc

SEQ ID NO: 61768 - DNA, 25 bp, Saccharomyces pastorianus
atgtttgaagacgtctcaagggcca

SEQ ID NO: 61769 - DNA, 25 bp, Saccharomyces pastorianus
ggagggcaaacaatttggcctacaa

SEQ ID NO: 61770 - DNA, 25 bp, Saccharomyces pastorianus
accaagacggttatcgtgaagggca

SEQ ID NO: 61771 - DNA, 25 bp, Saccharomyces pastorianus
agagattcatcatcctagggcaaat

SEQ ID NO: 61772 - DNA, 25 bp, Saccharomyces pastorianus
agaatccatcatgggatgccatcat

SEQ ID NO: 61773 - DNA, 25 bp, Saccharomyces pastorianus
gtttctaggttaattgagcgtcagt

SEQ ID NO: 61774 - DNA, 25 bp, Saccharomyces pastorianus
gagttgttgtttgctgacacacctc

SEQ ID NO: 61775 - DNA, 25 bp, Saccharomyces pastorianus
gaaatcatttatccgctagagaaaa

SEQ ID NO: 61776 - DNA, 25 bp, Saccharomyces pastorianus
gttaccgttatttattgtcattcct

SEQ ID NO: 61777 - DNA, 25 bp, Saccharomyces pastorianus
ttgctgacacacctctacgaagaaa

SEQ ID NO: 61778 - DNA, 25 bp, Saccharomyces pastorianus
gagcgtcagttaacagaattccgtg

SEQ ID NO: 61779 - DNA, 25 bp, Saccharomyces pastorianus
atgccatcattgagagcctactacc

SEQ ID NO: 61780 - DNA, 25 bp, Saccharomyces pastorianus
ggtgagcttgtatctttactagtta

SEQ ID NO: 61781 - DNA, 25 bp, Saccharomyces pastorianus
gaagaacccggttataaagcgatga

SEQ ID NO: 61782 - DNA, 25 bp, Saccharomyces pastorianus
gacttttatcttttcacaactgatg

SEQ ID NO: 61783 - DNA, 25 bp, Saccharomyces pastorianus
gttacaccggatagtcccatttttg

SEQ ID NO: 61784 - DNA, 25 bp, Saccharomyces pastorianus
attgccagtacagggaaacgcggaa

SEQ ID NO: 61785 - DNA, 25 bp, Saccharomyces pastorianus
aaaagttcagtgacggcagtttcac

SEQ ID NO: 61786 - DNA, 25 bp, Saccharomyces pastorianus
aaaatattccaggatcgcctcggat

SEQ ID NO: 61787 - DNA, 25 bp, Saccharomyces pastorianus
aatggctgatctttggtcgaatgac

SEQ ID NO: 61788 - DNA, 25 bp, Saccharomyces pastorianus
gaccaatcaattatcagttacaccg

SEQ ID NO: 61789 - DNA, 25 bp, Saccharomyces pastorianus
ggtatcttattgttgtttgctgaaa

SEQ ID NO: 61790 - DNA, 25 bp, Saccharomyces pastorianus
gcagtttcactaaagattgccagta

SEQ ID NO: 61791 - DNA, 25 bp, Saccharomyces pastorianus
ctactggtccgtaaagagggctgaa

SEQ ID NO: 61792 - DNA, 25 bp, Saccharomyces pastorianus
atactgcctcaattgtgacgaagag

SEQ ID NO: 61793 - DNA, 25 bp, Saccharomyces pastorianus
aagagcatcagtttcctactggtcc

SEQ ID NO: 61794 - DNA, 25 bp, Saccharomyces pastorianus
tctgctaggcccatcgcgcaaaaaa

SEQ ID NO: 61795 - DNA, 25 bp, Saccharomyces pastorianus
agaagtctgctatatcctttcacac

SEQ ID NO: 61796 - DNA, 25 bp, Saccharomyces pastorianus
tagatcctgggcttgggtttgccaa

SEQ ID NO: 61797 - DNA, 25 bp, Saccharomyces pastorianus
atatcctttcacacattcgtggcga

SEQ ID NO: 61798 - DNA, 25 bp, Saccharomyces pastorianus
aaccgtagtcgcatcgtgtgttgga

SEQ ID NO: 61799 - DNA, 25 bp, Saccharomyces pastorianus
aacatgttggacgtgattgccgaaa

SEQ ID NO: 61800 - DNA, 25 bp, Saccharomyces pastorianus
tctgccttaggcgattgtgttcaac

SEQ ID NO: 61801 - DNA, 25 bp, Saccharomyces pastorianus
ggacacacaagattctcatacctat

SEQ ID NO: 61802 - DNA, 25 bp, Saccharomyces pastorianus
aaagggcgtcaagcgttggcaaata

SEQ ID NO: 61803 - DNA, 25 bp, Saccharomyces pastorianus
agaaacatccctgttctgctaggcc

SEQ ID NO: 61804 - DNA, 25 bp, Saccharomyces pastorianus
gacacattacgaggactctgcctta

SEQ ID NO: 61805 - DNA, 25 bp, Saccharomyces pastorianus
cggctttcttagcatttggttcaaa

SEQ ID NO: 61806 - DNA, 25 bp, Saccharomyces pastorianus
ggctcaggaagcaatatgtcacgtt

SEQ ID NO: 61807 - DNA, 25 bp, Saccharomyces pastorianus
atgagacttctaataccgcctttga

SEQ ID NO: 61808 - DNA, 25 bp, Saccharomyces pastorianus
tgacaatgaacagccttgtggcgat

SEQ ID NO: 61809 - DNA, 25 bp, Saccharomyces pastorianus
aaaccttgagtaccactgacaatga

SEQ ID NO: 61810 - DNA, 25 bp, Saccharomyces pastorianus
taccgcctttgatttaccttcattg

SEQ ID NO: 61811 - DNA, 25 bp, Saccharomyces pastorianus
aagaccgttgaagccttagtggaat

SEQ ID NO: 61812 - DNA, 25 bp, Saccharomyces pastorianus
agtgatcatatttcttgcgccattc

SEQ ID NO: 61813 - DNA, 25 bp, Saccharomyces pastorianus
aatctgtgacaggtattattgccaa

SEQ ID NO: 61814 - DNA, 25 bp, Saccharomyces pastorianus
tcgaagaaggctgagttggcacccc

SEQ ID NO: 61815 - DNA, 25 bp, Saccharomyces pastorianus
acgcaattacggctactgagggtgt

SEQ ID NO: 61816 - DNA, 25 bp, Saccharomyces pastorianus
ggaactgacacataaccaacctgca

SEQ ID NO: 61817 - DNA, 25 bp, Saccharomyces pastorianus
gcaattacgttttggcgccggaaat

SEQ ID NO: 61818 - DNA, 25 bp, Saccharomyces pastorianus
gagctgctgaatgaggtggaaccct

SEQ ID NO: 61819 - DNA, 25 bp, Saccharomyces pastorianus
gaagatacgatcgagtacggcctta

SEQ ID NO: 61820 - DNA, 25 bp, Saccharomyces pastorianus
ggaacccttcatgcctattgtgatg

SEQ ID NO: 61821 - DNA, 25 bp, Saccharomyces pastorianus
ccgtctgcaagaactgaagctcgat

SEQ ID NO: 61822 - DNA, 25 bp, Saccharomyces pastorianus
aagctcgatgtgcactactattcta

SEQ ID NO: 61823 - DNA, 25 bp, Saccharomyces pastorianus
aatttctccagcagatctcattcac

SEQ ID NO: 61824 - DNA, 25 bp, Saccharomyces pastorianus
gaattcccaaaaggcctatctgtca

SEQ ID NO: 61825 - DNA, 25 bp, Saccharomyces pastorianus
gaaattcttgcgtccttttgtattc

SEQ ID NO: 61826 - DNA, 25 bp, Saccharomyces pastorianus
tacggccttatagtcgcagattctg

SEQ ID NO: 61827 - DNA, 25 bp, Saccharomyces pastorianus
cgtttggtgcaaattgtggtgtcat

SEQ ID NO: 61828 - DNA, 25 bp, Saccharomyces pastorianus
gtccattatcatccggttggcatta

SEQ ID NO: 61829 - DNA, 25 bp, Saccharomyces pastorianus
tcattgcattagacgagcctaccac

SEQ ID NO: 61830 - DNA, 25 bp, Saccharomyces pastorianus
gggcaaatcatacaattaccgtgtt

SEQ ID NO: 61831 - DNA, 25 bp, Saccharomyces pastorianus
gcaggccaaaaggttattgcgtcca

SEQ ID NO: 61832 - DNA, 25 bp, Saccharomyces pastorianus
ttccaactcattgtcattacccatg

SEQ ID NO: 61833 - DNA, 25 bp, Saccharomyces pastorianus
agaggaagatgttcggcaggccaaa

SEQ ID NO: 61834 - DNA, 25 bp, Saccharomyces pastorianus
aaaccaggtcttttgtcactgatga

SEQ ID NO: 61835 - DNA, 25 bp, Saccharomyces pastorianus
ggttattgcgtccattatcatccgg

SEQ ID NO: 61836 - DNA, 25 bp, Saccharomyces pastorianus
gcatttaccgaccatttcttcaaag

SEQ ID NO: 61837 - DNA, 25 bp, Saccharomyces pastorianus
cggttggcattatcggaaacgtttg

SEQ ID NO: 61838 - DNA, 25 bp, Saccharomyces pastorianus
gacagttgctgttacttgtgttcaa

SEQ ID NO: 61839 - DNA, 25 bp, Saccharomyces pastorianus
aaacgctcaggaagctcttgataaa

SEQ ID NO: 61840 - DNA, 25 bp, Saccharomyces pastorianus
gaaagccctagaaatcgctgaacgt

SEQ ID NO: 61841 - DNA, 25 bp, Saccharomyces pastorianus
aagactgcgttggagaacctgaaaa

SEQ ID NO: 61842 - DNA, 25 bp, Saccharomyces pastorianus
gcagaatctgaaattcgtccattga

SEQ ID NO: 61843 - DNA, 25 bp, Saccharomyces pastorianus
gaattgtcctacaagactgcgttgg

SEQ ID NO: 61844 - DNA, 25 bp, Saccharomyces pastorianus
gagctatccatttataacaccagtg

SEQ ID NO: 61845 - DNA, 25 bp, Saccharomyces pastorianus
gacaatatctgacgagctatccatt

SEQ ID NO: 61846 - DNA, 25 bp, Saccharomyces pastorianus
aactgtcgacgaactgagagaccaa

SEQ ID NO: 61847 - DNA, 25 bp, Saccharomyces pastorianus
atcatttcactaaactccctgtgtc

SEQ ID NO: 61848 - DNA, 25 bp, Saccharomyces pastorianus
gaacttgaacacagctctaagacaa

SEQ ID NO: 61849 - DNA, 25 bp, Saccharomyces pastorianus
gggactcgctagcatcgttgttcag

SEQ ID NO: 61850 - DNA, 25 bp, Saccharomyces pastorianus
aaagacaagcgcagcccggagggca

SEQ ID NO: 61851 - DNA, 25 bp, Saccharomyces pastorianus
gacaccagggacttcagcataacat

SEQ ID NO: 61852 - DNA, 25 bp, Saccharomyces pastorianus
ggatgctgaccagtgagcccgtgac

SEQ ID NO: 61853 - DNA, 25 bp, Saccharomyces pastorianus
agatctacccattctgcgtgaagta

SEQ ID NO: 61854 - DNA, 25 bp, Saccharomyces pastorianus
tactacacggaagcgcagcgggacc

SEQ ID NO: 61855 - DNA, 25 bp, Saccharomyces pastorianus
attaccaaggtgttccagatccgga

SEQ ID NO: 61856 - DNA, 25 bp, Saccharomyces pastorianus
taagcgctgctgatgacgacgacga

SEQ ID NO: 61857 - DNA, 25 bp, Saccharomyces pastorianus
gaaatggctagcgttggcatccaaa

SEQ ID NO: 61858 - DNA, 25 bp, Saccharomyces pastorianus
agcacgccagttttgcgaactacat

SEQ ID NO: 61859 - DNA, 25 bp, Saccharomyces pastorianus
atttccacggcattgacggcgactt

SEQ ID NO: 61860 - DNA, 25 bp, Saccharomyces pastorianus
gaatcgaccactatctgggcaagga

SEQ ID NO: 61861 - DNA, 25 bp, Saccharomyces pastorianus
ttcttgaacgctccctggaacagag

SEQ ID NO: 61862 - DNA, 25 bp, Saccharomyces pastorianus
tccagagcgtccagatctcgtttaa

SEQ ID NO: 61863 - DNA, 25 bp, Saccharomyces pastorianus
gtgtcatcgtggagaagcccttcgg

SEQ ID NO: 61864 - DNA, 25 bp, Saccharomyces pastorianus
acctgggcccgctgttcaaggagga

SEQ ID NO: 61865 - DNA, 25 bp, Saccharomyces pastorianus
aagaacctcttggtgctgcgtttcg

SEQ ID NO: 61866 - DNA, 25 bp, Saccharomyces pastorianus
gtttcgacgagctcagaacgcagat

SEQ ID NO: 61867 - DNA, 25 bp, Saccharomyces pastorianus
aagcgtcttcttgaccgtggccaaa

SEQ ID NO: 61868 - DNA, 25 bp, Saccharomyces pastorianus
agacgtcatgcagaaccatctcttg

SEQ ID NO: 61869 - DNA, 25 bp, Saccharomyces pastorianus
ctgcgtttcggtaaccagttcttga

SEQ ID NO: 61870 - DNA, 25 bp, Saccharomyces pastorianus
atgatcgactacatcgcgggcaatt

SEQ ID NO: 61871 - DNA, 25 bp, Saccharomyces pastorianus
ggcctgtacgtcatgactcagcaat

SEQ ID NO: 61872 - DNA, 25 bp, Saccharomyces pastorianus
ttttcggttctcacactccaaaatt

SEQ ID NO: 61873 - DNA, 25 bp, Saccharomyces pastorianus
aaaggcctcacgtatcaagtaccac

SEQ ID NO: 61874 - DNA, 25 bp, Saccharomyces pastorianus
tgccagtccgctaccgtgtagaaaa

SEQ ID NO: 61875 - DNA, 25 bp, Saccharomyces pastorianus
tactgtttccagatcgtagtcgaca

SEQ ID NO: 61876 - DNA, 25 bp, Saccharomyces pastorianus
gtcgatgagacgtccaagttgccag

SEQ ID NO: 61877 - DNA, 25 bp, Saccharomyces pastorianus
gcgacgccgtgctttatctaaatgt

SEQ ID NO: 61878 - DNA, 25 bp, Saccharomyces pastorianus
agtcgacatcgatgagttgcccgaa

SEQ ID NO: 61879 - DNA, 25 bp, Saccharomyces pastorianus
aagacacccatacggcaagctgatc

SEQ ID NO: 61880 - DNA, 25 bp, Saccharomyces pastorianus
aagtcgaccccattggagtttgcca

SEQ ID NO: 61881 - DNA, 25 bp, Saccharomyces pastorianus
tggccacaaaattcacctcgggtaa

SEQ ID NO: 61882 - DNA, 25 bp, Saccharomyces pastorianus
tgcagcaggacaacagaatcttcaa

SEQ ID NO: 61883 - DNA, 25 bp, Saccharomyces pastorianus
gacgtgctcttgaaccagactaggc

SEQ ID NO: 61884 - DNA, 25 bp, Saccharomyces pastorianus
tgaaccagactaggctgctgcagca

SEQ ID NO: 61885 - DNA, 25 bp, Saccharomyces pastorianus
ggacaacagaatcttcaacaccctc

SEQ ID NO: 61886 - DNA, 25 bp, Saccharomyces pastorianus
aacagaatcttcaacaccctcgtct

SEQ ID NO: 61887 - DNA, 25 bp, Saccharomyces pastorianus
gactaggctgctgcagcaggacaac

SEQ ID NO: 61888 - DNA, 25 bp, Saccharomyces pastorianus
gctcttgaaccagactaggctgctg

SEQ ID NO: 61889 - DNA, 25 bp, Saccharomyces pastorianus
ttctccagaactacaacgcccatga

SEQ ID NO: 61890 - DNA, 25 bp, Saccharomyces pastorianus
aattggccaccaccgttctccagaa

SEQ ID NO: 61891 - DNA, 25 bp, Saccharomyces pastorianus
catgacgtgctcttgaaccagacta

SEQ ID NO: 61892 - DNA, 25 bp, Saccharomyces pastorianus
acaacgcccatgacgtgctcttgaa

SEQ ID NO: 61893 - DNA, 25 bp, Saccharomyces pastorianus
gccacgttctctgtatcgcaagcat

SEQ ID NO: 61894 - DNA, 25 bp, Saccharomyces pastorianus
tcaggtcgcaagacgtgaggtccac

SEQ ID NO: 61895 - DNA, 25 bp, Saccharomyces pastorianus
tgaggtccactgacagagatcgtgt

SEQ ID NO: 61896 - DNA, 25 bp, Saccharomyces pastorianus
atcagtggatgcgtcttccagtgaa

SEQ ID NO: 61897 - DNA, 25 bp, Saccharomyces pastorianus
gaggtcgctgaccaatctacagagg

SEQ ID NO: 61898 - DNA, 25 bp, Saccharomyces pastorianus
tcgcaagcatcatctgacctaggtg

SEQ ID NO: 61899 - DNA, 25 bp, Saccharomyces pastorianus
aagttttgtcgctaggtgatggtac

SEQ ID NO: 61900 - DNA, 25 bp, Saccharomyces pastorianus
taactattatttaactaccgcgaga

SEQ ID NO: 61901 - DNA, 25 bp, Saccharomyces pastorianus
aataattgccgctggtggcggttcc

SEQ ID NO: 61902 - DNA, 25 bp, Saccharomyces pastorianus
atttatccgagtttcagttttgccg

SEQ ID NO: 61903 - DNA, 25 bp, Saccharomyces pastorianus
gctatcactgccaccttaattggta

SEQ ID NO: 61904 - DNA, 25 bp, Saccharomyces pastorianus
tttcaagaggtccaaagcctcggcg

SEQ ID NO: 61905 - DNA, 25 bp, Saccharomyces pastorianus
taagcgaagtcgatttaagaggtac

SEQ ID NO: 61906 - DNA, 25 bp, Saccharomyces pastorianus
taggtttaagcgaagtcgatttaag

SEQ ID NO: 61907 - DNA, 25 bp, Saccharomyces pastorianus
tcaagaggtccaaagcctcggcggt

SEQ ID NO: 61908 - DNA, 25 bp, Saccharomyces pastorianus
ggtccaaagcctcggcggtattgta

SEQ ID NO: 61909 - DNA, 25 bp, Saccharomyces pastorianus
aggtccaaagcctcggcggtattgt

SEQ ID NO: 61910 - DNA, 25 bp, Saccharomyces pastorianus
attgtaggtttaagcgaagtcgatt

SEQ ID NO: 61911 - DNA, 25 bp, Saccharomyces pastorianus
caagaggtccaaagcctcggcggta

SEQ ID NO: 61912 - DNA, 25 bp, Saccharomyces pastorianus
tattgtaggtttaagcgaagtcgat

SEQ ID NO: 61913 - DNA, 25 bp, Saccharomyces pastorianus
aagaggtccaaagcctcggcggtat

SEQ ID NO: 61914 - DNA, 25 bp, Saccharomyces pastorianus
aagcgaagtcgatttaagaggtact

SEQ ID NO: 61915 - DNA, 25 bp, Saccharomyces pastorianus
cgatgctcattggtgttctaatcaa

SEQ ID NO: 61916 - DNA, 25 bp, Saccharomyces pastorianus
gcatatgcagcattctaaattccgc

SEQ ID NO: 61917 - DNA, 25 bp, Saccharomyces pastorianus
gatatcggtgcaatacttccacaca

SEQ ID NO: 61918 - DNA, 25 bp, Saccharomyces pastorianus
aagctagaagtcatgggatccacca

SEQ ID NO: 61919 - DNA, 25 bp, Saccharomyces pastorianus
cctcatcgctttactttttcggata

SEQ ID NO: 61920 - DNA, 25 bp, Saccharomyces pastorianus
tcagccagctgtagaagacaccttt

SEQ ID NO: 61921 - DNA, 25 bp, Saccharomyces pastorianus
tttgatcctcatatttctcagccag

SEQ ID NO: 61922 - DNA, 25 bp, Saccharomyces pastorianus
cagagatggatccttcgatgctcat

SEQ ID NO: 61923 - DNA, 25 bp, Saccharomyces pastorianus
gatggcttccaagacattcattgca

SEQ ID NO: 61924 - DNA, 25 bp, Saccharomyces pastorianus
aaattccgcatgctcagtaggtatt

SEQ ID NO: 61925 - DNA, 25 bp, Saccharomyces pastorianus
gggatccaccattatcaatatactt

SEQ ID NO: 61926 - DNA, 25 bp, Saccharomyces pastorianus
tacttatccttatgtgacttcctcg

SEQ ID NO: 61927 - DNA, 25 bp, Saccharomyces pastorianus
gtcgtcttgaaatactctactctga

SEQ ID NO: 61928 - DNA, 25 bp, Saccharomyces pastorianus
ttagacgttctagataccttcaaag

SEQ ID NO: 61929 - DNA, 25 bp, Saccharomyces pastorianus
ggtggaggtccatttccaacagaac

SEQ ID NO: 61930 - DNA, 25 bp, Saccharomyces pastorianus
gacttcctcgagtactggtattggt

SEQ ID NO: 61931 - DNA, 25 bp, Saccharomyces pastorianus
aggtatttcgtattctatccaaggt

SEQ ID NO: 61932 - DNA, 25 bp, Saccharomyces pastorianus
tcttacagggttaggtattcctcca

SEQ ID NO: 61933 - DNA, 25 bp, Saccharomyces pastorianus
tactggtcgaaggtgctaatgcttt

SEQ ID NO: 61934 - DNA, 25 bp, Saccharomyces pastorianus
ctctactctgatcaacggttacaca

SEQ ID NO: 61935 - DNA, 25 bp, Saccharomyces pastorianus
taagcgtcgttgtggttggttagat

SEQ ID NO: 61936 - DNA, 25 bp, Saccharomyces pastorianus
acgatcggcgctgaattcggtgtca

SEQ ID NO: 61937 - DNA, 25 bp, Saccharomyces pastorianus
tatgacattgtagctcgttgtgcag

SEQ ID NO: 61938 - DNA, 25 bp, Saccharomyces pastorianus
taaatatgacattgtagctcgttgt

SEQ ID NO: 61939 - DNA, 25 bp, Saccharomyces pastorianus
aaatatgacattgtagctcgttgtg

SEQ ID NO: 61940 - DNA, 25 bp, Saccharomyces pastorianus
ggaaaattggtcgatttactggttg

SEQ ID NO: 61941 - DNA, 25 bp, Saccharomyces pastorianus
tggttaccgttgtattaggctccca

SEQ ID NO: 61942 - DNA, 25 bp, Saccharomyces pastorianus
atgacattgtagctcgttgtgcagg

SEQ ID NO: 61943 - DNA, 25 bp, Saccharomyces pastorianus
gaaaattggtcgatttactggttgg

SEQ ID NO: 61944 - DNA, 25 bp, Saccharomyces pastorianus
atatgacattgtagctcgttgtgca

SEQ ID NO: 61945 - DNA, 25 bp, Saccharomyces pastorianus
agctcgttgtgcagggggtaacaat

SEQ ID NO: 61946 - DNA, 25 bp, Saccharomyces pastorianus
tgacattgtagctcgttgtgcaggg

SEQ ID NO: 61947 - DNA, 25 bp, Saccharomyces pastorianus
aatatgacattgtagctcgttgtgc

SEQ ID NO: 61948 - DNA, 25 bp, Saccharomyces pastorianus
actaatttcgggtgatctgtactca

SEQ ID NO: 61949 - DNA, 25 bp, Saccharomyces pastorianus
gagagatttcatactcaccaaagag

SEQ ID NO: 61950 - DNA, 25 bp, Saccharomyces pastorianus
atatgcctgccgagatttatcttaa

SEQ ID NO: 61951 - DNA, 25 bp, Saccharomyces pastorianus
acgcaagtcaccttcctgattggaa

SEQ ID NO: 61952 - DNA, 25 bp, Saccharomyces pastorianus
ctccaagaggagttttctcagctat

SEQ ID NO: 61953 - DNA, 25 bp, Saccharomyces pastorianus
gaaagctgcttttacactcatcatg

SEQ ID NO: 61954 - DNA, 25 bp, Saccharomyces pastorianus
ctgtactcagttgcactagccatta

SEQ ID NO: 61955 - DNA, 25 bp, Saccharomyces pastorianus
ggaagcactacctcaaagctcgaga

SEQ ID NO: 61956 - DNA, 25 bp, Saccharomyces pastorianus
tcatcatgacaaccgcttgcgtatt

SEQ ID NO: 61957 - DNA, 25 bp, Saccharomyces pastorianus
tttcatcctgaaaccgtccaacaaa

SEQ ID NO: 61958 - DNA, 25 bp, Saccharomyces pastorianus
tggaatagtcgatatatgcctgccg

SEQ ID NO: 61959 - DNA, 25 bp, Saccharomyces pastorianus
gcaaatcgaagacgcttctactgat

SEQ ID NO: 61960 - DNA, 25 bp, Saccharomyces pastorianus
aagacgcttctactgatgaattgag

SEQ ID NO: 61961 - DNA, 25 bp, Saccharomyces pastorianus
gaagacgcttctactgatgaattga

SEQ ID NO: 61962 - DNA, 25 bp, Saccharomyces pastorianus
aatcgaagacgcttctactgatgaa

SEQ ID NO: 61963 - DNA, 25 bp, Saccharomyces pastorianus
tgcaaatcgaagacgcttctactga

SEQ ID NO: 61964 - DNA, 25 bp, Saccharomyces pastorianus
ttgcaaatcgaagacgcttctactg

SEQ ID NO: 61965 - DNA, 25 bp, Saccharomyces pastorianus
aaatcgaagacgcttctactgatga

SEQ ID NO: 61966 - DNA, 25 bp, Saccharomyces pastorianus
agacgcttctactgatgaattgaga

SEQ ID NO: 61967 - DNA, 25 bp, Saccharomyces pastorianus
cgaagacgcttctactgatgaattg

SEQ ID NO: 61968 - DNA, 25 bp, Saccharomyces pastorianus
gacgcttctactgatgaattgagaa

SEQ ID NO: 61969 - DNA, 25 bp, Saccharomyces pastorianus
tcgaagacgcttctactgatgaatt

SEQ ID NO: 61970 - DNA, 25 bp, Saccharomyces pastorianus
cacttccgatgaaaccaaggacttg

SEQ ID NO: 61971 - DNA, 25 bp, Saccharomyces pastorianus
gaattcgacctaagaggtatcccaa

SEQ ID NO: 61972 - DNA, 25 bp, Saccharomyces pastorianus
tgaccggtcaatccacttccgatga

SEQ ID NO: 61973 - DNA, 25 bp, Saccharomyces pastorianus
aatccacttccgatgaaaccaagga

SEQ ID NO: 61974 - DNA, 25 bp, Saccharomyces pastorianus
tatcttgaccggtcaatccacttcc

SEQ ID NO: 61975 - DNA, 25 bp, Saccharomyces pastorianus
cctaagaggtatcccaatgatgcca

SEQ ID NO: 61976 - DNA, 25 bp, Saccharomyces pastorianus
accggtcaatccacttccgatgaaa

SEQ ID NO: 61977 - DNA, 25 bp, Saccharomyces pastorianus
ggtcaatccacttccgatgaaacca

SEQ ID NO: 61978 - DNA, 25 bp, Saccharomyces pastorianus
ttgggtgaattcgacctaagaggta

SEQ ID NO: 61979 - DNA, 25 bp, Saccharomyces pastorianus
gacctaagaggtatcccaatgatgc

SEQ ID NO: 61980 - DNA, 25 bp, Saccharomyces pastorianus
gtcaatccacttccgatgaaaccaa

SEQ ID NO: 61981 - DNA, 25 bp, Saccharomyces pastorianus
actttcaccacttgcggtgacaacc

SEQ ID NO: 61982 - DNA, 25 bp, Saccharomyces pastorianus
agaactttcaccacttgcggtgaca

SEQ ID NO: 61983 - DNA, 25 bp, Saccharomyces pastorianus
ttctaacattaccatttccaacgct

SEQ ID NO: 61984 - DNA, 25 bp, Saccharomyces pastorianus
aagaactttcaccacttgcggtgac

SEQ ID NO: 61985 - DNA, 25 bp, Saccharomyces pastorianus
gaagaactttcaccacttgcggtga

SEQ ID NO: 61986 - DNA, 25 bp, Saccharomyces pastorianus
gagaagaactttcaccacttgcggt

SEQ ID NO: 61987 - DNA, 25 bp, Saccharomyces pastorianus
gttactgccatcgaaaagtccactg

SEQ ID NO: 61988 - DNA, 25 bp, Saccharomyces pastorianus
aactttcaccacttgcggtgacaac

SEQ ID NO: 61989 - DNA, 25 bp, Saccharomyces pastorianus
ttcaccacttgcggtgacaaccaaa

SEQ ID NO: 61990 - DNA, 25 bp, Saccharomyces pastorianus
gtcaatccacttccgatgaaaccaa

SEQ ID NO: 61991 - DNA, 25 bp, Saccharomyces pastorianus
gaactttcaccacttgcggtgacaa

SEQ ID NO: 61992 - DNA, 25 bp, Saccharomyces pastorianus
gcgtatgctgggtcgaaggtctcaa

SEQ ID NO: 61993 - DNA, 25 bp, Saccharomyces pastorianus
atctggaggctcttacgacaacaac

SEQ ID NO: 61994 - DNA, 25 bp, Saccharomyces pastorianus
ggtccacaaagtttcggcgggccag

SEQ ID NO: 61995 - DNA, 25 bp, Saccharomyces pastorianus
ggtcctcaaggtttcggtggcccag

SEQ ID NO: 61996 - DNA, 25 bp, Saccharomyces pastorianus
taggtggtgcgttcctagcgaacaa

SEQ ID NO: 61997 - DNA, 25 bp, Saccharomyces pastorianus
ttatggcggatccaatcatcaccag

SEQ ID NO: 61998 - DNA, 25 bp, Saccharomyces pastorianus
tacacaagatttcggtggcccaggt

SEQ ID NO: 61999 - DNA, 25 bp, Saccharomyces pastorianus
ggccagcaaggcaactctaattatg

SEQ ID NO: 62000 - DNA, 25 bp, Saccharomyces pastorianus
gagaacgtggtctgttttctaccct

SEQ ID NO: 62001 - DNA, 25 bp, Saccharomyces pastorianus
gcggccaaggctttggtggtccaaa

SEQ ID NO: 62002 - DNA, 25 bp, Saccharomyces pastorianus
gattcggaggcccaggtacacaaga

SEQ ID NO: 62003 - DNA, 25 bp, Saccharomyces pastorianus
atttacccttgccagtattctcttg

SEQ ID NO: 62004 - DNA, 25 bp, Saccharomyces pastorianus
ttacaagtgcctcaagtacgctgac

SEQ ID NO: 62005 - DNA, 25 bp, Saccharomyces pastorianus
agacgcgctgcacaaatcatatgaa

SEQ ID NO: 62006 - DNA, 25 bp, Saccharomyces pastorianus
aagctggctgttactttcagacgcg

SEQ ID NO: 62007 - DNA, 25 bp, Saccharomyces pastorianus
aaagcgcttggaactcgcaatttcc

SEQ ID NO: 62008 - DNA, 25 bp, Saccharomyces pastorianus
gtacgctgaccatcgaaaaattcca

SEQ ID NO: 62009 - DNA, 25 bp, Saccharomyces pastorianus
aacattatcaattcagagggcgctg

SEQ ID NO: 62010 - DNA, 25 bp, Saccharomyces pastorianus
ttccgaaccgtttgagatcccgaga

SEQ ID NO: 62011 - DNA, 25 bp, Saccharomyces pastorianus
gggcgctgaatttgtactaccggat

SEQ ID NO: 62012 - DNA, 25 bp, Saccharomyces pastorianus
ttcatgagatgtcccatttaccctt

SEQ ID NO: 62013 - DNA, 25 bp, Saccharomyces pastorianus
gacttcaaaggcacgatcgtccagc

SEQ ID NO: 62014 - DNA, 25 bp, Saccharomyces pastorianus
gtttcttcgagctttggtatattca

SEQ ID NO: 62015 - DNA, 25 bp, Saccharomyces pastorianus
gattgctatgtgctaagaaagtcgc

SEQ ID NO: 62016 - DNA, 25 bp, Saccharomyces pastorianus
gcaaacttgttctatgtaaaatcta

SEQ ID NO: 62017 - DNA, 25 bp, Saccharomyces pastorianus
agtcgcaggcaataacaagtgcttt

SEQ ID NO: 62018 - DNA, 25 bp, Saccharomyces pastorianus
gtaaaatctatcacaatggacagct

SEQ ID NO: 62019 - DNA, 25 bp, Saccharomyces pastorianus
cacaatttgtttcttcgagctttgg

SEQ ID NO: 62020 - DNA, 25 bp, Saccharomyces pastorianus
atcacaatggacagctttgaagaaa

SEQ ID NO: 62021 - DNA, 25 bp, Saccharomyces pastorianus
tcgagctttggtatattcatttgtg

SEQ ID NO: 62022 - DNA, 25 bp, Saccharomyces pastorianus
gaggtttagatgcaaacttgttcta

SEQ ID NO: 62023 - DNA, 25 bp, Saccharomyces pastorianus
catttgtgtcaattgcgcaaacctt

SEQ ID NO: 62024 - DNA, 25 bp, Saccharomyces pastorianus
atcgaaagagattgctatgtgctaa

SEQ ID NO: 62025 - DNA, 25 bp, Saccharomyces pastorianus
gagaggtttgcgaaatcgcagacaa

SEQ ID NO: 62026 - DNA, 25 bp, Saccharomyces pastorianus
aaattgccagcagcgccggcaataa

SEQ ID NO: 62027 - DNA, 25 bp, Saccharomyces pastorianus
agacaaaattgccagcagcgccggc

SEQ ID NO: 62028 - DNA, 25 bp, Saccharomyces pastorianus
gcatttggagagaggtttgcgaaat

SEQ ID NO: 62029 - DNA, 25 bp, Saccharomyces pastorianus
atcgcagacaaaattgccagcagcg

SEQ ID NO: 62030 - DNA, 25 bp, Saccharomyces pastorianus
aaaattgccagcagcgccggcaata

SEQ ID NO: 62031 - DNA, 25 bp, Saccharomyces pastorianus
gaggtttgcgaaatcgcagacaaaa

SEQ ID NO: 62032 - DNA, 25 bp, Saccharomyces pastorianus
cagcagcgccggcaataacaaaatc

SEQ ID NO: 62033 - DNA, 25 bp, Saccharomyces pastorianus
agcagcgccggcaataacaaaatct

SEQ ID NO: 62034 - DNA, 25 bp, Saccharomyces pastorianus
gacaaaattgccagcagcgccggca

SEQ ID NO: 62035 - DNA, 25 bp, Saccharomyces pastorianus
gcagacaaaattgccagcagcgccg

SEQ ID NO: 62036 - DNA, 25 bp, Saccharomyces pastorianus
gattacattcagagattgagcattt

SEQ ID NO: 62037 - DNA, 25 bp, Saccharomyces pastorianus
gtttcagtaaatataccatcagacg

SEQ ID NO: 62038 - DNA, 25 bp, Saccharomyces pastorianus
agcattcaagtttagaaaacggcct

SEQ ID NO: 62039 - DNA, 25 bp, Saccharomyces pastorianus
atcctcattattccggtgaccagtt

SEQ ID NO: 62040 - DNA, 25 bp, Saccharomyces pastorianus
ggccttgaaggcgaaaatgatgttt

SEQ ID NO: 62041 - DNA, 25 bp, Saccharomyces pastorianus
ttccggtgaccagttagcatttaag

SEQ ID NO: 62042 - DNA, 25 bp, Saccharomyces pastorianus
taccatcagacggattggcttctaa

SEQ ID NO: 62043 - DNA, 25 bp, Saccharomyces pastorianus
gagcattttgacaatgatcctcatt

SEQ ID NO: 62044 - DNA, 25 bp, Saccharomyces pastorianus
gacggattggcttctaatcatttag

SEQ ID NO: 62045 - DNA, 25 bp, Saccharomyces pastorianus
aagtcaatcagagcattcaagttta

SEQ ID NO: 62046 - DNA, 25 bp, Saccharomyces pastorianus
aatgatcctcattattccggtgacc

SEQ ID NO: 62047 - DNA, 25 bp, Saccharomyces pastorianus
tggtgccttgataaatgacggtaca

SEQ ID NO: 62048 - DNA, 25 bp, Saccharomyces pastorianus
caacgtcaagagactcagtggctaa

SEQ ID NO: 62049 - DNA, 25 bp, Saccharomyces pastorianus
aagcctacgactctattgtttctga

SEQ ID NO: 62050 - DNA, 25 bp, Saccharomyces pastorianus
gggaattagaattacaacgtcaaga

SEQ ID NO: 62051 - DNA, 25 bp, Saccharomyces pastorianus
gacggtacagataccaatctaaaca

SEQ ID NO: 62052 - DNA, 25 bp, Saccharomyces pastorianus
tacgccctttgaaagaagcctacga

SEQ ID NO: 62053 - DNA, 25 bp, Saccharomyces pastorianus
gaagaactcttacaactaacaaaca

SEQ ID NO: 62054 - DNA, 25 bp, Saccharomyces pastorianus
atattgcaccaattgacacagaagc

SEQ ID NO: 62055 - DNA, 25 bp, Saccharomyces pastorianus
caataacaacaagcgatggtgcctt

SEQ ID NO: 62056 - DNA, 25 bp, Saccharomyces pastorianus
gaaagttgacctaaatcctccaaat

SEQ ID NO: 62057 - DNA, 25 bp, Saccharomyces pastorianus
acagaagcggtaatacgccctttga

SEQ ID NO: 62058 - DNA, 25 bp, Saccharomyces pastorianus
gatagatctacctctccaaaatcgg

SEQ ID NO: 62059 - DNA, 25 bp, Saccharomyces pastorianus
atggaatttacacgcaggcccaata

SEQ ID NO: 62060 - DNA, 25 bp, Saccharomyces pastorianus
gaatgcatcaaccagccgaaccaaa

SEQ ID NO: 62061 - DNA, 25 bp, Saccharomyces pastorianus
aatgctacgctatcatcaggttcaa

SEQ ID NO: 62062 - DNA, 25 bp, Saccharomyces pastorianus
gaggccagtccttacgcaaagtatt

SEQ ID NO: 62063 - DNA, 25 bp, Saccharomyces pastorianus
gcgagcactagtacggcgtccaatg

SEQ ID NO: 62064 - DNA, 25 bp, Saccharomyces pastorianus
ttcgatccgcaaactggccaaattt

SEQ ID NO: 62065 - DNA, 25 bp, Saccharomyces pastorianus
aagggttccccatcagagttacaag

SEQ ID NO: 62066 - DNA, 25 bp, Saccharomyces pastorianus
gaactaagctttgaggccagtcctt

SEQ ID NO: 62067 - DNA, 25 bp, Saccharomyces pastorianus
aatacatctactaagggttccccat

SEQ ID NO: 62068 - DNA, 25 bp, Saccharomyces pastorianus
agtatattcaccgtgttcgatccgc

SEQ ID NO: 62069 - DNA, 25 bp, Saccharomyces pastorianus
tgaccaataatggatcacattcatg

SEQ ID NO: 62070 - DNA, 25 bp, Saccharomyces pastorianus
ctacaatacaatgaccaataatgga

SEQ ID NO: 62071 - DNA, 25 bp, Saccharomyces pastorianus
gaccaataatggatcacattcatgg

SEQ ID NO: 62072 - DNA, 25 bp, Saccharomyces pastorianus
tgggctacaatacaatgaccaataa

SEQ ID NO: 62073 - DNA, 25 bp, Saccharomyces pastorianus
tacaatacaatgaccaataatggat

SEQ ID NO: 62074 - DNA, 25 bp, Saccharomyces pastorianus
gctacaatacaatgaccaataatgg

SEQ ID NO: 62075 - DNA, 25 bp, Saccharomyces pastorianus
ggctacaatacaatgaccaataatg

SEQ ID NO: 62076 - DNA, 25 bp, Saccharomyces pastorianus
aatgaccaataatggatcacattca

SEQ ID NO: 62077 - DNA, 25 bp, Saccharomyces pastorianus
atgggctacaatacaatgaccaata

SEQ ID NO: 62078 - DNA, 25 bp, Saccharomyces pastorianus
gggctacaatacaatgaccaataat

SEQ ID NO: 62079 - DNA, 25 bp, Saccharomyces pastorianus
atgaccaataatggatcacattcat

SEQ ID NO: 62080 - DNA, 25 bp, Saccharomyces pastorianus
gacaattacctcgttctacagtaag

SEQ ID NO: 62081 - DNA, 25 bp, Saccharomyces pastorianus
actattggcgagaattccaccacct

SEQ ID NO: 62082 - DNA, 25 bp, Saccharomyces pastorianus
caccctgtaataccctttatgtcgg

SEQ ID NO: 62083 - DNA, 25 bp, Saccharomyces pastorianus
tattacagggtctgcttcgatctct

SEQ ID NO: 62084 - DNA, 25 bp, Saccharomyces pastorianus
gggaatttaccatcagacgctactg

SEQ ID NO: 62085 - DNA, 25 bp, Saccharomyces pastorianus
cgatgatgttagctttgcgacgaga

SEQ ID NO: 62086 - DNA, 25 bp, Saccharomyces pastorianus
agccatggcccaatgtgttttgttg

SEQ ID NO: 62087 - DNA, 25 bp, Saccharomyces pastorianus
gatctctcgggctgatttatcacta

SEQ ID NO: 62088 - DNA, 25 bp, Saccharomyces pastorianus
gcgacgagagcattagccgaattgt

SEQ ID NO: 62089 - DNA, 25 bp, Saccharomyces pastorianus
caggaaggtttcagacggttgtcat

SEQ ID NO: 62090 - DNA, 25 bp, Saccharomyces pastorianus
gttcctccagcaagactaagttcaa

SEQ ID NO: 62091 - DNA, 25 bp, Saccharomyces pastorianus
tgtcgagtaccacgaatacccacaa

SEQ ID NO: 62092 - DNA, 25 bp, Saccharomyces pastorianus
gaagcggcagtggagatttgtattt

SEQ ID NO: 62093 - DNA, 25 bp, Saccharomyces pastorianus
ggacatggcacgtaacaacagtaac

SEQ ID NO: 62094 - DNA, 25 bp, Saccharomyces pastorianus
atacccacaatatttctcctagtca

SEQ ID NO: 62095 - DNA, 25 bp, Saccharomyces pastorianus
gcaatacatcatgccacaggacatg

SEQ ID NO: 62096 - DNA, 25 bp, Saccharomyces pastorianus
cttgcccacgatgcgtccggtaggg

SEQ ID NO: 62097 - DNA, 25 bp, Saccharomyces pastorianus
gaatctgaacaattctgcccttgcc

SEQ ID NO: 62098 - DNA, 25 bp, Saccharomyces pastorianus
gctaaatacacttgcccttggcaat

SEQ ID NO: 62099 - DNA, 25 bp, Saccharomyces pastorianus
ttcacctttagcgatatcctctatg

SEQ ID NO: 62100 - DNA, 25 bp, Saccharomyces pastorianus
aatgacactattcagggcagttact

SEQ ID NO: 62101 - DNA, 25 bp, Saccharomyces pastorianus
tatttctcctagtcatcgttctagt

SEQ ID NO: 62102 - DNA, 25 bp, Saccharomyces pastorianus
aaacttctccagctagagacagaat

SEQ ID NO: 62103 - DNA, 25 bp, Saccharomyces pastorianus
aggactacaactactgtgcacgaag

SEQ ID NO: 62104 - DNA, 25 bp, Saccharomyces pastorianus
gcacgaagggtcaactgcattccgt

SEQ ID NO: 62105 - DNA, 25 bp, Saccharomyces pastorianus
accggtcaacaagtggcccgctggt

SEQ ID NO: 62106 - DNA, 25 bp, Saccharomyces pastorianus
gagtgtgatcacaggactacaacta

SEQ ID NO: 62107 - DNA, 25 bp, Saccharomyces pastorianus
atccctagtagaccagaatcaaaga

SEQ ID NO: 62108 - DNA, 25 bp, Saccharomyces pastorianus
gtaaccggtcaacaagtggcccgct

SEQ ID NO: 62109 - DNA, 25 bp, Saccharomyces pastorianus
gaggtaaaaaacttctccagctaga

SEQ ID NO: 62110 - DNA, 25 bp, Saccharomyces pastorianus
gggtcaactgcattccgtaaacggg

SEQ ID NO: 62111 - DNA, 25 bp, Saccharomyces pastorianus
cgccacatccctagtagaccagaat

SEQ ID NO: 62112 - DNA, 25 bp, Saccharomyces pastorianus
aactactgtgcacgaagggtcaact

SEQ ID NO: 62113 - DNA, 25 bp, Saccharomyces pastorianus
gtccagctgtcggaactttttaacg

SEQ ID NO: 62114 - DNA, 25 bp, Saccharomyces pastorianus
taatgcgactacaatctcctcagtt

SEQ ID NO: 62115 - DNA, 25 bp, Saccharomyces pastorianus
gacctttgaatgtccagctgtcgga

SEQ ID NO: 62116 - DNA, 25 bp, Saccharomyces pastorianus
gttaccagcaacaagggagtttcgt

SEQ ID NO: 62117 - DNA, 25 bp, Saccharomyces pastorianus
gaatacctcttttttacaggacaca

SEQ ID NO: 62118 - DNA, 25 bp, Saccharomyces pastorianus
gagttcacctcatgggaacgtcggt

SEQ ID NO: 62119 - DNA, 25 bp, Saccharomyces pastorianus
gtttcaaagaaccacattcgccaag

SEQ ID NO: 62120 - DNA, 25 bp, Saccharomyces pastorianus
attcgccaagtggttctcacaactt

SEQ ID NO: 62121 - DNA, 25 bp, Saccharomyces pastorianus
gaacgtcggtggtcaaattgtagta

SEQ ID NO: 62122 - DNA, 25 bp, Saccharomyces pastorianus
tggttctcacaactttccggacgaa

SEQ ID NO: 62123 - DNA, 25 bp, Saccharomyces pastorianus
aagctattcaaacatatggaccttt

SEQ ID NO: 62124 - DNA, 25 bp, Saccharomyces pastorianus
aattccgcttctttgtatactgttc

SEQ ID NO: 62125 - DNA, 25 bp, Saccharomyces pastorianus
gaccaacgtattccaggtgcaggtt

SEQ ID NO: 62126 - DNA, 25 bp, Saccharomyces pastorianus
gttaaatactggtgctggcgccgtt

SEQ ID NO: 62127 - DNA, 25 bp, Saccharomyces pastorianus
aagaatctgcccgttggttgccaaa

SEQ ID NO: 62128 - DNA, 25 bp, Saccharomyces pastorianus
taaagcggatccttcatcggttgaa

SEQ ID NO: 62129 - DNA, 25 bp, Saccharomyces pastorianus
tgccgcacttcgatggttctatgga

SEQ ID NO: 62130 - DNA, 25 bp, Saccharomyces pastorianus
ggttgccaaaacacatctatgccgc

SEQ ID NO: 62131 - DNA, 25 bp, Saccharomyces pastorianus
taaggtagtttctgaccgcgacaat

SEQ ID NO: 62132 - DNA, 25 bp, Saccharomyces pastorianus
aagtgagcctcaccatattgacgcg

SEQ ID NO: 62133 - DNA, 25 bp, Saccharomyces pastorianus
agacattccatctgctactcaaaga

SEQ ID NO: 62134 - DNA, 25 bp, Saccharomyces pastorianus
aagtgaatgttctggtcccacgtta

SEQ ID NO: 62135 - DNA, 25 bp, Saccharomyces pastorianus
gtaaagcgtcgatttactttaatgt

SEQ ID NO: 62136 - DNA, 25 bp, Saccharomyces pastorianus
gttggtggcattatctgcattgata

SEQ ID NO: 62137 - DNA, 25 bp, Saccharomyces pastorianus
actatggttggtggcattatctgca

SEQ ID NO: 62138 - DNA, 25 bp, Saccharomyces pastorianus
taatgtaatactatggttggtggca

SEQ ID NO: 62139 - DNA, 25 bp, Saccharomyces pastorianus
ggtggcattatctgcattgataaga

SEQ ID NO: 62140 - DNA, 25 bp, Saccharomyces pastorianus
tatggttggtggcattatctgcatt

SEQ ID NO: 62141 - DNA, 25 bp, Saccharomyces pastorianus
aagcgtcgatttactttaatgtaat

SEQ ID NO: 62142 - DNA, 25 bp, Saccharomyces pastorianus
tggttggtggcattatctgcattga

SEQ ID NO: 62143 - DNA, 25 bp, Saccharomyces pastorianus
gatttattggttgttcattctatat

SEQ ID NO: 62144 - DNA, 25 bp, Saccharomyces pastorianus
gataagatttattggttgttcattc

SEQ ID NO: 62145 - DNA, 25 bp, Saccharomyces pastorianus
tggttgttcattctatatgattgtc

SEQ ID NO: 62146 - DNA, 25 bp, Saccharomyces pastorianus
ggttccacttactgtctgtacttga

SEQ ID NO: 62147 - DNA, 25 bp, Saccharomyces pastorianus
gagtgtcaaatctttccaaaatatt

SEQ ID NO: 62148 - DNA, 25 bp, Saccharomyces pastorianus
gattactacagaagcctttagagat

SEQ ID NO: 62149 - DNA, 25 bp, Saccharomyces pastorianus
aagcccttcgtatatcaatgttttg

SEQ ID NO: 62150 - DNA, 25 bp, Saccharomyces pastorianus
gtctgtacttgatcagctcaatcat

SEQ ID NO: 62151 - DNA, 25 bp, Saccharomyces pastorianus
atcatttatttacagccatggcata

SEQ ID NO: 62152 - DNA, 25 bp, Saccharomyces pastorianus
gaaaaattttatgtcttaacttgcg

SEQ ID NO: 62153 - DNA, 25 bp, Saccharomyces pastorianus
attgttatttcattgggttccactt

SEQ ID NO: 62154 - DNA, 25 bp, Saccharomyces pastorianus
gcaatacattttgttaagcccttcg

SEQ ID NO: 62155 - DNA, 25 bp, Saccharomyces pastorianus
tatcgacattcatactttcattggg

SEQ ID NO: 62156 - DNA, 25 bp, Saccharomyces pastorianus
gcattttgcaatgttcatgacttgt

SEQ ID NO: 62157 - DNA, 25 bp, Saccharomyces pastorianus
agtgttattccttctgtcattttta

SEQ ID NO: 62158 - DNA, 25 bp, Saccharomyces pastorianus
ttggttgaatggttcgtttttcgcg

SEQ ID NO: 62159 - DNA, 25 bp, Saccharomyces pastorianus
ttcgtttttcgcgagtgttattcct

SEQ ID NO: 62160 - DNA, 25 bp, Saccharomyces pastorianus
gcgagtgttattccttctgtcattt

SEQ ID NO: 62161 - DNA, 25 bp, Saccharomyces pastorianus
atggttcgtttttcgcgagtgttat

SEQ ID NO: 62162 - DNA, 25 bp, Saccharomyces pastorianus
gatgttccagatagggttccagagt

SEQ ID NO: 62163 - DNA, 25 bp, Saccharomyces pastorianus
tatacagatgttccagatagggttc

SEQ ID NO: 62164 - DNA, 25 bp, Saccharomyces pastorianus
ttttcgcgagtgttattccttctgt

SEQ ID NO: 62165 - DNA, 25 bp, Saccharomyces pastorianus
tccagatagggttccagagtttatt

SEQ ID NO: 62166 - DNA, 25 bp, Saccharomyces pastorianus
gaatggttcgtttttcgcgagtgtt

SEQ ID NO: 62167 - DNA, 25 bp, Saccharomyces pastorianus
tcgcgagtgttattccttctgtcat

SEQ ID NO: 62168 - DNA, 25 bp, Saccharomyces pastorianus
gaagcgcatatctataccggctcgc

SEQ ID NO: 62169 - DNA, 25 bp, Saccharomyces pastorianus
caagaactttcctttgcagctgtac

SEQ ID NO: 62170 - DNA, 25 bp, Saccharomyces pastorianus
aacgggcggtacgtgtatgtcacta

SEQ ID NO: 62171 - DNA, 25 bp, Saccharomyces pastorianus
gaagccgtgtggatgcaccgcagca

SEQ ID NO: 62172 - DNA, 25 bp, Saccharomyces pastorianus
aagaggacccttactgtgcggtagc

SEQ ID NO: 62173 - DNA, 25 bp, Saccharomyces pastorianus
tggatgcgacacacgggctgagtat

SEQ ID NO: 62174 - DNA, 25 bp, Saccharomyces pastorianus
gaaggcacagcatcatctcgtgttt

SEQ ID NO: 62175 - DNA, 25 bp, Saccharomyces pastorianus
taagatcagtgtctacgaccgccgg

SEQ ID NO: 62176 - DNA, 25 bp, Saccharomyces pastorianus
gtagctacgctaatgaactgttcct

SEQ ID NO: 62177 - DNA, 25 bp, Saccharomyces pastorianus
tttgcagctgtactccgtgatggac

SEQ ID NO: 62178 - DNA, 25 bp, Saccharomyces pastorianus
ggacagtgcgttgcgaccttcgaca

SEQ ID NO: 62179 - DNA, 25 bp, Saccharomyces pastorianus
aatccttgccccatccgtcaaggac

SEQ ID NO: 62180 - DNA, 25 bp, Saccharomyces pastorianus
tcgaaccaaaggaagaagacccaat

SEQ ID NO: 62181 - DNA, 25 bp, Saccharomyces pastorianus
ccgtcaaggactacagaccagctga

SEQ ID NO: 62182 - DNA, 25 bp, Saccharomyces pastorianus
atgctgtaacgatcatcgaaccaaa

SEQ ID NO: 62183 - DNA, 25 bp, Saccharomyces pastorianus
taacgatcatcgaaccaaaggaaga

SEQ ID NO: 62184 - DNA, 25 bp, Saccharomyces pastorianus
gatgctgtaacgatcatcgaaccaa

SEQ ID NO: 62185 - DNA, 25 bp, Saccharomyces pastorianus
gaagaagacccaatccttgccccat

SEQ ID NO: 62186 - DNA, 25 bp, Saccharomyces pastorianus
ggaagaagacccaatccttgcccca

SEQ ID NO: 62187 - DNA, 25 bp, Saccharomyces pastorianus
acgatcatcgaaccaaaggaagaag

SEQ ID NO: 62188 - DNA, 25 bp, Saccharomyces pastorianus
ccagatgctgtaacgatcatcgaac

SEQ ID NO: 62189 - DNA, 25 bp, Saccharomyces pastorianus
gctgtaacgatcatcgaaccaaagg

SEQ ID NO: 62190 - DNA, 25 bp, Saccharomyces pastorianus
tgtcgaagtccgtgttactccaact

SEQ ID NO: 62191 - DNA, 25 bp, Saccharomyces pastorianus
cgttgtttctggtaaactaagagct

SEQ ID NO: 62192 - DNA, 25 bp, Saccharomyces pastorianus
gttactccaactaagactgaagtca

SEQ ID NO: 62193 - DNA, 25 bp, Saccharomyces pastorianus
accagtcaacgactttattgatgtt

SEQ ID NO: 62194 - DNA, 25 bp, Saccharomyces pastorianus
taagactgaagtcatcatcagagct

SEQ ID NO: 62195 - DNA, 25 bp, Saccharomyces pastorianus
taagggttgtgaagtcgttgtttct

SEQ ID NO: 62196 - DNA, 25 bp, Saccharomyces pastorianus
aagctatgaagttcgctgacggttt

SEQ ID NO: 62197 - DNA, 25 bp, Saccharomyces pastorianus
acgactttattgatgttgctaccag

SEQ ID NO: 62198 - DNA, 25 bp, Saccharomyces pastorianus
tgttgctaccagacacgtcttgatg

SEQ ID NO: 62199 - DNA, 25 bp, Saccharomyces pastorianus
ttgatgttgctaccagacacgtctt

SEQ ID NO: 62200 - DNA, 25 bp, Saccharomyces pastorianus
tgtgaagtcgttgtttctggtaaac

SEQ ID NO: 62201 - DNA, 25 bp, Saccharomyces pastorianus
gcagcaaccggagcaattagcatct

SEQ ID NO: 62202 - DNA, 25 bp, Saccharomyces pastorianus
ataagtcacccttacattcacgtaa

SEQ ID NO: 62203 - DNA, 25 bp, Saccharomyces pastorianus
agcctcctttcacctttgaaaagag

SEQ ID NO: 62204 - DNA, 25 bp, Saccharomyces pastorianus
gactcgcttatgaagcatccttgaa

SEQ ID NO: 62205 - DNA, 25 bp, Saccharomyces pastorianus
gaaggctatttcacagtgtcatttt

SEQ ID NO: 62206 - DNA, 25 bp, Saccharomyces pastorianus
gcgtcacgaagcaaagactcgctta

SEQ ID NO: 62207 - DNA, 25 bp, Saccharomyces pastorianus
caattagcatctgaaagcctccttt

SEQ ID NO: 62208 - DNA, 25 bp, Saccharomyces pastorianus
cagtgatgggttttggcgaaagctc

SEQ ID NO: 62209 - DNA, 25 bp, Saccharomyces pastorianus
atacatctctcagctttggacaggc

SEQ ID NO: 62210 - DNA, 25 bp, Saccharomyces pastorianus
ggttcagttgggtgacaagcctatc

SEQ ID NO: 62211 - DNA, 25 bp, Saccharomyces pastorianus
cgaagtgctggaaccttccgtatat

SEQ ID NO: 62212 - DNA, 25 bp, Saccharomyces pastorianus
actctgcttttttcgtcttcattgt

SEQ ID NO: 62213 - DNA, 25 bp, Saccharomyces pastorianus
gggcatctttcttaacatcaccaga

SEQ ID NO: 62214 - DNA, 25 bp, Saccharomyces pastorianus
tcttcattgtctctcgtcttggaaa

SEQ ID NO: 62215 - DNA, 25 bp, Saccharomyces pastorianus
tcatcggatgcggtttctactgtaa

SEQ ID NO: 62216 - DNA, 25 bp, Saccharomyces pastorianus
ttttcttcgttgcagcatcatcgga

SEQ ID NO: 62217 - DNA, 25 bp, Saccharomyces pastorianus
gcggtttctactgtaacatctgttt

SEQ ID NO: 62218 - DNA, 25 bp, Saccharomyces pastorianus
aacaccatatttgctttcttctttt

SEQ ID NO: 62219 - DNA, 25 bp, Saccharomyces pastorianus
tggattcaccatcttgggcatcttt

SEQ ID NO: 62220 - DNA, 25 bp, Saccharomyces pastorianus
gtaacatctgttttggattcaccat

SEQ ID NO: 62221 - DNA, 25 bp, Saccharomyces pastorianus
taaatcatcttttgtagtgtcgaaa

SEQ ID NO: 62222 - DNA, 25 bp, Saccharomyces pastorianus
ttgtctctcgtcttggaaatgaaaa

SEQ ID NO: 62223 - DNA, 25 bp, Saccharomyces pastorianus
atagagctctccaagtcgatttcga

SEQ ID NO: 62224 - DNA, 25 bp, Saccharomyces pastorianus
gtcgatttcgatttcatcttcagct

SEQ ID NO: 62225 - DNA, 25 bp, Saccharomyces pastorianus
aatctgttcctcgtttttgttattg

SEQ ID NO: 62226 - DNA, 25 bp, Saccharomyces pastorianus
tttctctttttggttgggtcgagca

SEQ ID NO: 62227 - DNA, 25 bp, Saccharomyces pastorianus
gcaaagcttttttaatctgttcctc

SEQ ID NO: 62228 - DNA, 25 bp, Saccharomyces pastorianus
ttcgcttgggacttcgatttctgac

SEQ ID NO: 62229 - DNA, 25 bp, Saccharomyces pastorianus
ggatacaatttgttcgcttgggact

SEQ ID NO: 62230 - DNA, 25 bp, Saccharomyces pastorianus
taatctttccccttcttaagagacg

SEQ ID NO: 62231 - DNA, 25 bp, Saccharomyces pastorianus
ttcgcgttcaactcttccaaggtaa

SEQ ID NO: 62232 - DNA, 25 bp, Saccharomyces pastorianus
tggttgggtcgagcaaagctttttt

SEQ ID NO: 62233 - DNA, 25 bp, Saccharomyces pastorianus
tcaactcttccaaggtaatctttcc

SEQ ID NO: 62234 - DNA, 25 bp, Saccharomyces pastorianus
ggaagcacggagatatagtatatac

SEQ ID NO: 62235 - DNA, 25 bp, Saccharomyces pastorianus
tttcaataatgcctaactcctgtcc

SEQ ID NO: 62236 - DNA, 25 bp, Saccharomyces pastorianus
aatcctattcatttccaaaacaaag

SEQ ID NO: 62237 - DNA, 25 bp, Saccharomyces pastorianus
aataatgcctaactcctgtcccatt

SEQ ID NO: 62238 - DNA, 25 bp, Saccharomyces pastorianus
tatcaccaacattaaccttgaattt

SEQ ID NO: 62239 - DNA, 25 bp, Saccharomyces pastorianus
tgttaatcttaagtgtaaatccttt

SEQ ID NO: 62240 - DNA, 25 bp, Saccharomyces pastorianus
aaccttatcaccaacattaaccttg

SEQ ID NO: 62241 - DNA, 25 bp, Saccharomyces pastorianus
atgcctaactcctgtcccattttaa

SEQ ID NO: 62242 - DNA, 25 bp, Saccharomyces pastorianus
cagccaaaaaatgttaatcttaagt

SEQ ID NO: 62243 - DNA, 25 bp, Saccharomyces pastorianus
aacaaagtcttggaagcacggagat

SEQ ID NO: 62244 - DNA, 25 bp, Saccharomyces pastorianus
atctataatcctattcatttccaaa

SEQ ID NO: 62245 - DNA, 25 bp, Saccharomyces pastorianus
cgcgatattgcggatacagctggtt

SEQ ID NO: 62246 - DNA, 25 bp, Saccharomyces pastorianus
gaaccgccgcgtaatatgataaagt

SEQ ID NO: 62247 - DNA, 25 bp, Saccharomyces pastorianus
ataagagttgttgccctcaccatca

SEQ ID NO: 62248 - DNA, 25 bp, Saccharomyces pastorianus
aagaactagatacaccagatggcat

SEQ ID NO: 62249 - DNA, 25 bp, Saccharomyces pastorianus
gaaactattactaccacgactttga

SEQ ID NO: 62250 - DNA, 25 bp, Saccharomyces pastorianus
gtggtataatcgtacatttggctat

SEQ ID NO: 62251 - DNA, 25 bp, Saccharomyces pastorianus
gatagaatccgtactgccaggagga

SEQ ID NO: 62252 - DNA, 25 bp, Saccharomyces pastorianus
tggctataaccggatgccgaacccg

SEQ ID NO: 62253 - DNA, 25 bp, Saccharomyces pastorianus
tcaacatcctgcctcttcaaagaaa

SEQ ID NO: 62254 - DNA, 25 bp, Saccharomyces pastorianus
gatacagctggtttgcatggagaca

SEQ ID NO: 62255 - DNA, 25 bp, Saccharomyces pastorianus
atggagacagtcaacatcctgcctc

SEQ ID NO: 62256 - DNA, 25 bp, Saccharomyces pastorianus
gtgggccatctactcatgtgatatc

SEQ ID NO: 62257 - DNA, 25 bp, Saccharomyces pastorianus
gatccgttttgggttccaacgacag

SEQ ID NO: 62258 - DNA, 25 bp, Saccharomyces pastorianus
aagagaatattgctcgtaggcatat

SEQ ID NO: 62259 - DNA, 25 bp, Saccharomyces pastorianus
gcacaacctcaattagtgttttctg

SEQ ID NO: 62260 - DNA, 25 bp, Saccharomyces pastorianus
agacttctgttgatgtccttgggaa

SEQ ID NO: 62261 - DNA, 25 bp, Saccharomyces pastorianus
gaagctttcttagattggtcgccaa

SEQ ID NO: 62262 - DNA, 25 bp, Saccharomyces pastorianus
actcatgtgatatccagacttctgt

SEQ ID NO: 62263 - DNA, 25 bp, Saccharomyces pastorianus
cgaggcccatgtgcctgtcgtagag

SEQ ID NO: 62264 - DNA, 25 bp, Saccharomyces pastorianus
tgtcgtagaggcattcggcttaagt

SEQ ID NO: 62265 - DNA, 25 bp, Saccharomyces pastorianus
gaggacacacattaccaagaacata

SEQ ID NO: 62266 - DNA, 25 bp, Saccharomyces pastorianus
attttttcaaatcgaggcccatgtg

SEQ ID NO: 62267 - DNA, 25 bp, Saccharomyces pastorianus
gaaatcacacattctgaacctgcga

SEQ ID NO: 62268 - DNA, 25 bp, Saccharomyces pastorianus
atcaaggttggcaggcctagggccc

SEQ ID NO: 62269 - DNA, 25 bp, Saccharomyces pastorianus
aaacattcttgtccgtttccgatat

SEQ ID NO: 62270 - DNA, 25 bp, Saccharomyces pastorianus
gtccgtttccgatatgatttcacca

SEQ ID NO: 62271 - DNA, 25 bp, Saccharomyces pastorianus
aacaactggaggtgctcttttagat

SEQ ID NO: 62272 - DNA, 25 bp, Saccharomyces pastorianus
gatttcaccaaagaatgcgcaattg

SEQ ID NO: 62273 - DNA, 25 bp, Saccharomyces pastorianus
aatattctgaaaacctccacctcaa

SEQ ID NO: 62274 - DNA, 25 bp, Saccharomyces pastorianus
gcggagatcttctaaaagggttcaa

SEQ ID NO: 62275 - DNA, 25 bp, Saccharomyces pastorianus
tgaacctgcgatcccatatagagaa

SEQ ID NO: 62276 - DNA, 25 bp, Saccharomyces pastorianus
aactcattcttagctgcgtttgaag

SEQ ID NO: 62277 - DNA, 25 bp, Saccharomyces pastorianus
acctcaaatatcgaccctatcattg

SEQ ID NO: 62278 - DNA, 25 bp, Saccharomyces pastorianus
gaatctcttcccgaatgaactgtac

SEQ ID NO: 62279 - DNA, 25 bp, Saccharomyces pastorianus
gaagacgatagcaacgacggcattg

SEQ ID NO: 62280 - DNA, 25 bp, Saccharomyces pastorianus
gaagatgcagacgacgtgacctccg

SEQ ID NO: 62281 - DNA, 25 bp, Saccharomyces pastorianus
gatgatttggcagacgacgattttg

SEQ ID NO: 62282 - DNA, 25 bp, Saccharomyces pastorianus
ggtgtttccattgatgaccatccat

SEQ ID NO: 62283 - DNA, 25 bp, Saccharomyces pastorianus
acattggactttccatgttggccaa

SEQ ID NO: 62284 - DNA, 25 bp, Saccharomyces pastorianus
gaagacatcagggaagcgcaaaaac

SEQ ID NO: 62285 - DNA, 25 bp, Saccharomyces pastorianus
gataacgttttcactggtacaggat

SEQ ID NO: 62286 - DNA, 25 bp, Saccharomyces pastorianus
gaagtttagcagttccgataacgtt

SEQ ID NO: 62287 - DNA, 25 bp, Saccharomyces pastorianus
cgacggcattgaaagatactctgac

SEQ ID NO: 62288 - DNA, 25 bp, Saccharomyces pastorianus
ccgctacgggcggtgctgcgacaaa

SEQ ID NO: 62289 - DNA, 25 bp, Saccharomyces pastorianus
gtggtggtggtagaggcagtggtaa

SEQ ID NO: 62290 - DNA, 25 bp, Saccharomyces pastorianus
tggtggtggtagaggcagtggtaat

SEQ ID NO: 62291 - DNA, 25 bp, Saccharomyces pastorianus
tgagttcctatagaggcggtggtgg

SEQ ID NO: 62292 - DNA, 25 bp, Saccharomyces pastorianus
agttcctatagaggcggtggtggtg

SEQ ID NO: 62293 - DNA, 25 bp, Saccharomyces pastorianus
gttcctatagaggcggtggtggtgg

SEQ ID NO: 62294 - DNA, 25 bp, Saccharomyces pastorianus
gagttcctatagaggcggtggtggt

SEQ ID NO: 62295 - DNA, 25 bp, Saccharomyces pastorianus
tcctatagaggcggtggtggtggta

SEQ ID NO: 62296 - DNA, 25 bp, Saccharomyces pastorianus
cggtggtggtggtagaggcagtggt

SEQ ID NO: 62297 - DNA, 25 bp, Saccharomyces pastorianus
ggtggtggtggtagaggcagtggta

SEQ ID NO: 62298 - DNA, 25 bp, Saccharomyces pastorianus
ttcctatagaggcggtggtggtggt

SEQ ID NO: 62299 - DNA, 25 bp, Saccharomyces pastorianus
atgagttcctatagaggcggtggtg

SEQ ID NO: 62300 - DNA, 25 bp, Saccharomyces pastorianus
aaatagaccgcaacagcaaaggaaa

SEQ ID NO: 62301 - DNA, 25 bp, Saccharomyces pastorianus
gccatcctagatctatccaagtaca

SEQ ID NO: 62302 - DNA, 25 bp, Saccharomyces pastorianus
tgaatttggtcctagacgaaaccgt

SEQ ID NO: 62303 - DNA, 25 bp, Saccharomyces pastorianus
aagactccaagatacgtgttaaact

SEQ ID NO: 62304 - DNA, 25 bp, Saccharomyces pastorianus
ggtcccaagagagaagccatcctag

SEQ ID NO: 62305 - DNA, 25 bp, Saccharomyces pastorianus
gatcagaaaatagaccgcaacagca

SEQ ID NO: 62306 - DNA, 25 bp, Saccharomyces pastorianus
gatctatccaagtacaaagactcca

SEQ ID NO: 62307 - DNA, 25 bp, Saccharomyces pastorianus
tgaaggtcccaagagagaagccatc

SEQ ID NO: 62308 - DNA, 25 bp, Saccharomyces pastorianus
gatacgtgttaaactaatgggtggt

SEQ ID NO: 62309 - DNA, 25 bp, Saccharomyces pastorianus
gaagccatcctagatctatccaagt

SEQ ID NO: 62310 - DNA, 25 bp, Saccharomyces pastorianus
gatcaattgatgaatttggtcctag

SEQ ID NO: 62311 - DNA, 25 bp, Saccharomyces pastorianus
gattcgctgcgatgcattaagccat

SEQ ID NO: 62312 - DNA, 25 bp, Saccharomyces pastorianus
ttggcggaccgcacgattcaggaag

SEQ ID NO: 62313 - DNA, 25 bp, Saccharomyces pastorianus
aggaccacccatggacaggcaaggt

SEQ ID NO: 62314 - DNA, 25 bp, Saccharomyces pastorianus
aaccggtgctaaggtcttccactct

SEQ ID NO: 62315 - DNA, 25 bp, Saccharomyces pastorianus
aaggtcattttcaaaccagcgccac

SEQ ID NO: 62316 - DNA, 25 bp, Saccharomyces pastorianus
gagagccgtcactcttaaatttggc

SEQ ID NO: 62317 - DNA, 25 bp, Saccharomyces pastorianus
tgccacggagcctatttcaagaaag

SEQ ID NO: 62318 - DNA, 25 bp, Saccharomyces pastorianus
taacgctttgaaatgggctcctgcc

SEQ ID NO: 62319 - DNA, 25 bp, Saccharomyces pastorianus
atgcgggctcttgaaaaccggtgct

SEQ ID NO: 62320 - DNA, 25 bp, Saccharomyces pastorianus
aagccattaacagaggaccacccat

SEQ ID NO: 62321 - DNA, 25 bp, Saccharomyces pastorianus
gaatacgggactgcattccatacca

SEQ ID NO: 62322 - DNA, 25 bp, Saccharomyces pastorianus
gttgcccacttatagaagcgttccc

SEQ ID NO: 62323 - DNA, 25 bp, Saccharomyces pastorianus
gctgcagttctcctatgtggacgaa

SEQ ID NO: 62324 - DNA, 25 bp, Saccharomyces pastorianus
ggatatcgctctccttggatttgga

SEQ ID NO: 62325 - DNA, 25 bp, Saccharomyces pastorianus
aaacgagtacctctgcagcagctac

SEQ ID NO: 62326 - DNA, 25 bp, Saccharomyces pastorianus
ggcctacccatagattactcatcaa

SEQ ID NO: 62327 - DNA, 25 bp, Saccharomyces pastorianus
atgcaacccggtctttattgactgc

SEQ ID NO: 62328 - DNA, 25 bp, Saccharomyces pastorianus
gcggtgatatgtttggccaccacca

SEQ ID NO: 62329 - DNA, 25 bp, Saccharomyces pastorianus
gactgcgttcacaggaaaacccact

SEQ ID NO: 62330 - DNA, 25 bp, Saccharomyces pastorianus
aagaggagtaattcccactctcacg

SEQ ID NO: 62331 - DNA, 25 bp, Saccharomyces pastorianus
aataaacttctactccatcgacgac

SEQ ID NO: 62332 - DNA, 25 bp, Saccharomyces pastorianus
tgcaatgcgcaaaagtcggcctacc

SEQ ID NO: 62333 - DNA, 25 bp, Saccharomyces pastorianus
caattggctggtatgtgcgctgcgc

SEQ ID NO: 62334 - DNA, 25 bp, Saccharomyces pastorianus
aggttgtaatctcgctgttgactta

SEQ ID NO: 62335 - DNA, 25 bp, Saccharomyces pastorianus
tgcgctgcgctagcatggacagtta

SEQ ID NO: 62336 - DNA, 25 bp, Saccharomyces pastorianus
gaacgccatcccatttttgaaacta

SEQ ID NO: 62337 - DNA, 25 bp, Saccharomyces pastorianus
ttcaggtatcattgccggtctagtc

SEQ ID NO: 62338 - DNA, 25 bp, Saccharomyces pastorianus
gattacgtcaatgccactgcgggtt

SEQ ID NO: 62339 - DNA, 25 bp, Saccharomyces pastorianus
gaaaagaattccacgccttctgatg

SEQ ID NO: 62340 - DNA, 25 bp, Saccharomyces pastorianus
agccgctgggtttgtaccaatctgg

SEQ ID NO: 62341 - DNA, 25 bp, Saccharomyces pastorianus
accaatctggtctgccgttgttatt

SEQ ID NO: 62342 - DNA, 25 bp, Saccharomyces pastorianus
ggtatctttgctgctgattacgtca

SEQ ID NO: 62343 - DNA, 25 bp, Saccharomyces pastorianus
ttggctgtgtgctaactggtatctt

SEQ ID NO: 62344 - DNA, 25 bp, Saccharomyces pastorianus
agcagtgatcgttctggcttgaaaa

SEQ ID NO: 62345 - DNA, 25 bp, Saccharomyces pastorianus
aggtttccggaaaagccatcacaag

SEQ ID NO: 62346 - DNA, 25 bp, Saccharomyces pastorianus
gcgggagtaccggagccaaagatac

SEQ ID NO: 62347 - DNA, 25 bp, Saccharomyces pastorianus
aaaagatcggaattgcccaccagac

SEQ ID NO: 62348 - DNA, 25 bp, Saccharomyces pastorianus
gcaagccaagtaccagttatccaca

SEQ ID NO: 62349 - DNA, 25 bp, Saccharomyces pastorianus
gagatactcgttcacgtgaagacta

SEQ ID NO: 62350 - DNA, 25 bp, Saccharomyces pastorianus
aattgcccaccagacctagcaaagg

SEQ ID NO: 62351 - DNA, 25 bp, Saccharomyces pastorianus
agaggcgagagctttgatcagcaaa

SEQ ID NO: 62352 - DNA, 25 bp, Saccharomyces pastorianus
gctagacaagctggtccggacagag

SEQ ID NO: 62353 - DNA, 25 bp, Saccharomyces pastorianus
ttataatgacagaagcagaccagct

SEQ ID NO: 62354 - DNA, 25 bp, Saccharomyces pastorianus
gaaaactaactcacaacgtcctcaa

SEQ ID NO: 62355 - DNA, 25 bp, Saccharomyces pastorianus
acacgtcaaagacatctcgcgatga

SEQ ID NO: 62356 - DNA, 25 bp, Saccharomyces pastorianus
catttttgtctatcattgggcccta

SEQ ID NO: 62357 - DNA, 25 bp, Saccharomyces pastorianus
gataatggcatcctagctcataagc

SEQ ID NO: 62358 - DNA, 25 bp, Saccharomyces pastorianus
ttgtcccttttgcatccattgatga

SEQ ID NO: 62359 - DNA, 25 bp, Saccharomyces pastorianus
ggctatggcagcagctttatcgact

SEQ ID NO: 62360 - DNA, 25 bp, Saccharomyces pastorianus
gagtcaaacaacatggcgtctgctt

SEQ ID NO: 62361 - DNA, 25 bp, Saccharomyces pastorianus
agttgtattactcctgttgtccaca

SEQ ID NO: 62362 - DNA, 25 bp, Saccharomyces pastorianus
gaatggaatagtgcccttgtccctt

SEQ ID NO: 62363 - DNA, 25 bp, Saccharomyces pastorianus
aatgaggatactgcgcttgtgaagg

SEQ ID NO: 62364 - DNA, 25 bp, Saccharomyces pastorianus
cttttagatcctttatacacgtcaa

SEQ ID NO: 62365 - DNA, 25 bp, Saccharomyces pastorianus
gcgtctgctttaatggtaactcgga

SEQ ID NO: 62366 - DNA, 25 bp, Saccharomyces pastorianus
tgagcgatacctcgaatggatctat

SEQ ID NO: 62367 - DNA, 25 bp, Saccharomyces pastorianus
ggccaatctgaagtcatttcgccat

SEQ ID NO: 62368 - DNA, 25 bp, Saccharomyces pastorianus
gccatttgatgtccctgttcacgaa

SEQ ID NO: 62369 - DNA, 25 bp, Saccharomyces pastorianus
ttgccattttaccacatcacttaga

SEQ ID NO: 62370 - DNA, 25 bp, Saccharomyces pastorianus
gcaaagtgtccatagcgcttatcaa

SEQ ID NO: 62371 - DNA, 25 bp, Saccharomyces pastorianus
gaccgtttttatcaccttttgccat

SEQ ID NO: 62372 - DNA, 25 bp, Saccharomyces pastorianus
gtatcatgatccacttaagacttct

SEQ ID NO: 62373 - DNA, 25 bp, Saccharomyces pastorianus
atcaagactttttcaactcaggcga

SEQ ID NO: 62374 - DNA, 25 bp, Saccharomyces pastorianus
atcttcatgggcagcagactttcta

SEQ ID NO: 62375 - DNA, 25 bp, Saccharomyces pastorianus
tttgagagaccctgttgcgagacca

SEQ ID NO: 62376 - DNA, 25 bp, Saccharomyces pastorianus
gaatggatctatcgcgttcgacccc

SEQ ID NO: 62377 - DNA, 25 bp, Saccharomyces pastorianus
gaaaggccaatttgctgaaatctct

SEQ ID NO: 62378 - DNA, 25 bp, Saccharomyces pastorianus
aaagggcagtgtggacttaaagtct

SEQ ID NO: 62379 - DNA, 25 bp, Saccharomyces pastorianus
gccaagaaaggccaatttgctgaaa

SEQ ID NO: 62380 - DNA, 25 bp, Saccharomyces pastorianus
tcaacttatacaaaaagggcagtgt

SEQ ID NO: 62381 - DNA, 25 bp, Saccharomyces pastorianus
ttctttcaataagtacaatctattc

SEQ ID NO: 62382 - DNA, 25 bp, Saccharomyces pastorianus
agtacaatctattcaacttatacaa

SEQ ID NO: 62383 - DNA, 25 bp, Saccharomyces pastorianus
gatggcaaaatgctttcaaacctaa

SEQ ID NO: 62384 - DNA, 25 bp, Saccharomyces pastorianus
caatttgctgaaatctctggcaaga

SEQ ID NO: 62385 - DNA, 25 bp, Saccharomyces pastorianus
atatcaacagaaatggacagcaaag

SEQ ID NO: 62386 - DNA, 25 bp, Saccharomyces pastorianus
gtggacttaaagtctaaatctttat

SEQ ID NO: 62387 - DNA, 25 bp, Saccharomyces pastorianus
aaggccaatttgctgaaatctctgg

SEQ ID NO: 62388 - DNA, 25 bp, Saccharomyces pastorianus
aaagggcagtgtggacttaaagtct

SEQ ID NO: 62389 - DNA, 25 bp, Saccharomyces pastorianus
gccaagaaaggccaatttgctgaaa

SEQ ID NO: 62390 - DNA, 25 bp, Saccharomyces pastorianus
tcaacttatacaaaaagggcagtgt

SEQ ID NO: 62391 - DNA, 25 bp, Saccharomyces pastorianus
agtacaatctattcaacttatacaa

SEQ ID NO: 62392 - DNA, 25 bp, Saccharomyces pastorianus
gaggacgagtacgtacttctttcaa

SEQ ID NO: 62393 - DNA, 25 bp, Saccharomyces pastorianus
atatcaacagaaatggacagcaaag

SEQ ID NO: 62394 - DNA, 25 bp, Saccharomyces pastorianus
gatggcaaaatgctttcaaacctaa

SEQ ID NO: 62395 - DNA, 25 bp, Saccharomyces pastorianus
ggaaacccgagcctatcatggtgaa

SEQ ID NO: 62396 - DNA, 25 bp, Saccharomyces pastorianus
caatttgctgaaatctctggcaaga

SEQ ID NO: 62397 - DNA, 25 bp, Saccharomyces pastorianus
gtggacttaaagtctaaatctttat

SEQ ID NO: 62398 - DNA, 25 bp, Saccharomyces pastorianus
aaggccaatttgctgaaatctctgg

SEQ ID NO: 62399 - DNA, 25 bp, Saccharomyces pastorianus
gacataaccacatatttggatattt

SEQ ID NO: 62400 - DNA, 25 bp, Saccharomyces pastorianus
atttacgacataaccacatatttgg

SEQ ID NO: 62401 - DNA, 25 bp, Saccharomyces pastorianus
acgacataaccacatatttggatat

SEQ ID NO: 62402 - DNA, 25 bp, Saccharomyces pastorianus
atgatatcatttacgacataaccac

SEQ ID NO: 62403 - DNA, 25 bp, Saccharomyces pastorianus
gttcatcaatgatatcatttacgac

SEQ ID NO: 62404 - DNA, 25 bp, Saccharomyces pastorianus
caatgatatcatttacgacataacc

SEQ ID NO: 62405 - DNA, 25 bp, Saccharomyces pastorianus
atcatttacgacataaccacatatt

SEQ ID NO: 62406 - DNA, 25 bp, Saccharomyces pastorianus
gatatcatttacgacataaccacat

SEQ ID NO: 62407 - DNA, 25 bp, Saccharomyces pastorianus
ttacgacataaccacatatttggat

SEQ ID NO: 62408 - DNA, 25 bp, Saccharomyces pastorianus
atatcatttacgacataaccacata

SEQ ID NO: 62409 - DNA, 25 bp, Saccharomyces pastorianus
cataaccacatatttggatatttac

SEQ ID NO: 62410 - DNA, 25 bp, Saccharomyces pastorianus
accattcaattgttcgcgtacgcat

SEQ ID NO: 62411 - DNA, 25 bp, Saccharomyces pastorianus
gtacttagccgaattctgtgggcca

SEQ ID NO: 62412 - DNA, 25 bp, Saccharomyces pastorianus
atttctctgcccttagttttatcga

SEQ ID NO: 62413 - DNA, 25 bp, Saccharomyces pastorianus
gaccccaggttgtgtggcacactaa

SEQ ID NO: 62414 - DNA, 25 bp, Saccharomyces pastorianus
tgtacgcattttgcacaggtgcttt

SEQ ID NO: 62415 - DNA, 25 bp, Saccharomyces pastorianus
actggcctttcgattgcgttcgtag

SEQ ID NO: 62416 - DNA, 25 bp, Saccharomyces pastorianus
agttggccgcatgattgttgctcat

SEQ ID NO: 62417 - DNA, 25 bp, Saccharomyces pastorianus
taagcaacccttcccaatggtgaac

SEQ ID NO: 62418 - DNA, 25 bp, Saccharomyces pastorianus
agaagcgctcaagggtcttttacca

SEQ ID NO: 62419 - DNA, 25 bp, Saccharomyces pastorianus
tttgtgcatatctttcatctcggtt

SEQ ID NO: 62420 - DNA, 25 bp, Saccharomyces pastorianus
actttccaatgtttatcccaaccat

SEQ ID NO: 62421 - DNA, 25 bp, Saccharomyces pastorianus
gaacttcaaagacagactatatatc

SEQ ID NO: 62422 - DNA, 25 bp, Saccharomyces pastorianus
gatcagtacaagaacttcaaagaca

SEQ ID NO: 62423 - DNA, 25 bp, Saccharomyces pastorianus
gtacaagaacttcaaagacagacta

SEQ ID NO: 62424 - DNA, 25 bp, Saccharomyces pastorianus
gacagactatatatctttagagcag

SEQ ID NO: 62425 - DNA, 25 bp, Saccharomyces pastorianus
ggaagtcgtcgatcagtacaagaac

SEQ ID NO: 62426 - DNA, 25 bp, Saccharomyces pastorianus
gtcgatcagtacaagaacttcaaag

SEQ ID NO: 62427 - DNA, 25 bp, Saccharomyces pastorianus
gaagtcgtcgatcagtacaagaact

SEQ ID NO: 62428 - DNA, 25 bp, Saccharomyces pastorianus
gactatatatctttagagcagactt

SEQ ID NO: 62429 - DNA, 25 bp, Saccharomyces pastorianus
taaaggaagtcgtcgatcagtacaa

SEQ ID NO: 62430 - DNA, 25 bp, Saccharomyces pastorianus
atatatctttagagcagacttaaaa

SEQ ID NO: 62431 - DNA, 25 bp, Saccharomyces pastorianus
gtcgtcgatcagtacaagaacttca

SEQ ID NO: 62432 - DNA, 25 bp, Saccharomyces pastorianus
atgcgagagtgcttgatctaggaca

SEQ ID NO: 62433 - DNA, 25 bp, Saccharomyces pastorianus
ataactcttctaatggttcggtcat

SEQ ID NO: 62434 - DNA, 25 bp, Saccharomyces pastorianus
gatattctctttatgggtaaatccg

SEQ ID NO: 62435 - DNA, 25 bp, Saccharomyces pastorianus
ggaatcgtattacttgaactgtatt

SEQ ID NO: 62436 - DNA, 25 bp, Saccharomyces pastorianus
gatattctaataacaccgtcggatt

SEQ ID NO: 62437 - DNA, 25 bp, Saccharomyces pastorianus
agaggttataatcccctcatccgtg

SEQ ID NO: 62438 - DNA, 25 bp, Saccharomyces pastorianus
ggatgtttttactttggactacata

SEQ ID NO: 62439 - DNA, 25 bp, Saccharomyces pastorianus
actacatactacatcctccattaag

SEQ ID NO: 62440 - DNA, 25 bp, Saccharomyces pastorianus
ccctcatccgtgacattatcaacaa

SEQ ID NO: 62441 - DNA, 25 bp, Saccharomyces pastorianus
gactcttacaagaagctgtccagct

SEQ ID NO: 62442 - DNA, 25 bp, Saccharomyces pastorianus
agctttcttccctaaggcacttgat

SEQ ID NO: 62443 - DNA, 25 bp, Saccharomyces pastorianus
tatggtgcgccttccatgggtcaaa

SEQ ID NO: 62444 - DNA, 25 bp, Saccharomyces pastorianus
agaacccgatgtatatgcagccacc

SEQ ID NO: 62445 - DNA, 25 bp, Saccharomyces pastorianus
acttccaattcaagctccgtttatg

SEQ ID NO: 62446 - DNA, 25 bp, Saccharomyces pastorianus
aaggtgctgcgctgcaacatgggta

SEQ ID NO: 62447 - DNA, 25 bp, Saccharomyces pastorianus
aaatctgcctaaattggtgccacca

SEQ ID NO: 62448 - DNA, 25 bp, Saccharomyces pastorianus
aaataactacccatatctaccacag

SEQ ID NO: 62449 - DNA, 25 bp, Saccharomyces pastorianus
acagccaaacggtatgccatatcct

SEQ ID NO: 62450 - DNA, 25 bp, Saccharomyces pastorianus
atataacaacgtgccacctgcgtac

SEQ ID NO: 62451 - DNA, 25 bp, Saccharomyces pastorianus
aattccccaacgcagggccatataa

SEQ ID NO: 62452 - DNA, 25 bp, Saccharomyces pastorianus
atggcaatgcggcacctagccaaaa

SEQ ID NO: 62453 - DNA, 25 bp, Saccharomyces pastorianus
aagctccgtttatgcaaatgcctca

SEQ ID NO: 62454 - DNA, 25 bp, Saccharomyces pastorianus
gtttccgcaatcacaataagaactc

SEQ ID NO: 62455 - DNA, 25 bp, Saccharomyces pastorianus
gaactctaatgaaaacccacaaagg

SEQ ID NO: 62456 - DNA, 25 bp, Saccharomyces pastorianus
gttcaacgtattacatccgctattg

SEQ ID NO: 62457 - DNA, 25 bp, Saccharomyces pastorianus
gtctttgttcaacgtattacatccg

SEQ ID NO: 62458 - DNA, 25 bp, Saccharomyces pastorianus
agatccttgaaagccttgagcggaa

SEQ ID NO: 62459 - DNA, 25 bp, Saccharomyces pastorianus
gcttcaaaccaagattgaaccagtt

SEQ ID NO: 62460 - DNA, 25 bp, Saccharomyces pastorianus
ggaaggaaaacagccaattcatctt

SEQ ID NO: 62461 - DNA, 25 bp, Saccharomyces pastorianus
tcccatagatccttgaaagccttga

SEQ ID NO: 62462 - DNA, 25 bp, Saccharomyces pastorianus
aacgtattacatccgctattgaagg

SEQ ID NO: 62463 - DNA, 25 bp, Saccharomyces pastorianus
atttaacaatgtttccgcaatcaca

SEQ ID NO: 62464 - DNA, 25 bp, Saccharomyces pastorianus
ttgaaccagtttttatttaacaatg

SEQ ID NO: 62465 - DNA, 25 bp, Saccharomyces pastorianus
agtgaatccaactagtgaagataag

SEQ ID NO: 62466 - DNA, 25 bp, Saccharomyces pastorianus
agtctggcccagagtcaatactatg

SEQ ID NO: 62467 - DNA, 25 bp, Saccharomyces pastorianus
aaaatttagtctggcccagagtcaa

SEQ ID NO: 62468 - DNA, 25 bp, Saccharomyces pastorianus
ataaaaatttagtctggcccagagt

SEQ ID NO: 62469 - DNA, 25 bp, Saccharomyces pastorianus
agtttagtgaatccaactagtgaag

SEQ ID NO: 62470 - DNA, 25 bp, Saccharomyces pastorianus
ctatgagtagtttagtgaatccaac

SEQ ID NO: 62471 - DNA, 25 bp, Saccharomyces pastorianus
gaacacaagcattaaggataaaaat

SEQ ID NO: 62472 - DNA, 25 bp, Saccharomyces pastorianus
gcccagagtcaatactatgagtagt

SEQ ID NO: 62473 - DNA, 25 bp, Saccharomyces pastorianus
ggataaaaatttagtctggcccaga

SEQ ID NO: 62474 - DNA, 25 bp, Saccharomyces pastorianus
gtctggcccagagtcaatactatga

SEQ ID NO: 62475 - DNA, 25 bp, Saccharomyces pastorianus
ctggcccagagtcaatactatgagt

SEQ ID NO: 62476 - DNA, 25 bp, Saccharomyces pastorianus
agcagagcctaaacctagtacaaca

SEQ ID NO: 62477 - DNA, 25 bp, Saccharomyces pastorianus
gaacatttattcaagcagtggcaag

SEQ ID NO: 62478 - DNA, 25 bp, Saccharomyces pastorianus
aaccgcagataaactagcagagcct

SEQ ID NO: 62479 - DNA, 25 bp, Saccharomyces pastorianus
gaattacggtcactacaccttatcc

SEQ ID NO: 62480 - DNA, 25 bp, Saccharomyces pastorianus
accttatcctagagagaccaccgag

SEQ ID NO: 62481 - DNA, 25 bp, Saccharomyces pastorianus
gaccaaattcctcatcaacgttgaa

SEQ ID NO: 62482 - DNA, 25 bp, Saccharomyces pastorianus
gactctgaatcttttgacacattgg

SEQ ID NO: 62483 - DNA, 25 bp, Saccharomyces pastorianus
tatactaacccatcgaattggctgg

SEQ ID NO: 62484 - DNA, 25 bp, Saccharomyces pastorianus
gaagaaaccaacatcggcgatcaat

SEQ ID NO: 62485 - DNA, 25 bp, Saccharomyces pastorianus
attaggaacatctcacactcattat

SEQ ID NO: 62486 - DNA, 25 bp, Saccharomyces pastorianus
atagccactttcttagactctgaat

SEQ ID NO: 62487 - DNA, 25 bp, Saccharomyces pastorianus
cgcttctcacactattactcaatta

SEQ ID NO: 62488 - DNA, 25 bp, Saccharomyces pastorianus
ctaatgtggtctgcaacttggccaa

SEQ ID NO: 62489 - DNA, 25 bp, Saccharomyces pastorianus
gagatctatcccgtggttctgaaat

SEQ ID NO: 62490 - DNA, 25 bp, Saccharomyces pastorianus
agactctaatctttgcttccacaaa

SEQ ID NO: 62491 - DNA, 25 bp, Saccharomyces pastorianus
attggctgctgactacttaaacgac

SEQ ID NO: 62492 - DNA, 25 bp, Saccharomyces pastorianus
ggatcacctatcatggttgccacag

SEQ ID NO: 62493 - DNA, 25 bp, Saccharomyces pastorianus
ttctgaaattgtcattgccactcca

SEQ ID NO: 62494 - DNA, 25 bp, Saccharomyces pastorianus
ggaagccgcttctcaagacgacgaa

SEQ ID NO: 62495 - DNA, 25 bp, Saccharomyces pastorianus
ccagctttggctatacacggtgaca

SEQ ID NO: 62496 - DNA, 25 bp, Saccharomyces pastorianus
gttacctacctggttcttgacgaag

SEQ ID NO: 62497 - DNA, 25 bp, Saccharomyces pastorianus
gttctctagaattagccgcttctca

SEQ ID NO: 62498 - DNA, 25 bp, Saccharomyces pastorianus
gccgttcaaactattgaggctaaac

SEQ ID NO: 62499 - DNA, 25 bp, Saccharomyces pastorianus
gaagatcttacggtggtcacccaag

SEQ ID NO: 62500 - DNA, 25 bp, Saccharomyces pastorianus
acagaggccgttcaaactattgagg

SEQ ID NO: 62501 - DNA, 25 bp, Saccharomyces pastorianus
ttacggtggtaacagaggccgttca

SEQ ID NO: 62502 - DNA, 25 bp, Saccharomyces pastorianus
tggtggccgtagaggcggttatggt

SEQ ID NO: 62503 - DNA, 25 bp, Saccharomyces pastorianus
ggttatggtggtgccgtggtggtta

SEQ ID NO: 62504 - DNA, 25 bp, Saccharomyces pastorianus
gaggccgttcaaactattgaggcta

SEQ ID NO: 62505 - DNA, 25 bp, Saccharomyces pastorianus
atcttacggtggtcacccaagatac

SEQ ID NO: 62506 - DNA, 25 bp, Saccharomyces pastorianus
acagaagatcttacggtggtcaccc

SEQ ID NO: 62507 - DNA, 25 bp, Saccharomyces pastorianus
ggtggtaacagaggccgttcaaact

SEQ ID NO: 62508 - DNA, 25 bp, Saccharomyces pastorianus
gaagtacgacagaagatcttacggt

SEQ ID NO: 62509 - DNA, 25 bp, Saccharomyces pastorianus
ggtacctttatcatcaatgggctct

SEQ ID NO: 62510 - DNA, 25 bp, Saccharomyces pastorianus
agattttcaccttctgctttcaaca

SEQ ID NO: 62511 - DNA, 25 bp, Saccharomyces pastorianus
cttctgctttcaacacctcaaattt

SEQ ID NO: 62512 - DNA, 25 bp, Saccharomyces pastorianus
atcataatcgtcttgatttctggaa

SEQ ID NO: 62513 - DNA, 25 bp, Saccharomyces pastorianus
gatttagtggctgcatgtgtaacaa

SEQ ID NO: 62514 - DNA, 25 bp, Saccharomyces pastorianus
ttgtcaatagcgcaacttccgtttc

SEQ ID NO: 62515 - DNA, 25 bp, Saccharomyces pastorianus
accattcatcgtaattctccatacc

SEQ ID NO: 62516 - DNA, 25 bp, Saccharomyces pastorianus
gtcagatccggcttcaaaggcattc

SEQ ID NO: 62517 - DNA, 25 bp, Saccharomyces pastorianus
aattcatttcttctccgttagttag

SEQ ID NO: 62518 - DNA, 25 bp, Saccharomyces pastorianus
ttctccataccctcttttcaaatgg

SEQ ID NO: 62519 - DNA, 25 bp, Saccharomyces pastorianus
ttcaaatggcagattttcaccttct

SEQ ID NO: 62520 - DNA, 25 bp, Saccharomyces pastorianus
gacaatctttgtaagaggtccacag

SEQ ID NO: 62521 - DNA, 25 bp, Saccharomyces pastorianus
gacttcatccatatgctaatcccgc

SEQ ID NO: 62522 - DNA, 25 bp, Saccharomyces pastorianus
tgacacctatccaaaccctttaaga

SEQ ID NO: 62523 - DNA, 25 bp, Saccharomyces pastorianus
ttgttgaacttttaccatcgattac

SEQ ID NO: 62524 - DNA, 25 bp, Saccharomyces pastorianus
aggccgtaacgctaaagacgcagaa

SEQ ID NO: 62525 - DNA, 25 bp, Saccharomyces pastorianus
cccgctgaacacactcatttgtgga

SEQ ID NO: 62526 - DNA, 25 bp, Saccharomyces pastorianus
atgctaatcccgctccaagtaccga

SEQ ID NO: 62527 - DNA, 25 bp, Saccharomyces pastorianus
gagaataacccaccaggccgtaacg

SEQ ID NO: 62528 - DNA, 25 bp, Saccharomyces pastorianus
aagaccgatgattgtgtgtactcca

SEQ ID NO: 62529 - DNA, 25 bp, Saccharomyces pastorianus
ttaagatctatagaggcgcctccgt

SEQ ID NO: 62530 - DNA, 25 bp, Saccharomyces pastorianus
aggaaatgtcttaccttcaaacaag

SEQ ID NO: 62531 - DNA, 25 bp, Saccharomyces pastorianus
atccacttatcctacagacgcaatg

SEQ ID NO: 62532 - DNA, 25 bp, Saccharomyces pastorianus
gtaaggttcgctgtggcaaactaca

SEQ ID NO: 62533 - DNA, 25 bp, Saccharomyces pastorianus
agatgtcggcgactcttcagtaaga

SEQ ID NO: 62534 - DNA, 25 bp, Saccharomyces pastorianus
gtaagagctatctttgctaccatca

SEQ ID NO: 62535 - DNA, 25 bp, Saccharomyces pastorianus
tacacggaacattccctagggtctg

SEQ ID NO: 62536 - DNA, 25 bp, Saccharomyces pastorianus
agacagtgccgattccttgggcaga

SEQ ID NO: 62537 - DNA, 25 bp, Saccharomyces pastorianus
aatctcttctctagtcgatgctcta

SEQ ID NO: 62538 - DNA, 25 bp, Saccharomyces pastorianus
gtgccgcttgggtcatcttaagatc

SEQ ID NO: 62539 - DNA, 25 bp, Saccharomyces pastorianus
ttattcactccggtgacgtgtctat

SEQ ID NO: 62540 - DNA, 25 bp, Saccharomyces pastorianus
tccctaggcttagatctcccaagaa

SEQ ID NO: 62541 - DNA, 25 bp, Saccharomyces pastorianus
tattccctctgtggctgacgctaag

SEQ ID NO: 62542 - DNA, 25 bp, Saccharomyces pastorianus
gaattagagtcatcaatacacgagt

SEQ ID NO: 62543 - DNA, 25 bp, Saccharomyces pastorianus
caaatattctgatgacgaggacgac

SEQ ID NO: 62544 - DNA, 25 bp, Saccharomyces pastorianus
ttctgagctctattttggaactagg

SEQ ID NO: 62545 - DNA, 25 bp, Saccharomyces pastorianus
aattcaagtcttaaccacagcaatg

SEQ ID NO: 62546 - DNA, 25 bp, Saccharomyces pastorianus
gatcccattcaggtgatttgaacga

SEQ ID NO: 62547 - DNA, 25 bp, Saccharomyces pastorianus
acgttaaatgcaagcgctcctactc

SEQ ID NO: 62548 - DNA, 25 bp, Saccharomyces pastorianus
gacaacgccttgaaaagatcccatt

SEQ ID NO: 62549 - DNA, 25 bp, Saccharomyces pastorianus
gacagacagtctacgcgaaatgaac

SEQ ID NO: 62550 - DNA, 25 bp, Saccharomyces pastorianus
aggacgacgaatacggtgacgccga

SEQ ID NO: 62551 - DNA, 25 bp, Saccharomyces pastorianus
tggaactaggtcttaaccatccgaa

SEQ ID NO: 62552 - DNA, 25 bp, Saccharomyces pastorianus
tgacgccgacctccgtaaacataaa

SEQ ID NO: 62553 - DNA, 25 bp, Saccharomyces pastorianus
gaaggcgactcgtacaacgccgagt

SEQ ID NO: 62554 - DNA, 25 bp, Saccharomyces pastorianus
ggtcacgccggaaatactgctggaa

SEQ ID NO: 62555 - DNA, 25 bp, Saccharomyces pastorianus
agcaatggcacgagcactttcaaca

SEQ ID NO: 62556 - DNA, 25 bp, Saccharomyces pastorianus
gaacagctggcttacgtcgacaatt

SEQ ID NO: 62557 - DNA, 25 bp, Saccharomyces pastorianus
acaacaccgctgatgaagtgccgca

SEQ ID NO: 62558 - DNA, 25 bp, Saccharomyces pastorianus
gaagtgccgcatgcgaaccttttaa

SEQ ID NO: 62559 - DNA, 25 bp, Saccharomyces pastorianus
gctcgccatcgagttgagtgcattt

SEQ ID NO: 62560 - DNA, 25 bp, Saccharomyces pastorianus
tttgtagcaacagcctcgtcgtcgt

SEQ ID NO: 62561 - DNA, 25 bp, Saccharomyces pastorianus
tgatgattcgtttatcttcccggat

SEQ ID NO: 62562 - DNA, 25 bp, Saccharomyces pastorianus
tgtcgactggaacgtcaacaccact

SEQ ID NO: 62563 - DNA, 25 bp, Saccharomyces pastorianus
aatacacagcccttgcttggcgatg

SEQ ID NO: 62564 - DNA, 25 bp, Saccharomyces pastorianus
agtgaagcacttggtctagacagca

SEQ ID NO: 62565 - DNA, 25 bp, Saccharomyces pastorianus
actgtgaacagtcctttacccttct

SEQ ID NO: 62566 - DNA, 25 bp, Saccharomyces pastorianus
tggtggcattgtatcctcgaatcat

SEQ ID NO: 62567 - DNA, 25 bp, Saccharomyces pastorianus
taccggacccacaatattatcttga

SEQ ID NO: 62568 - DNA, 25 bp, Saccharomyces pastorianus
gcgatattcagtttccatttggtgg

SEQ ID NO: 62569 - DNA, 25 bp, Saccharomyces pastorianus
gtgtgatgacactacatgcggtatt

SEQ ID NO: 62570 - DNA, 25 bp, Saccharomyces pastorianus
gaattaacctgtccatcatgcgata

SEQ ID NO: 62571 - DNA, 25 bp, Saccharomyces pastorianus
atggtatccaatgtaagcactgtga

SEQ ID NO: 62572 - DNA, 25 bp, Saccharomyces pastorianus
tacccttcttcaattaactagtcag

SEQ ID NO: 62573 - DNA, 25 bp, Saccharomyces pastorianus
gataagcagctgtacaatcaacttt

SEQ ID NO: 62574 - DNA, 25 bp, Saccharomyces pastorianus
tgatattaataacctgcaacctttg

SEQ ID NO: 62575 - DNA, 25 bp, Saccharomyces pastorianus
gctgactgctaactctatgtacggt

SEQ ID NO: 62576 - DNA, 25 bp, Saccharomyces pastorianus
aagccgcttgccatgttggtcacaa

SEQ ID NO: 62577 - DNA, 25 bp, Saccharomyces pastorianus
cagcaagctcttaagctgactgcta

SEQ ID NO: 62578 - DNA, 25 bp, Saccharomyces pastorianus
caacttagttgatcgccgtcgtgaa

SEQ ID NO: 62579 - DNA, 25 bp, Saccharomyces pastorianus
gaaactgaccctcataaacgagttc

SEQ ID NO: 62580 - DNA, 25 bp, Saccharomyces pastorianus
tgaaaactcggacgctccaactaat

SEQ ID NO: 62581 - DNA, 25 bp, Saccharomyces pastorianus
agttacccaatgtacctccttcaga

SEQ ID NO: 62582 - DNA, 25 bp, Saccharomyces pastorianus
aattacgtcttggttatggatttca

SEQ ID NO: 62583 - DNA, 25 bp, Saccharomyces pastorianus
ttgtatccatctatcattcaagagt

SEQ ID NO: 62584 - DNA, 25 bp, Saccharomyces pastorianus
caacatttgttttaccaccgtggat

SEQ ID NO: 62585 - DNA, 25 bp, Saccharomyces pastorianus
gaggtgagccaaggtgtcctaccaa

SEQ ID NO: 62586 - DNA, 25 bp, Saccharomyces pastorianus
tttagcccatagaatgcacgacctt

SEQ ID NO: 62587 - DNA, 25 bp, Saccharomyces pastorianus
tcgttagattcacccattccagaga

SEQ ID NO: 62588 - DNA, 25 bp, Saccharomyces pastorianus
aaaggcaatgctgtcttgtttctgt

SEQ ID NO: 62589 - DNA, 25 bp, Saccharomyces pastorianus
gtcgcgataactttgtcatcttaca

SEQ ID NO: 62590 - DNA, 25 bp, Saccharomyces pastorianus
atcagcgacatctgctctggtagat

SEQ ID NO: 62591 - DNA, 25 bp, Saccharomyces pastorianus
tgcacgaccttaacattccaacgtt

SEQ ID NO: 62592 - DNA, 25 bp, Saccharomyces pastorianus
gaaactgcctggtcaagttaggtta

SEQ ID NO: 62593 - DNA, 25 bp, Saccharomyces pastorianus
ttcagttctattggtcgtcgtctaa

SEQ ID NO: 62594 - DNA, 25 bp, Saccharomyces pastorianus
aaggccgcctcaatcaacaagtttt

SEQ ID NO: 62595 - DNA, 25 bp, Saccharomyces pastorianus
gaggtgtctttctttatcggttcaa

SEQ ID NO: 62596 - DNA, 25 bp, Saccharomyces pastorianus
gtcttgtttctgtgccatgctaaaa

SEQ ID NO: 62597 - DNA, 25 bp, Saccharomyces pastorianus
attggactccaaggacgttcaacaa

SEQ ID NO: 62598 - DNA, 25 bp, Saccharomyces pastorianus
gtcttattggactccaaggacgttc

SEQ ID NO: 62599 - DNA, 25 bp, Saccharomyces pastorianus
tattggactccaaggacgttcaaca

SEQ ID NO: 62600 - DNA, 25 bp, Saccharomyces pastorianus
gacgttcaacaaattgactacaaat

SEQ ID NO: 62601 - DNA, 25 bp, Saccharomyces pastorianus
ggacgttcaacaaattgactacaaa

SEQ ID NO: 62602 - DNA, 25 bp, Saccharomyces pastorianus
caaaaggtcttattggactccaagg

SEQ ID NO: 62603 - DNA, 25 bp, Saccharomyces pastorianus
gatccaaaaggtcttattggactcc

SEQ ID NO: 62604 - DNA, 25 bp, Saccharomyces pastorianus
aaggtcttattggactccaaggacg

SEQ ID NO: 62605 - DNA, 25 bp, Saccharomyces pastorianus
ggtcttattggactccaaggacgtt

SEQ ID NO: 62606 - DNA, 25 bp, Saccharomyces pastorianus
ggactccaaggacgttcaacaaatt

SEQ ID NO: 62607 - DNA, 25 bp, Saccharomyces pastorianus
ttattggactccaaggacgttcaac

SEQ ID NO: 62608 - DNA, 25 bp, Saccharomyces pastorianus
ttcattgatctagaaggctcttccc

SEQ ID NO: 62609 - DNA, 25 bp, Saccharomyces pastorianus
gctcttccccagaattaaaggctga

SEQ ID NO: 62610 - DNA, 25 bp, Saccharomyces pastorianus
atccaaaattttgtcccaagctcca

SEQ ID NO: 62611 - DNA, 25 bp, Saccharomyces pastorianus
attgatctagaaggctcttccccag

SEQ ID NO: 62612 - DNA, 25 bp, Saccharomyces pastorianus
ttccccagaattaaaggctgaattg

SEQ ID NO: 62613 - DNA, 25 bp, Saccharomyces pastorianus
ccaaaattttgtcccaagctccaag

SEQ ID NO: 62614 - DNA, 25 bp, Saccharomyces pastorianus
tagaaggctcttccccagaattaaa

SEQ ID NO: 62615 - DNA, 25 bp, Saccharomyces pastorianus
atgtcttctgtccaatccaaaattt

SEQ ID NO: 62616 - DNA, 25 bp, Saccharomyces pastorianus
gccaaggccttcattgatctagaag

SEQ ID NO: 62617 - DNA, 25 bp, Saccharomyces pastorianus
gatctagaaggctcttccccagaat

SEQ ID NO: 62618 - DNA, 25 bp, Saccharomyces pastorianus
aggctcttccccagaattaaaggct

SEQ ID NO: 62619 - DNA, 25 bp, Saccharomyces pastorianus
agcccattttgtccttgcgttgatt

SEQ ID NO: 62620 - DNA, 25 bp, Saccharomyces pastorianus
attttttggcaccaatggctctcgc

SEQ ID NO: 62621 - DNA, 25 bp, Saccharomyces pastorianus
acttgttttgcatcttcggcgggaa

SEQ ID NO: 62622 - DNA, 25 bp, Saccharomyces pastorianus
gggcaatatcgtaacgcctcgtcag

SEQ ID NO: 62623 - DNA, 25 bp, Saccharomyces pastorianus
gactagttctcgtagctacttcgaa

SEQ ID NO: 62624 - DNA, 25 bp, Saccharomyces pastorianus
agggactcagagttatccacggcaa

SEQ ID NO: 62625 - DNA, 25 bp, Saccharomyces pastorianus
aagacgttcatattcttcttgcccc

SEQ ID NO: 62626 - DNA, 25 bp, Saccharomyces pastorianus
ttgatatgggcctcctgcctcaaat

SEQ ID NO: 62627 - DNA, 25 bp, Saccharomyces pastorianus
ggaaccatttcgtctacagcatttt

SEQ ID NO: 62628 - DNA, 25 bp, Saccharomyces pastorianus
aaacccacaagaacgatcggcgcgt

SEQ ID NO: 62629 - DNA, 25 bp, Saccharomyces pastorianus
gccccgctgtatcccaaagagttaa

SEQ ID NO: 62630 - DNA, 25 bp, Saccharomyces pastorianus
gcgcaaggaacatacgctcatccgt

SEQ ID NO: 62631 - DNA, 25 bp, Saccharomyces pastorianus
ggcgaaggcattaaacttaccgcaa

SEQ ID NO: 62632 - DNA, 25 bp, Saccharomyces pastorianus
actctagcgaaagtctgcccggcgg

SEQ ID NO: 62633 - DNA, 25 bp, Saccharomyces pastorianus
agaatgcaatgtgctcccttggaca

SEQ ID NO: 62634 - DNA, 25 bp, Saccharomyces pastorianus
gggtatattcccatatgctgcatta

SEQ ID NO: 62635 - DNA, 25 bp, Saccharomyces pastorianus
ttggttgtactaccgatgggtgcat

SEQ ID NO: 62636 - DNA, 25 bp, Saccharomyces pastorianus
gggcttccgttgtgtatccaattaa

SEQ ID NO: 62637 - DNA, 25 bp, Saccharomyces pastorianus
ttcaaagggttggttcccactctag

SEQ ID NO: 62638 - DNA, 25 bp, Saccharomyces pastorianus
agaccaggtcacattgagcaatttg

SEQ ID NO: 62639 - DNA, 25 bp, Saccharomyces pastorianus
gcacaattttccgtatatcctgtag

SEQ ID NO: 62640 - DNA, 25 bp, Saccharomyces pastorianus
agacgtactagcgaagacacttgaa

SEQ ID NO: 62641 - DNA, 25 bp, Saccharomyces pastorianus
gacggcgaaggatatgttccgggaa

SEQ ID NO: 62642 - DNA, 25 bp, Saccharomyces pastorianus
tttcagacggcgaaggatatgttcc

SEQ ID NO: 62643 - DNA, 25 bp, Saccharomyces pastorianus
agacggcgaaggatatgttccggga

SEQ ID NO: 62644 - DNA, 25 bp, Saccharomyces pastorianus
ctgttatttcagacggcgaaggata

SEQ ID NO: 62645 - DNA, 25 bp, Saccharomyces pastorianus
tgttatttcagacggcgaaggatat

SEQ ID NO: 62646 - DNA, 25 bp, Saccharomyces pastorianus
ttcagacggcgaaggatatgttccg

SEQ ID NO: 62647 - DNA, 25 bp, Saccharomyces pastorianus
tcagacggcgaaggatatgttccgg

SEQ ID NO: 62648 - DNA, 25 bp, Saccharomyces pastorianus
acggcgaaggatatgttccgggaag

SEQ ID NO: 62649 - DNA, 25 bp, Saccharomyces pastorianus
cggcgaaggatatgttccgggaagg

SEQ ID NO: 62650 - DNA, 25 bp, Saccharomyces pastorianus
actgttatttcagacggcgaaggat

SEQ ID NO: 62651 - DNA, 25 bp, Saccharomyces pastorianus
atttcagacggcgaaggatatgttc

SEQ ID NO: 62652 - DNA, 25 bp, Saccharomyces pastorianus
attgaggcacaggattctgcttccc

SEQ ID NO: 62653 - DNA, 25 bp, Saccharomyces pastorianus
gttctagacttcataccgcgtattc

SEQ ID NO: 62654 - DNA, 25 bp, Saccharomyces pastorianus
gatcgtccgaagcaaccaactagtt

SEQ ID NO: 62655 - DNA, 25 bp, Saccharomyces pastorianus
atttcaaggacatgtaccgcaccat

SEQ ID NO: 62656 - DNA, 25 bp, Saccharomyces pastorianus
aataagatatcatcgcccttggcga

SEQ ID NO: 62657 - DNA, 25 bp, Saccharomyces pastorianus
ctgcttcccgcaacgatggtaacga

SEQ ID NO: 62658 - DNA, 25 bp, Saccharomyces pastorianus
gaacgtcatcaaggtgttccccgaa

SEQ ID NO: 62659 - DNA, 25 bp, Saccharomyces pastorianus
gagatttcttattgctgataccgag

SEQ ID NO: 62660 - DNA, 25 bp, Saccharomyces pastorianus
gtgttccccgaaagctcaattaagt

SEQ ID NO: 62661 - DNA, 25 bp, Saccharomyces pastorianus
actagttcagatccatacgttacat

SEQ ID NO: 62662 - DNA, 25 bp, Saccharomyces pastorianus
tgaaggctgccacgacacgaaagat

SEQ ID NO: 62663 - DNA, 25 bp, Saccharomyces pastorianus
aatctcagtgggttagacaagccat

SEQ ID NO: 62664 - DNA, 25 bp, Saccharomyces pastorianus
agtatgacctgtttattgttgacca

SEQ ID NO: 62665 - DNA, 25 bp, Saccharomyces pastorianus
acaagccatggaattgtccccacgg

SEQ ID NO: 62666 - DNA, 25 bp, Saccharomyces pastorianus
ttcgatcgatgtttgctatgcgggc

SEQ ID NO: 62667 - DNA, 25 bp, Saccharomyces pastorianus
aactgtaacagttttcaggtcacaa

SEQ ID NO: 62668 - DNA, 25 bp, Saccharomyces pastorianus
aaacttattataccacagccagtag

SEQ ID NO: 62669 - DNA, 25 bp, Saccharomyces pastorianus
agacatttgatggagttgcgtgatt

SEQ ID NO: 62670 - DNA, 25 bp, Saccharomyces pastorianus
tcaggtgctccaagattcgatcgat

SEQ ID NO: 62671 - DNA, 25 bp, Saccharomyces pastorianus
gttctagacaatcttcctgtttttg

SEQ ID NO: 62672 - DNA, 25 bp, Saccharomyces pastorianus
gtctaaagttgtccataatctcagt

SEQ ID NO: 62673 - DNA, 25 bp, Saccharomyces pastorianus
cacgggcgtcctacaatgagacatt

SEQ ID NO: 62674 - DNA, 25 bp, Saccharomyces pastorianus
ataaaatcaccgtgctctgtgtcgt

SEQ ID NO: 62675 - DNA, 25 bp, Saccharomyces pastorianus
gatcgttaaatactccaccgtggcc

SEQ ID NO: 62676 - DNA, 25 bp, Saccharomyces pastorianus
cgaaacctattcatccaacgactgg

SEQ ID NO: 62677 - DNA, 25 bp, Saccharomyces pastorianus
aagcattcaagttcaccaccaagag

SEQ ID NO: 62678 - DNA, 25 bp, Saccharomyces pastorianus
aagactcacatgtcgtggcagcgga

SEQ ID NO: 62679 - DNA, 25 bp, Saccharomyces pastorianus
gctagttttatcacaatgctcggtt

SEQ ID NO: 62680 - DNA, 25 bp, Saccharomyces pastorianus
gagctcgactattttctgcatacct

SEQ ID NO: 62681 - DNA, 25 bp, Saccharomyces pastorianus
gtgacggtcggcttttgccagtcaa

SEQ ID NO: 62682 - DNA, 25 bp, Saccharomyces pastorianus
tagttgtgtgctaacggccgtgtac

SEQ ID NO: 62683 - DNA, 25 bp, Saccharomyces pastorianus
tattgctctcgtctttatctccaga

SEQ ID NO: 62684 - DNA, 25 bp, Saccharomyces pastorianus
aagaggataccagcgcccgagaaga

SEQ ID NO: 62685 - DNA, 25 bp, Saccharomyces pastorianus
ggaactaacattgggcggttgccga

SEQ ID NO: 62686 - DNA, 25 bp, Saccharomyces pastorianus
aatgtgacggcccttgcatcgttat

SEQ ID NO: 62687 - DNA, 25 bp, Saccharomyces pastorianus
atcgcttcccgagacgtgagtcgat

SEQ ID NO: 62688 - DNA, 25 bp, Saccharomyces pastorianus
tgaatctaatgctcccctaacggcg

SEQ ID NO: 62689 - DNA, 25 bp, Saccharomyces pastorianus
gtacgtaccatatcaaggttcggca

SEQ ID NO: 62690 - DNA, 25 bp, Saccharomyces pastorianus
aacggtagcggcagcaacaaccaca

SEQ ID NO: 62691 - DNA, 25 bp, Saccharomyces pastorianus
gtggatccaatcacccgtatgaatc

SEQ ID NO: 62692 - DNA, 25 bp, Saccharomyces pastorianus
gcatcgttatctccgcaacagggaa

SEQ ID NO: 62693 - DNA, 25 bp, Saccharomyces pastorianus
aggttcggcaacacaaatgctgcag

SEQ ID NO: 62694 - DNA, 25 bp, Saccharomyces pastorianus
actggaatgaatcagcggcatcgct

SEQ ID NO: 62695 - DNA, 25 bp, Saccharomyces pastorianus
cagctctctcatagtaataccggca

SEQ ID NO: 62696 - DNA, 25 bp, Saccharomyces pastorianus
ataaaacctaaatctgttgctgtaa

SEQ ID NO: 62697 - DNA, 25 bp, Saccharomyces pastorianus
gtgtacctcccacaacagtaaagca

SEQ ID NO: 62698 - DNA, 25 bp, Saccharomyces pastorianus
catgacatcaccagccattgcacag

SEQ ID NO: 62699 - DNA, 25 bp, Saccharomyces pastorianus
gatttcatttcaagcagacaatact

SEQ ID NO: 62700 - DNA, 25 bp, Saccharomyces pastorianus
aaaggcatccaagtgtgttgaacaa

SEQ ID NO: 62701 - DNA, 25 bp, Saccharomyces pastorianus
gttgctgtaaaacagtcaccattaa

SEQ ID NO: 62702 - DNA, 25 bp, Saccharomyces pastorianus
aagcagaacgttttggctcgaccca

SEQ ID NO: 62703 - DNA, 25 bp, Saccharomyces pastorianus
ggaacataatatcaatcgacccaaa

SEQ ID NO: 62704 - DNA, 25 bp, Saccharomyces pastorianus
cacagggtgcccacgatagatacgt

SEQ ID NO: 62705 - DNA, 25 bp, Saccharomyces pastorianus
gttttggctcgacccatgacatcac

SEQ ID NO: 62706 - DNA, 25 bp, Saccharomyces pastorianus
gtcctaaacccaaacaacaagcagc

SEQ ID NO: 62707 - DNA, 25 bp, Saccharomyces pastorianus
aggtagaaagttcacgactttggct

SEQ ID NO: 62708 - DNA, 25 bp, Saccharomyces pastorianus
gccaagaaggtctccgctgcctctg

SEQ ID NO: 62709 - DNA, 25 bp, Saccharomyces pastorianus
cacgactttggctaaattatcctct

SEQ ID NO: 62710 - DNA, 25 bp, Saccharomyces pastorianus
gagagttgttgttcctcaagctttg

SEQ ID NO: 62711 - DNA, 25 bp, Saccharomyces pastorianus
agccaggtagaaagttcacgacttt

SEQ ID NO: 62712 - DNA, 25 bp, Saccharomyces pastorianus
ggctaaattatcctcttctgttggt

SEQ ID NO: 62713 - DNA, 25 bp, Saccharomyces pastorianus
ctacgctaagaagagagctttcgcc

SEQ ID NO: 62714 - DNA, 25 bp, Saccharomyces pastorianus
gttgttcctcaagctttgagagttt

SEQ ID NO: 62715 - DNA, 25 bp, Saccharomyces pastorianus
gtagaaagttcacgactttggctaa

SEQ ID NO: 62716 - DNA, 25 bp, Saccharomyces pastorianus
ctctgctgctgcttctgaatccgac

SEQ ID NO: 62717 - DNA, 25 bp, Saccharomyces pastorianus
gacgttgttgccaaattagaagaca

SEQ ID NO: 62718 - DNA, 25 bp, Saccharomyces pastorianus
aaggctaacggctcaattccacaag

SEQ ID NO: 62719 - DNA, 25 bp, Saccharomyces pastorianus
gaaatcaacatgttcagggtccgtt

SEQ ID NO: 62720 - DNA, 25 bp, Saccharomyces pastorianus
gggccatataactatcgtttggtga

SEQ ID NO: 62721 - DNA, 25 bp, Saccharomyces pastorianus
ggtgttttgctttaacttcttgatg

SEQ ID NO: 62722 - DNA, 25 bp, Saccharomyces pastorianus
tgggtggtaccttcacattcttatg

SEQ ID NO: 62723 - DNA, 25 bp, Saccharomyces pastorianus
atatccaaccaaatcatctacagcc

SEQ ID NO: 62724 - DNA, 25 bp, Saccharomyces pastorianus
gcataccttttgttcggctggagta

SEQ ID NO: 62725 - DNA, 25 bp, Saccharomyces pastorianus
tattgggttcctttttcacagggag

SEQ ID NO: 62726 - DNA, 25 bp, Saccharomyces pastorianus
aagcctcaatgactgtgggtggtac

SEQ ID NO: 62727 - DNA, 25 bp, Saccharomyces pastorianus
gactttgatgctgtcgtctatttca

SEQ ID NO: 62728 - DNA, 25 bp, Saccharomyces pastorianus
tcagggtccgtttagtatgtcttct

SEQ ID NO: 62729 - DNA, 25 bp, Saccharomyces pastorianus
tacgatggtcttgtagtggcaacta

SEQ ID NO: 62730 - DNA, 25 bp, Saccharomyces pastorianus
gaactggctcatactttatactctg

SEQ ID NO: 62731 - DNA, 25 bp, Saccharomyces pastorianus
gagaccttgttggaactggctcata

SEQ ID NO: 62732 - DNA, 25 bp, Saccharomyces pastorianus
gatttgaggtttttagcgccatcca

SEQ ID NO: 62733 - DNA, 25 bp, Saccharomyces pastorianus
aagttacatcccttaatgaccatga

SEQ ID NO: 62734 - DNA, 25 bp, Saccharomyces pastorianus
agcgccatccattttggaggtcaga

SEQ ID NO: 62735 - DNA, 25 bp, Saccharomyces pastorianus
cgatctcagaagctacggtggaagt

SEQ ID NO: 62736 - DNA, 25 bp, Saccharomyces pastorianus
gaagtcgagtctaccagtgctgcta

SEQ ID NO: 62737 - DNA, 25 bp, Saccharomyces pastorianus
ggtgtcacaaggttatacctgcccc

SEQ ID NO: 62738 - DNA, 25 bp, Saccharomyces pastorianus
gaaggttcatggttcaaggcctatt

SEQ ID NO: 62739 - DNA, 25 bp, Saccharomyces pastorianus
gtggataccttatgtggtgtcacaa

SEQ ID NO: 62740 - DNA, 25 bp, Saccharomyces pastorianus
ggtggcaactccaaagttcctggat

SEQ ID NO: 62741 - DNA, 25 bp, Saccharomyces pastorianus
cctgaagtcgttttccaaccaacat

SEQ ID NO: 62742 - DNA, 25 bp, Saccharomyces pastorianus
aaaatttggctctcaaccaggcaaa

SEQ ID NO: 62743 - DNA, 25 bp, Saccharomyces pastorianus
gaacatgtcttctgatccttcatta

SEQ ID NO: 62744 - DNA, 25 bp, Saccharomyces pastorianus
aagttccacttctctagacatggtg

SEQ ID NO: 62745 - DNA, 25 bp, Saccharomyces pastorianus
gaggtcctaggcctcacgatagtga

SEQ ID NO: 62746 - DNA, 25 bp, Saccharomyces pastorianus
cttcatctgtttttgagaggtccta

SEQ ID NO: 62747 - DNA, 25 bp, Saccharomyces pastorianus
gagcatgacccaaacttcactgaag

SEQ ID NO: 62748 - DNA, 25 bp, Saccharomyces pastorianus
ccgttggtaccaatttctcagtgaa

SEQ ID NO: 62749 - DNA, 25 bp, Saccharomyces pastorianus
agagttcactgaatttcttcccgtt

SEQ ID NO: 62750 - DNA, 25 bp, Saccharomyces pastorianus
gaatggcagctttggcacaggacaa

SEQ ID NO: 62751 - DNA, 25 bp, Saccharomyces pastorianus
gaactacttgatatcgcagacgaaa

SEQ ID NO: 62752 - DNA, 25 bp, Saccharomyces pastorianus
gcagcaatggcgtcaaacggatcta

SEQ ID NO: 62753 - DNA, 25 bp, Saccharomyces pastorianus
aaaacgctggttttgatgacgaacg

SEQ ID NO: 62754 - DNA, 25 bp, Saccharomyces pastorianus
gacgaaaacctgactgaagaccaaa

SEQ ID NO: 62755 - DNA, 25 bp, Saccharomyces pastorianus
acgtttacaagaacaggcacgattg

SEQ ID NO: 62756 - DNA, 25 bp, Saccharomyces pastorianus
gaaggccagtcaggatgctagacat

SEQ ID NO: 62757 - DNA, 25 bp, Saccharomyces pastorianus
gtggaagcgcctttcacggagattc

SEQ ID NO: 62758 - DNA, 25 bp, Saccharomyces pastorianus
gggatcagctaattgacgaacctaa

SEQ ID NO: 62759 - DNA, 25 bp, Saccharomyces pastorianus
gaattgcgaattcaagccgaaaaga

SEQ ID NO: 62760 - DNA, 25 bp, Saccharomyces pastorianus
tactgtcggtcctacaaaacgctgg

SEQ ID NO: 62761 - DNA, 25 bp, Saccharomyces pastorianus
cacggagattcttcagcctcaaaag

SEQ ID NO: 62762 - DNA, 25 bp, Saccharomyces pastorianus
aatttggctacgacatcagcgccgg

SEQ ID NO: 62763 - DNA, 25 bp, Saccharomyces pastorianus
tctaagttacttcgccaaggactac

SEQ ID NO: 62764 - DNA, 25 bp, Saccharomyces pastorianus
aagtcaaggccaaggtctccgactc

SEQ ID NO: 62765 - DNA, 25 bp, Saccharomyces pastorianus
ttacgccatggctctaagttacttc

SEQ ID NO: 62766 - DNA, 25 bp, Saccharomyces pastorianus
agcaattgttgagaccaggtgttac

SEQ ID NO: 62767 - DNA, 25 bp, Saccharomyces pastorianus
gtcaacgccttcctacaagtcggtg

SEQ ID NO: 62768 - DNA, 25 bp, Saccharomyces pastorianus
aagtcggtgccaaagccaccatgaa

SEQ ID NO: 62769 - DNA, 25 bp, Saccharomyces pastorianus
gactccggtatcgttactttggctt

SEQ ID NO: 62770 - DNA, 25 bp, Saccharomyces pastorianus
gcaagctgcctaacgccaatgtcaa

SEQ ID NO: 62771 - DNA, 25 bp, Saccharomyces pastorianus
ataaccactgttgatttcttccaaa

SEQ ID NO: 62772 - DNA, 25 bp, Saccharomyces pastorianus
tgttactttgggtgttggttcctct

SEQ ID NO: 62773 - DNA, 25 bp, Saccharomyces pastorianus
cactgatgtggaggccaagctgaac

SEQ ID NO: 62774 - DNA, 25 bp, Saccharomyces pastorianus
attgaaggccaaacagccggtcaag

SEQ ID NO: 62775 - DNA, 25 bp, Saccharomyces pastorianus
gacggtccattgtccactgatgtgg

SEQ ID NO: 62776 - DNA, 25 bp, Saccharomyces pastorianus
aaccacaacttccaacggcatcaag

SEQ ID NO: 62777 - DNA, 25 bp, Saccharomyces pastorianus
ggcatcaagtttgcattgaaggcca

SEQ ID NO: 62778 - DNA, 25 bp, Saccharomyces pastorianus
gcatttgacgtacaaaccacaactt

SEQ ID NO: 62779 - DNA, 25 bp, Saccharomyces pastorianus
accccagcagcatttgacgtacaaa

SEQ ID NO: 62780 - DNA, 25 bp, Saccharomyces pastorianus
taaacaaggacttctaccatgccac

SEQ ID NO: 62781 - DNA, 25 bp, Saccharomyces pastorianus
agctgaacgataagcaaactggttt

SEQ ID NO: 62782 - DNA, 25 bp, Saccharomyces pastorianus
caaacagccggtcaaggacggtcca

SEQ ID NO: 62783 - DNA, 25 bp, Saccharomyces pastorianus
tgggtttgacccaaggctggtctaa

SEQ ID NO: 62784 - DNA, 25 bp, Saccharomyces pastorianus
agtcctactcttctgtttcatacag

SEQ ID NO: 62785 - DNA, 25 bp, Saccharomyces pastorianus
aaatgacagctccatcaactcttcg

SEQ ID NO: 62786 - DNA, 25 bp, Saccharomyces pastorianus
gaagtttccccatgctaatgaaccc

SEQ ID NO: 62787 - DNA, 25 bp, Saccharomyces pastorianus
taatgaacccatcgtcgtcgccaaa

SEQ ID NO: 62788 - DNA, 25 bp, Saccharomyces pastorianus
tagacccctccgttgatagcgagtc

SEQ ID NO: 62789 - DNA, 25 bp, Saccharomyces pastorianus
gtggcgtatcaagatcagcatcatt

SEQ ID NO: 62790 - DNA, 25 bp, Saccharomyces pastorianus
ctgaccctgaatgatgcctacaaca

SEQ ID NO: 62791 - DNA, 25 bp, Saccharomyces pastorianus
gagaggctattcgtatgcaacccga

SEQ ID NO: 62792 - DNA, 25 bp, Saccharomyces pastorianus
atgcgatattatggcctgaccctga

SEQ ID NO: 62793 - DNA, 25 bp, Saccharomyces pastorianus
aactcttcggaggtcacgccaagaa

SEQ ID NO: 62794 - DNA, 25 bp, Saccharomyces pastorianus
atgggactcatctttcaactcatgg

SEQ ID NO: 62795 - DNA, 25 bp, Saccharomyces pastorianus
agcatatacgaaactgccctaggta

SEQ ID NO: 62796 - DNA, 25 bp, Saccharomyces pastorianus
gacatagcaacacttcatccgttaa

SEQ ID NO: 62797 - DNA, 25 bp, Saccharomyces pastorianus
aagccggacagtttctccaaacttg

SEQ ID NO: 62798 - DNA, 25 bp, Saccharomyces pastorianus
gacgcctttgaatctgtccatgaag

SEQ ID NO: 62799 - DNA, 25 bp, Saccharomyces pastorianus
gccggcatcatcattctcagaaaaa

SEQ ID NO: 62800 - DNA, 25 bp, Saccharomyces pastorianus
ggagcgaggcttccatatacacact

SEQ ID NO: 62801 - DNA, 25 bp, Saccharomyces pastorianus
gacatctatggcgacatccatcggg

SEQ ID NO: 62802 - DNA, 25 bp, Saccharomyces pastorianus
gagttcattcgctatccgtgaagac

SEQ ID NO: 62803 - DNA, 25 bp, Saccharomyces pastorianus
accatttccggattagaagcctcta

SEQ ID NO: 62804 - DNA, 25 bp, Saccharomyces pastorianus
aaatcaccgcgttctttgcaaaata

SEQ ID NO: 62805 - DNA, 25 bp, Saccharomyces pastorianus
gatccaggttcagtaaagttcccat

SEQ ID NO: 62806 - DNA, 25 bp, Saccharomyces pastorianus
cagcatatgggtaaatcctgcgata

SEQ ID NO: 62807 - DNA, 25 bp, Saccharomyces pastorianus
ctctatcagagggttttccgaaaca

SEQ ID NO: 62808 - DNA, 25 bp, Saccharomyces pastorianus
aaatcaggctctggcacaccaagag

SEQ ID NO: 62809 - DNA, 25 bp, Saccharomyces pastorianus
acattcctgtccttacaagtgtcaa

SEQ ID NO: 62810 - DNA, 25 bp, Saccharomyces pastorianus
gcacctaggccatcttttatcagaa

SEQ ID NO: 62811 - DNA, 25 bp, Saccharomyces pastorianus
atctcagctagtccgttcattattt

SEQ ID NO: 62812 - DNA, 25 bp, Saccharomyces pastorianus
gagagctggtaacattcctgtcctt

SEQ ID NO: 62813 - DNA, 25 bp, Saccharomyces pastorianus
ttctttccaacgtcacaacaagctc

SEQ ID NO: 62814 - DNA, 25 bp, Saccharomyces pastorianus
aattgataataccaccacagccgca

SEQ ID NO: 62815 - DNA, 25 bp, Saccharomyces pastorianus
aatctcggtcaacagaggtggccct

SEQ ID NO: 62816 - DNA, 25 bp, Saccharomyces pastorianus
ggccctgtaggtaagtcactgctca

SEQ ID NO: 62817 - DNA, 25 bp, Saccharomyces pastorianus
gaaagtttcattgaaggagcctgag

SEQ ID NO: 62818 - DNA, 25 bp, Saccharomyces pastorianus
gaacacaatttggagatcgcatcac

SEQ ID NO: 62819 - DNA, 25 bp, Saccharomyces pastorianus
gaggatgatctacgagtacttcata

SEQ ID NO: 62820 - DNA, 25 bp, Saccharomyces pastorianus
gaaggccaggccagaaacaacgtgt

SEQ ID NO: 62821 - DNA, 25 bp, Saccharomyces pastorianus
aactattctgaggttcaaaggcaac

SEQ ID NO: 62822 - DNA, 25 bp, Saccharomyces pastorianus
taaatggtcgtactgccaaggtaaa

SEQ ID NO: 62823 - DNA, 25 bp, Saccharomyces pastorianus
ggcaacaatttctacagagcgctat

SEQ ID NO: 62824 - DNA, 25 bp, Saccharomyces pastorianus
agagcgctatagattacgatacgat

SEQ ID NO: 62825 - DNA, 25 bp, Saccharomyces pastorianus
gatcgcatcacagcagcaaagggat

SEQ ID NO: 62826 - DNA, 25 bp, Saccharomyces pastorianus
gaaatgattgaccaagaaaggccta

SEQ ID NO: 62827 - DNA, 25 bp, Saccharomyces pastorianus
attactttgcaaactattctgaggt

SEQ ID NO: 62828 - DNA, 25 bp, Saccharomyces pastorianus
aggcgaaatcagactccgaccaagg

SEQ ID NO: 62829 - DNA, 25 bp, Saccharomyces pastorianus
gtgcaccgtaactgaacattccaaa

SEQ ID NO: 62830 - DNA, 25 bp, Saccharomyces pastorianus
gtcccgctaatgtctataccactag

SEQ ID NO: 62831 - DNA, 25 bp, Saccharomyces pastorianus
gacgtgagtagtagtttccccatga

SEQ ID NO: 62832 - DNA, 25 bp, Saccharomyces pastorianus
agataggcacaagttttccgtcccg

SEQ ID NO: 62833 - DNA, 25 bp, Saccharomyces pastorianus
attcatactccggacgaattccaac

SEQ ID NO: 62834 - DNA, 25 bp, Saccharomyces pastorianus
catgaactccatccctagattagac

SEQ ID NO: 62835 - DNA, 25 bp, Saccharomyces pastorianus
ggatgaccaacacacgagacctgat

SEQ ID NO: 62836 - DNA, 25 bp, Saccharomyces pastorianus
agcctacccaactacgatgacaaat

SEQ ID NO: 62837 - DNA, 25 bp, Saccharomyces pastorianus
caacgggttgatacacagaggccat

SEQ ID NO: 62838 - DNA, 25 bp, Saccharomyces pastorianus
tactcgcgtgggttttacgttctca

SEQ ID NO: 62839 - DNA, 25 bp, Saccharomyces pastorianus
tatggactcagggactgccaaccgg

SEQ ID NO: 62840 - DNA, 25 bp, Saccharomyces pastorianus
agtagtccaatctgcggtccaatgc

SEQ ID NO: 62841 - DNA, 25 bp, Saccharomyces pastorianus
atgccgaataccaggccattacgtg

SEQ ID NO: 62842 - DNA, 25 bp, Saccharomyces pastorianus
agagctttggccagttgctcgcaaa

SEQ ID NO: 62843 - DNA, 25 bp, Saccharomyces pastorianus
aagcccttggtagtcgtgttggcca

SEQ ID NO: 62844 - DNA, 25 bp, Saccharomyces pastorianus
gaaggaaaccccagtctccagtagt

SEQ ID NO: 62845 - DNA, 25 bp, Saccharomyces pastorianus
tgggtggacattccctgtgtagcac

SEQ ID NO: 62846 - DNA, 25 bp, Saccharomyces pastorianus
gaagctggttgccatctggtttatt

SEQ ID NO: 62847 - DNA, 25 bp, Saccharomyces pastorianus
aatagcgtagcatcgccagcggtat

SEQ ID NO: 62848 - DNA, 25 bp, Saccharomyces pastorianus
cggctgcggaagctgctacacagaa

SEQ ID NO: 62849 - DNA, 25 bp, Saccharomyces pastorianus
tacgatatcaacaccaagcccttgg

SEQ ID NO: 62850 - DNA, 25 bp, Saccharomyces pastorianus
gctgacaatgtctaccaattggctg

SEQ ID NO: 62851 - DNA, 25 bp, Saccharomyces pastorianus
aaagcctcacttcattaccgcatta

SEQ ID NO: 62852 - DNA, 25 bp, Saccharomyces pastorianus
attccaaatctttgccaggctacaa

SEQ ID NO: 62853 - DNA, 25 bp, Saccharomyces pastorianus
gctcttgccactttcgacaaattta

SEQ ID NO: 62854 - DNA, 25 bp, Saccharomyces pastorianus
gaattcagcgccatcgacattaaag

SEQ ID NO: 62855 - DNA, 25 bp, Saccharomyces pastorianus
gatttcaactcgaaccaattggtct

SEQ ID NO: 62856 - DNA, 25 bp, Saccharomyces pastorianus
caaaggatttcgattgggccaaggc

SEQ ID NO: 62857 - DNA, 25 bp, Saccharomyces pastorianus
tggcatccaaggttctgttagacat

SEQ ID NO: 62858 - DNA, 25 bp, Saccharomyces pastorianus
aatggtcactccacggaaaagccaa

SEQ ID NO: 62859 - DNA, 25 bp, Saccharomyces pastorianus
aatttggctgactggttgggcaccg

SEQ ID NO: 62860 - DNA, 25 bp, Saccharomyces pastorianus
ttggatgctgtcgactgggaaactt

SEQ ID NO: 62861 - DNA, 25 bp, Saccharomyces pastorianus
gtgctcacttcggttgcaaggaaat

SEQ ID NO: 62862 - DNA, 25 bp, Saccharomyces pastorianus
tgctcacttcggttgcaaggaaatc

SEQ ID NO: 62863 - DNA, 25 bp, Saccharomyces pastorianus
atcactatacaccagtgctcacttc

SEQ ID NO: 62864 - DNA, 25 bp, Saccharomyces pastorianus
acaccagtgctcacttcggttgcaa

SEQ ID NO: 62865 - DNA, 25 bp, Saccharomyces pastorianus
tatacaccagtgctcacttcggttg

SEQ ID NO: 62866 - DNA, 25 bp, Saccharomyces pastorianus
ctcacttcggttgcaaggaaatctt

SEQ ID NO: 62867 - DNA, 25 bp, Saccharomyces pastorianus
actatacaccagtgctcacttcggt

SEQ ID NO: 62868 - DNA, 25 bp, Saccharomyces pastorianus
acttcggttgcaaggaaatcttact

SEQ ID NO: 62869 - DNA, 25 bp, Saccharomyces pastorianus
accagtgctcacttcggttgcaagg

SEQ ID NO: 62870 - DNA, 25 bp, Saccharomyces pastorianus
cagtgctcacttcggttgcaaggaa

SEQ ID NO: 62871 - DNA, 25 bp, Saccharomyces pastorianus
gtatcactatacaccagtgctcact

SEQ ID NO: 62872 - DNA, 25 bp, Saccharomyces pastorianus
atttattactactcttcgtcatcgc

SEQ ID NO: 62873 - DNA, 25 bp, Saccharomyces pastorianus
aatggcgaagacctggtgactccct

SEQ ID NO: 62874 - DNA, 25 bp, Saccharomyces pastorianus
tgactccctttggttctttcaaaag

SEQ ID NO: 62875 - DNA, 25 bp, Saccharomyces pastorianus
acaccggtttgatttgtgtggccgt

SEQ ID NO: 62876 - DNA, 25 bp, Saccharomyces pastorianus
aagcgagttccattcgtttcagtct

SEQ ID NO: 62877 - DNA, 25 bp, Saccharomyces pastorianus
agtgttttcggacatgcttccctga

SEQ ID NO: 62878 - DNA, 25 bp, Saccharomyces pastorianus
gtcatcgctctggtcatatttggta

SEQ ID NO: 62879 - DNA, 25 bp, Saccharomyces pastorianus
gtttcagtctaaactagcctctctt

SEQ ID NO: 62880 - DNA, 25 bp, Saccharomyces pastorianus
atccagagtggcttacaacctaaaa

SEQ ID NO: 62881 - DNA, 25 bp, Saccharomyces pastorianus
gtgtggccgtaccaataggtttctt

SEQ ID NO: 62882 - DNA, 25 bp, Saccharomyces pastorianus
aagcaatcaactatacaccggtttg

SEQ ID NO: 62883 - DNA, 25 bp, Saccharomyces pastorianus
caatctctcgcttccaataggcaaa

SEQ ID NO: 62884 - DNA, 25 bp, Saccharomyces pastorianus
gaaggaacgaccaactctaccgcaa

SEQ ID NO: 62885 - DNA, 25 bp, Saccharomyces pastorianus
aggaggaagacgtcgccacacgtat

SEQ ID NO: 62886 - DNA, 25 bp, Saccharomyces pastorianus
gtacaaggccacaagaatctccgtt

SEQ ID NO: 62887 - DNA, 25 bp, Saccharomyces pastorianus
aagaccctcagacaagcagttctca

SEQ ID NO: 62888 - DNA, 25 bp, Saccharomyces pastorianus
gcgaactgcgcgatgacttggatga

SEQ ID NO: 62889 - DNA, 25 bp, Saccharomyces pastorianus
agccaaccgaagctcgtgcgaagga

SEQ ID NO: 62890 - DNA, 25 bp, Saccharomyces pastorianus
acgtatccctctaggtacaaggcca

SEQ ID NO: 62891 - DNA, 25 bp, Saccharomyces pastorianus
cagttctcaccctctactaaggaaa

SEQ ID NO: 62892 - DNA, 25 bp, Saccharomyces pastorianus
atacgcttcaacacatcggtgacat

SEQ ID NO: 62893 - DNA, 25 bp, Saccharomyces pastorianus
agatccacgtcctcgttcggagtaa

SEQ ID NO: 62894 - DNA, 25 bp, Saccharomyces pastorianus
tctgctggagattatattcgggacc

SEQ ID NO: 62895 - DNA, 25 bp, Saccharomyces pastorianus
gaacaagtctctgctggagattata

SEQ ID NO: 62896 - DNA, 25 bp, Saccharomyces pastorianus
cagccagccagaaaagagtagcgat

SEQ ID NO: 62897 - DNA, 25 bp, Saccharomyces pastorianus
tgtaagaacaagtctctgctggaga

SEQ ID NO: 62898 - DNA, 25 bp, Saccharomyces pastorianus
gaaaagagtagcgatagcaatcata

SEQ ID NO: 62899 - DNA, 25 bp, Saccharomyces pastorianus
tggagattatattcgggaccaatgt

SEQ ID NO: 62900 - DNA, 25 bp, Saccharomyces pastorianus
aagtctctgctggagattatattcg

SEQ ID NO: 62901 - DNA, 25 bp, Saccharomyces pastorianus
gtcacagccagccagaaaagagtag

SEQ ID NO: 62902 - DNA, 25 bp, Saccharomyces pastorianus
gcctgtaagaacaagtctctgctgg

SEQ ID NO: 62903 - DNA, 25 bp, Saccharomyces pastorianus
aatgcctgtaagaacaagtctctgc

SEQ ID NO: 62904 - DNA, 25 bp, Saccharomyces pastorianus
gatagcaatcataataatgcctgta

SEQ ID NO: 62905 - DNA, 25 bp, Saccharomyces pastorianus
gaattcggtacattagaactcttgt

SEQ ID NO: 62906 - DNA, 25 bp, Saccharomyces pastorianus
caaatgctgaattggctgccctaac

SEQ ID NO: 62907 - DNA, 25 bp, Saccharomyces pastorianus
aagcctacgagatcattttatgtgg

SEQ ID NO: 62908 - DNA, 25 bp, Saccharomyces pastorianus
aaatttcttctttggctagcaagct

SEQ ID NO: 62909 - DNA, 25 bp, Saccharomyces pastorianus
ttatgaaaggcaaaccaatacgggt

SEQ ID NO: 62910 - DNA, 25 bp, Saccharomyces pastorianus
gctgggttcaatgctacaaaacctg

SEQ ID NO: 62911 - DNA, 25 bp, Saccharomyces pastorianus
ctgaatctggtgagaaaatttcttc

SEQ ID NO: 62912 - DNA, 25 bp, Saccharomyces pastorianus
gaactcttgttgcaaatttttaagg

SEQ ID NO: 62913 - DNA, 25 bp, Saccharomyces pastorianus
tctttggctagcaagctgggttcaa

SEQ ID NO: 62914 - DNA, 25 bp, Saccharomyces pastorianus
ggaatttgaagcctacgagatcatt

SEQ ID NO: 62915 - DNA, 25 bp, Saccharomyces pastorianus
ggtaaaatcacgtccatttcaaatg

SEQ ID NO: 62916 - DNA, 25 bp, Saccharomyces pastorianus
agcgattgtgcgtaatgcatccaaa

SEQ ID NO: 62917 - DNA, 25 bp, Saccharomyces pastorianus
gacagaatcattgacgttgtgatta

SEQ ID NO: 62918 - DNA, 25 bp, Saccharomyces pastorianus
cgaaggctttttgaacgagtggagt

SEQ ID NO: 62919 - DNA, 25 bp, Saccharomyces pastorianus
tcgtggattccaagtaatattttac

SEQ ID NO: 62920 - DNA, 25 bp, Saccharomyces pastorianus
gaagggttttatcgtggattccaag

SEQ ID NO: 62921 - DNA, 25 bp, Saccharomyces pastorianus
cgattttcaaaggaactgggctaca

SEQ ID NO: 62922 - DNA, 25 bp, Saccharomyces pastorianus
ggaactgggctacaattgtccaaag

SEQ ID NO: 62923 - DNA, 25 bp, Saccharomyces pastorianus
ttgtccaaagtgaacgggatagttg

SEQ ID NO: 62924 - DNA, 25 bp, Saccharomyces pastorianus
tgtttgtgagagaaccaagtgtgga

SEQ ID NO: 62925 - DNA, 25 bp, Saccharomyces pastorianus
gtgtggagacggtaacgattttcaa

SEQ ID NO: 62926 - DNA, 25 bp, Saccharomyces pastorianus
aatattttaccttgcagcgattgtg

SEQ ID NO: 62927 - DNA, 25 bp, Saccharomyces pastorianus
attacttgtcccattgcaacgtcaa

SEQ ID NO: 62928 - DNA, 25 bp, Saccharomyces pastorianus
gccaccgtgcaaactgcggtacaga

SEQ ID NO: 62929 - DNA, 25 bp, Saccharomyces pastorianus
caacgtcaagagacagtttggcaga

SEQ ID NO: 62930 - DNA, 25 bp, Saccharomyces pastorianus
gtaccatgaacagtcgcaaaaccta

SEQ ID NO: 62931 - DNA, 25 bp, Saccharomyces pastorianus
gaacagtcgcaaaacctagtacatt

SEQ ID NO: 62932 - DNA, 25 bp, Saccharomyces pastorianus
actgcggtacagaatggccaattgc

SEQ ID NO: 62933 - DNA, 25 bp, Saccharomyces pastorianus
agtgtacggtctgctgtacaacgta

SEQ ID NO: 62934 - DNA, 25 bp, Saccharomyces pastorianus
atggccaattgcaagtgtacggtct

SEQ ID NO: 62935 - DNA, 25 bp, Saccharomyces pastorianus
gagaagtctcattacttgtcccatt

SEQ ID NO: 62936 - DNA, 25 bp, Saccharomyces pastorianus
gtacatttggaaacagagcgcgaga

SEQ ID NO: 62937 - DNA, 25 bp, Saccharomyces pastorianus
agaattatcgaaaacgccaccgtgc

SEQ ID NO: 62938 - DNA, 25 bp, Saccharomyces pastorianus
atcataatggtaagggcagtcccct

SEQ ID NO: 62939 - DNA, 25 bp, Saccharomyces pastorianus
atgaacattgttcaaccaaccttgt

SEQ ID NO: 62940 - DNA, 25 bp, Saccharomyces pastorianus
gacgctaacgtcaagtgggcttccc

SEQ ID NO: 62941 - DNA, 25 bp, Saccharomyces pastorianus
tgttcaaccaaccttgttcccggat

SEQ ID NO: 62942 - DNA, 25 bp, Saccharomyces pastorianus
tatcgactcctcttcaatcttcaca

SEQ ID NO: 62943 - DNA, 25 bp, Saccharomyces pastorianus
ttcaatcttcacactgagccacgac

SEQ ID NO: 62944 - DNA, 25 bp, Saccharomyces pastorianus
tcaagtgggcttcccagatgaacat

SEQ ID NO: 62945 - DNA, 25 bp, Saccharomyces pastorianus
tacaagacattttggacgctaacgt

SEQ ID NO: 62946 - DNA, 25 bp, Saccharomyces pastorianus
accttgttcccggatcataatggta

SEQ ID NO: 62947 - DNA, 25 bp, Saccharomyces pastorianus
atgagcgctatcgactcctcttcaa

SEQ ID NO: 62948 - DNA, 25 bp, Saccharomyces pastorianus
tgagccacgactcaaatctacaaga

SEQ ID NO: 62949 - DNA, 25 bp, Saccharomyces pastorianus
tagtagacgtctatcctggctttat

SEQ ID NO: 62950 - DNA, 25 bp, Saccharomyces pastorianus
gccacagcctttatactttggtgat

SEQ ID NO: 62951 - DNA, 25 bp, Saccharomyces pastorianus
aagaagccccaacaagcctagagga

SEQ ID NO: 62952 - DNA, 25 bp, Saccharomyces pastorianus
tggagttgtaatcccacatgcacat

SEQ ID NO: 62953 - DNA, 25 bp, Saccharomyces pastorianus
tcctgcggatggctatctccaaaga

SEQ ID NO: 62954 - DNA, 25 bp, Saccharomyces pastorianus
tgacgagttgaaagagccacagcct

SEQ ID NO: 62955 - DNA, 25 bp, Saccharomyces pastorianus
tcaagtcatcaactacgcgtcgatc

SEQ ID NO: 62956 - DNA, 25 bp, Saccharomyces pastorianus
gagggatgtccttgtatcagcacaa

SEQ ID NO: 62957 - DNA, 25 bp, Saccharomyces pastorianus
tacaccggaaagcttctgggattat

SEQ ID NO: 62958 - DNA, 25 bp, Saccharomyces pastorianus
tggctttatcgctaccggcaaaact

SEQ ID NO: 62959 - DNA, 25 bp, Saccharomyces pastorianus
gctacgcctgttaccattcaaagat

SEQ ID NO: 62960 - DNA, 25 bp, Saccharomyces pastorianus
atacggactccgtgagcagtttggg

SEQ ID NO: 62961 - DNA, 25 bp, Saccharomyces pastorianus
ttgttggcgaacatcccgtcaggaa

SEQ ID NO: 62962 - DNA, 25 bp, Saccharomyces pastorianus
cgcccattttggagactatacggta

SEQ ID NO: 62963 - DNA, 25 bp, Saccharomyces pastorianus
tgtttgctttggatacggactccgt

SEQ ID NO: 62964 - DNA, 25 bp, Saccharomyces pastorianus
atcccgtcaggaatgtccatggtaa

SEQ ID NO: 62965 - DNA, 25 bp, Saccharomyces pastorianus
gaactatacgcccattttggagact

SEQ ID NO: 62966 - DNA, 25 bp, Saccharomyces pastorianus
gaagctggcgtcagccatcaacaga

SEQ ID NO: 62967 - DNA, 25 bp, Saccharomyces pastorianus
gaaaagcacggtttcgtggtcccat

SEQ ID NO: 62968 - DNA, 25 bp, Saccharomyces pastorianus
ctatacggtagaggttctcggcggt

SEQ ID NO: 62969 - DNA, 25 bp, Saccharomyces pastorianus
gagggaccgacccaacgaaacactg

SEQ ID NO: 62970 - DNA, 25 bp, Saccharomyces pastorianus
ttctcggcggtgtcatgaagctggc

SEQ ID NO: 62971 - DNA, 25 bp, Saccharomyces pastorianus
gtctggattgctggtgaactgttat

SEQ ID NO: 62972 - DNA, 25 bp, Saccharomyces pastorianus
ggctgccgattgtgtgtacctagaa

SEQ ID NO: 62973 - DNA, 25 bp, Saccharomyces pastorianus
atatccccacccgtaatcttaatgg

SEQ ID NO: 62974 - DNA, 25 bp, Saccharomyces pastorianus
ataacgttgatctggttctggctgc

SEQ ID NO: 62975 - DNA, 25 bp, Saccharomyces pastorianus
gcttgacctcactaactgtatatcc

SEQ ID NO: 62976 - DNA, 25 bp, Saccharomyces pastorianus
aactgggtagcggtactggtctagt

SEQ ID NO: 62977 - DNA, 25 bp, Saccharomyces pastorianus
taaagtccagtatgaggttctcgca

SEQ ID NO: 62978 - DNA, 25 bp, Saccharomyces pastorianus
atcagcggatttttcacctcaggaa

SEQ ID NO: 62979 - DNA, 25 bp, Saccharomyces pastorianus
agcagaaaacccacttgttccaact

SEQ ID NO: 62980 - DNA, 25 bp, Saccharomyces pastorianus
actggtctagttggattatgcgtgg

SEQ ID NO: 62981 - DNA, 25 bp, Saccharomyces pastorianus
tagagagaacgctgcttgacctcac

SEQ ID NO: 62982 - DNA, 25 bp, Saccharomyces pastorianus
gaatttcaagcacgtaccacagcga

SEQ ID NO: 62983 - DNA, 25 bp, Saccharomyces pastorianus
atttccctgcgctcgattgatgaag

SEQ ID NO: 62984 - DNA, 25 bp, Saccharomyces pastorianus
ctcctcagcgtcattttattcgtga

SEQ ID NO: 62985 - DNA, 25 bp, Saccharomyces pastorianus
ggcagaagctttcccactatttgaa

SEQ ID NO: 62986 - DNA, 25 bp, Saccharomyces pastorianus
ggagcttttggttggtcatttcgac

SEQ ID NO: 62987 - DNA, 25 bp, Saccharomyces pastorianus
aagaggttttcttggccgattctat

SEQ ID NO: 62988 - DNA, 25 bp, Saccharomyces pastorianus
aagactgcgctggtgtaccctgaaa

SEQ ID NO: 62989 - DNA, 25 bp, Saccharomyces pastorianus
gagaagactagattccccagtagct

SEQ ID NO: 62990 - DNA, 25 bp, Saccharomyces pastorianus
acggatttttagttcacagcctggt

SEQ ID NO: 62991 - DNA, 25 bp, Saccharomyces pastorianus
acactgaacgcgacatggagctttt

SEQ ID NO: 62992 - DNA, 25 bp, Saccharomyces pastorianus
gtaggccgattttatcactggcaga

SEQ ID NO: 62993 - DNA, 25 bp, Saccharomyces pastorianus
tagcttgtccaccatgtacggagac

SEQ ID NO: 62994 - DNA, 25 bp, Saccharomyces pastorianus
acgatttagtttgtccgtgtggcaa

SEQ ID NO: 62995 - DNA, 25 bp, Saccharomyces pastorianus
gtgggaaaccattgtccggctgtca

SEQ ID NO: 62996 - DNA, 25 bp, Saccharomyces pastorianus
gtaatctaactctatcctgtggaag

SEQ ID NO: 62997 - DNA, 25 bp, Saccharomyces pastorianus
tccggctgtcatcatacttgtcaaa

SEQ ID NO: 62998 - DNA, 25 bp, Saccharomyces pastorianus
atcccggaaaatgctcaccttgttt

SEQ ID NO: 62999 - DNA, 25 bp, Saccharomyces pastorianus
atacctgtcatcctttagacctagc

SEQ ID NO: 63000 - DNA, 25 bp, Saccharomyces pastorianus
accttgcgccgcactagtgaaaatt

SEQ ID NO: 63001 - DNA, 25 bp, Saccharomyces pastorianus
aagctaccactatgtaaccacgcat

SEQ ID NO: 63002 - DNA, 25 bp, Saccharomyces pastorianus
taagagtgaatgtcccgatttacct

SEQ ID NO: 63003 - DNA, 25 bp, Saccharomyces pastorianus
atgccccaaaccttgtcatggtaag

SEQ ID NO: 63004 - DNA, 25 bp, Saccharomyces pastorianus
cactcgtcctgttgtgatagggtgt

SEQ ID NO: 63005 - DNA, 25 bp, Saccharomyces pastorianus
tgtatctaatacttcgacgttcaaa

SEQ ID NO: 63006 - DNA, 25 bp, Saccharomyces pastorianus
ggaccatttgtacctcgtagacggc

SEQ ID NO: 63007 - DNA, 25 bp, Saccharomyces pastorianus
aagaccaggccgtgattcgtttttg

SEQ ID NO: 63008 - DNA, 25 bp, Saccharomyces pastorianus
gaaaacatccctctcaggacattga

SEQ ID NO: 63009 - DNA, 25 bp, Saccharomyces pastorianus
gacgttatctttgtcctggattcta

SEQ ID NO: 63010 - DNA, 25 bp, Saccharomyces pastorianus
cattcattaccagttccccaaaaat

SEQ ID NO: 63011 - DNA, 25 bp, Saccharomyces pastorianus
gtgtttagcagtgactacgaccttc

SEQ ID NO: 63012 - DNA, 25 bp, Saccharomyces pastorianus
agctcagatatcgataactacccaa

SEQ ID NO: 63013 - DNA, 25 bp, Saccharomyces pastorianus
atataaaaagcctcactcgtcctgt

SEQ ID NO: 63014 - DNA, 25 bp, Saccharomyces pastorianus
cagactatgccgtgtaccagcctaa

SEQ ID NO: 63015 - DNA, 25 bp, Saccharomyces pastorianus
catcgtgattttagtactgttgaca

SEQ ID NO: 63016 - DNA, 25 bp, Saccharomyces pastorianus
cttcatcgtgattttagtactgttg

SEQ ID NO: 63017 - DNA, 25 bp, Saccharomyces pastorianus
gtgattttagtactgttgacaccag

SEQ ID NO: 63018 - DNA, 25 bp, Saccharomyces pastorianus
aggcctagcaacagctccatttcag

SEQ ID NO: 63019 - DNA, 25 bp, Saccharomyces pastorianus
ttgacaccaggcctagcaacagctc

SEQ ID NO: 63020 - DNA, 25 bp, Saccharomyces pastorianus
attttagtactgttgacaccaggcc

SEQ ID NO: 63021 - DNA, 25 bp, Saccharomyces pastorianus
tagtactgttgacaccaggcctagc

SEQ ID NO: 63022 - DNA, 25 bp, Saccharomyces pastorianus
gcctagcaacagctccatttcaggt

SEQ ID NO: 63023 - DNA, 25 bp, Saccharomyces pastorianus
gtactgttgacaccaggcctagcaa

SEQ ID NO: 63024 - DNA, 25 bp, Saccharomyces pastorianus
actgttgacaccaggcctagcaaca

SEQ ID NO: 63025 - DNA, 25 bp, Saccharomyces pastorianus
tttagtactgttgacaccaggccta

SEQ ID NO: 63026 - DNA, 25 bp, Saccharomyces pastorianus
gcaacagctccatttcaggtacaat

SEQ ID NO: 63027 - DNA, 25 bp, Saccharomyces pastorianus
catcgtgattttagtactgttgaca

SEQ ID NO: 63028 - DNA, 25 bp, Saccharomyces pastorianus
cttcatcgtgattttagtactgttg

SEQ ID NO: 63029 - DNA, 25 bp, Saccharomyces pastorianus
aggcctagcaacagctccatttcag

SEQ ID NO: 63030 - DNA, 25 bp, Saccharomyces pastorianus
atgcaaaggttcttcatcgtgattt

SEQ ID NO: 63031 - DNA, 25 bp, Saccharomyces pastorianus
ttgacaccaggcctagcaacagctc

SEQ ID NO: 63032 - DNA, 25 bp, Saccharomyces pastorianus
gcctagcaacagctccatttcaggt

SEQ ID NO: 63033 - DNA, 25 bp, Saccharomyces pastorianus
attttagtactgttgacaccaggcc

SEQ ID NO: 63034 - DNA, 25 bp, Saccharomyces pastorianus
gtactgttgacaccaggcctagcaa

SEQ ID NO: 63035 - DNA, 25 bp, Saccharomyces pastorianus
ttagtactgttgacaccaggcctag

SEQ ID NO: 63036 - DNA, 25 bp, Saccharomyces pastorianus
actgttgacaccaggcctagcaaca

SEQ ID NO: 63037 - DNA, 25 bp, Saccharomyces pastorianus
aacgccttttacaccagaattctag

SEQ ID NO: 63038 - DNA, 25 bp, Saccharomyces pastorianus
tcttcctctcggtgattgcgatgaa

SEQ ID NO: 63039 - DNA, 25 bp, Saccharomyces pastorianus
tcagaattccagttcgatcttcctc

SEQ ID NO: 63040 - DNA, 25 bp, Saccharomyces pastorianus
aagcgatcctcgatgccgggagcta

SEQ ID NO: 63041 - DNA, 25 bp, Saccharomyces pastorianus
gctattgctccctgaagatgactca

SEQ ID NO: 63042 - DNA, 25 bp, Saccharomyces pastorianus
aagggaccattaacgagatctcagt

SEQ ID NO: 63043 - DNA, 25 bp, Saccharomyces pastorianus
ataacattgatctcgcttgcctgat

SEQ ID NO: 63044 - DNA, 25 bp, Saccharomyces pastorianus
gatgccttgctctatgtgatgaatg

SEQ ID NO: 63045 - DNA, 25 bp, Saccharomyces pastorianus
taagggacctggcttggaatctctc

SEQ ID NO: 63046 - DNA, 25 bp, Saccharomyces pastorianus
gaggcgttaacacgtctatcgacca

SEQ ID NO: 63047 - DNA, 25 bp, Saccharomyces pastorianus
ggaatctctcaatgtggtccatttt

SEQ ID NO: 63048 - DNA, 25 bp, Saccharomyces pastorianus
gaatcatctgtgtagaagacatcat

SEQ ID NO: 63049 - DNA, 25 bp, Saccharomyces pastorianus
gttgggagaccatggaatcatctgt

SEQ ID NO: 63050 - DNA, 25 bp, Saccharomyces pastorianus
gaacccgtcagttctcaaatgcggc

SEQ ID NO: 63051 - DNA, 25 bp, Saccharomyces pastorianus
gaggcagaatcaagaacccgtcagt

SEQ ID NO: 63052 - DNA, 25 bp, Saccharomyces pastorianus
ttgctactatgggtgaatcgttttc

SEQ ID NO: 63053 - DNA, 25 bp, Saccharomyces pastorianus
gacatcattcatgagattgctacta

SEQ ID NO: 63054 - DNA, 25 bp, Saccharomyces pastorianus
gaatcgttttctgcctgcaactttt

SEQ ID NO: 63055 - DNA, 25 bp, Saccharomyces pastorianus
gatgccgaatctcatgaaatagttc

SEQ ID NO: 63056 - DNA, 25 bp, Saccharomyces pastorianus
tgcaactttttcctacaaccattca

SEQ ID NO: 63057 - DNA, 25 bp, Saccharomyces pastorianus
acaagggtgagaatgatgccgaatc

SEQ ID NO: 63058 - DNA, 25 bp, Saccharomyces pastorianus
ctcaaatgcggctactgcaccagtt

SEQ ID NO: 63059 - DNA, 25 bp, Saccharomyces pastorianus
aaatcaccgaaaaacctaagcatgt

SEQ ID NO: 63060 - DNA, 25 bp, Saccharomyces pastorianus
tgaactccaacccagaggtcctttt

SEQ ID NO: 63061 - DNA, 25 bp, Saccharomyces pastorianus
aaacctaagcatgttgagcaggaat

SEQ ID NO: 63062 - DNA, 25 bp, Saccharomyces pastorianus
gaatctgccgatttgaaggaaagcg

SEQ ID NO: 63063 - DNA, 25 bp, Saccharomyces pastorianus
aacagatttgtcagagcagagagca

SEQ ID NO: 63064 - DNA, 25 bp, Saccharomyces pastorianus
aactacatacgatggcgaacctgct

SEQ ID NO: 63065 - DNA, 25 bp, Saccharomyces pastorianus
atgtcatctgcccaagaaagtaaaa

SEQ ID NO: 63066 - DNA, 25 bp, Saccharomyces pastorianus
aagccttgaactccaacccagaggt

SEQ ID NO: 63067 - DNA, 25 bp, Saccharomyces pastorianus
agcagagagcatagtcgcgaagact

SEQ ID NO: 63068 - DNA, 25 bp, Saccharomyces pastorianus
gaatcgagagacaagaactagcaaa

SEQ ID NO: 63069 - DNA, 25 bp, Saccharomyces pastorianus
gtcgcgaagactttggctacatcca

SEQ ID NO: 63070 - DNA, 25 bp, Saccharomyces pastorianus
tttgtttcacacaccgtcgcggcaa

SEQ ID NO: 63071 - DNA, 25 bp, Saccharomyces pastorianus
aaacttgccctcaggtgatcattct

SEQ ID NO: 63072 - DNA, 25 bp, Saccharomyces pastorianus
agaggtgtcccagctagtttattaa

SEQ ID NO: 63073 - DNA, 25 bp, Saccharomyces pastorianus
gataggtatctgaccgtgggcacat

SEQ ID NO: 63074 - DNA, 25 bp, Saccharomyces pastorianus
tagctgctttactatgttccagtgc

SEQ ID NO: 63075 - DNA, 25 bp, Saccharomyces pastorianus
gaaatcggtgcaaacttgccctcag

SEQ ID NO: 63076 - DNA, 25 bp, Saccharomyces pastorianus
cgcggcaatgatcattgtcccacta

SEQ ID NO: 63077 - DNA, 25 bp, Saccharomyces pastorianus
tgtcccactaatgagcgaaatcggt

SEQ ID NO: 63078 - DNA, 25 bp, Saccharomyces pastorianus
gaccgtgggcacattcattacaaga

SEQ ID NO: 63079 - DNA, 25 bp, Saccharomyces pastorianus
caacgtgaccgcaatttcgatgatt

SEQ ID NO: 63080 - DNA, 25 bp, Saccharomyces pastorianus
gttccagtgctatgggtctaccaac

SEQ ID NO: 63081 - DNA, 25 bp, Saccharomyces pastorianus
agaatccagcaccatatctccgaga

SEQ ID NO: 63082 - DNA, 25 bp, Saccharomyces pastorianus
acccagcacaggttgtccttgaaaa

SEQ ID NO: 63083 - DNA, 25 bp, Saccharomyces pastorianus
gacagatatgtccatcgattccgcg

SEQ ID NO: 63084 - DNA, 25 bp, Saccharomyces pastorianus
gcagcagcgtcagagaaggttcagt

SEQ ID NO: 63085 - DNA, 25 bp, Saccharomyces pastorianus
caggaagtccaagtcgcagcagcgt

SEQ ID NO: 63086 - DNA, 25 bp, Saccharomyces pastorianus
gagaccattcttacgtatgccaact

SEQ ID NO: 63087 - DNA, 25 bp, Saccharomyces pastorianus
accaacaacgcgaactctttgcaaa

SEQ ID NO: 63088 - DNA, 25 bp, Saccharomyces pastorianus
ttgaataaggatacccgccaaccct

SEQ ID NO: 63089 - DNA, 25 bp, Saccharomyces pastorianus
agagattgatatccgtctacaccca

SEQ ID NO: 63090 - DNA, 25 bp, Saccharomyces pastorianus
tctacacccaactttccgagttgaa

SEQ ID NO: 63091 - DNA, 25 bp, Saccharomyces pastorianus
actacatcaagtttcactcgcacgt

SEQ ID NO: 63092 - DNA, 25 bp, Saccharomyces pastorianus
aaaatatcagtccgccaagaccgat

SEQ ID NO: 63093 - DNA, 25 bp, Saccharomyces pastorianus
aatatcagtccgccaagaccgataa

SEQ ID NO: 63094 - DNA, 25 bp, Saccharomyces pastorianus
atatcagtccgccaagaccgataac

SEQ ID NO: 63095 - DNA, 25 bp, Saccharomyces pastorianus
aagaaaatatcagtccgccaagacc

SEQ ID NO: 63096 - DNA, 25 bp, Saccharomyces pastorianus
gaaagaaaatatcagtccgccaaga

SEQ ID NO: 63097 - DNA, 25 bp, Saccharomyces pastorianus
aaatatcagtccgccaagaccgata

SEQ ID NO: 63098 - DNA, 25 bp, Saccharomyces pastorianus
gaaaatatcagtccgccaagaccga

SEQ ID NO: 63099 - DNA, 25 bp, Saccharomyces pastorianus
agaaaatatcagtccgccaagaccg

SEQ ID NO: 63100 - DNA, 25 bp, Saccharomyces pastorianus
aaagaaaatatcagtccgccaagac

SEQ ID NO: 63101 - DNA, 25 bp, Saccharomyces pastorianus
acaattatcctttggtgcctttcca

SEQ ID NO: 63102 - DNA, 25 bp, Saccharomyces pastorianus
aaatcctacaattgcatccatctcg

SEQ ID NO: 63103 - DNA, 25 bp, Saccharomyces pastorianus
gttctcttgatcataactttcccac

SEQ ID NO: 63104 - DNA, 25 bp, Saccharomyces pastorianus
gaactgcacctatgctaaggcctta

SEQ ID NO: 63105 - DNA, 25 bp, Saccharomyces pastorianus
tgatccgttcactttgacacaatgg

SEQ ID NO: 63106 - DNA, 25 bp, Saccharomyces pastorianus
tgtccacaatggcacacctaatcaa

SEQ ID NO: 63107 - DNA, 25 bp, Saccharomyces pastorianus
tgcgttaccggtgtgtttcatttgt

SEQ ID NO: 63108 - DNA, 25 bp, Saccharomyces pastorianus
tcgcctctaacatcggtggtatgtc

SEQ ID NO: 63109 - DNA, 25 bp, Saccharomyces pastorianus
ttgtatcatggcgacttgggttctc

SEQ ID NO: 63110 - DNA, 25 bp, Saccharomyces pastorianus
acgatcgtcgtcttggccatgggag

SEQ ID NO: 63111 - DNA, 25 bp, Saccharomyces pastorianus
catcgcttctcctcagaatattttc

SEQ ID NO: 63112 - DNA, 25 bp, Saccharomyces pastorianus
ttgcaatggaccgaagcacgtcgtt

SEQ ID NO: 63113 - DNA, 25 bp, Saccharomyces pastorianus
ccaagggtgttatctccaaggagtt

SEQ ID NO: 63114 - DNA, 25 bp, Saccharomyces pastorianus
tagaattagatcctggtacccagcc

SEQ ID NO: 63115 - DNA, 25 bp, Saccharomyces pastorianus
cgacagatcatcacgtatggtggcc

SEQ ID NO: 63116 - DNA, 25 bp, Saccharomyces pastorianus
tttgccgatttgcacgacagatcat

SEQ ID NO: 63117 - DNA, 25 bp, Saccharomyces pastorianus
tacccagcctcagtggaccatgata

SEQ ID NO: 63118 - DNA, 25 bp, Saccharomyces pastorianus
tctaagcaattagcagaccgtgaaa

SEQ ID NO: 63119 - DNA, 25 bp, Saccharomyces pastorianus
ttgaccgacaagagcttaacaccag

SEQ ID NO: 63120 - DNA, 25 bp, Saccharomyces pastorianus
gaaacctttgcccaagatttagcta

SEQ ID NO: 63121 - DNA, 25 bp, Saccharomyces pastorianus
gaaacgatcacgacaatgccattga

SEQ ID NO: 63122 - DNA, 25 bp, Saccharomyces pastorianus
gaccgtgaaagagaactactgccaa

SEQ ID NO: 63123 - DNA, 25 bp, Saccharomyces pastorianus
tcagttcggtcatatctttgccttt

SEQ ID NO: 63124 - DNA, 25 bp, Saccharomyces pastorianus
tgtctctgccggtactgtggaatac

SEQ ID NO: 63125 - DNA, 25 bp, Saccharomyces pastorianus
gattgttccgtgcaaagacgtcacc

SEQ ID NO: 63126 - DNA, 25 bp, Saccharomyces pastorianus
taaactggtcgggtatgtctctgcc

SEQ ID NO: 63127 - DNA, 25 bp, Saccharomyces pastorianus
gtgacatcagaaccttgtacggcat

SEQ ID NO: 63128 - DNA, 25 bp, Saccharomyces pastorianus
attcattccttttccgattctcagt

SEQ ID NO: 63129 - DNA, 25 bp, Saccharomyces pastorianus
ggaatacctgtactctcacgatgac

SEQ ID NO: 63130 - DNA, 25 bp, Saccharomyces pastorianus
aaaaagccgctgtcagactcggtaa

SEQ ID NO: 63131 - DNA, 25 bp, Saccharomyces pastorianus
aattatcgaagaagccccagtgacc

SEQ ID NO: 63132 - DNA, 25 bp, Saccharomyces pastorianus
atcgatttcgagttcaagacccaag

SEQ ID NO: 63133 - DNA, 25 bp, Saccharomyces pastorianus
cccagtgaccattgccaaggcggaa

SEQ ID NO: 63134 - DNA, 25 bp, Saccharomyces pastorianus
agggttccaccctgagctaggtatc

SEQ ID NO: 63135 - DNA, 25 bp, Saccharomyces pastorianus
gaagcaccatgcatgttcggagatc

SEQ ID NO: 63136 - DNA, 25 bp, Saccharomyces pastorianus
gaagagggttcagcaccgggttcca

SEQ ID NO: 63137 - DNA, 25 bp, Saccharomyces pastorianus
acaatcagtgtctcaggtaacccca

SEQ ID NO: 63138 - DNA, 25 bp, Saccharomyces pastorianus
cacggtccgctttatggtgcaagca

SEQ ID NO: 63139 - DNA, 25 bp, Saccharomyces pastorianus
gagatcagggcctcttcgttgagtg

SEQ ID NO: 63140 - DNA, 25 bp, Saccharomyces pastorianus
tatcctgttgtgtcagaaccggctg

SEQ ID NO: 63141 - DNA, 25 bp, Saccharomyces pastorianus
gaaccggctgcgtgacaagtggcac

SEQ ID NO: 63142 - DNA, 25 bp, Saccharomyces pastorianus
tcgcacgagctggtccattattttg

SEQ ID NO: 63143 - DNA, 25 bp, Saccharomyces pastorianus
ggaatgtcttcgatgctacgagcat

SEQ ID NO: 63144 - DNA, 25 bp, Saccharomyces pastorianus
aagactctaaagctcgggccctgaa

SEQ ID NO: 63145 - DNA, 25 bp, Saccharomyces pastorianus
gaatgggaagcttccttggaaccaa

SEQ ID NO: 63146 - DNA, 25 bp, Saccharomyces pastorianus
gaaaactatttcctatccatcgcac

SEQ ID NO: 63147 - DNA, 25 bp, Saccharomyces pastorianus
aaatttgtcacttccattgtcaaca

SEQ ID NO: 63148 - DNA, 25 bp, Saccharomyces pastorianus
gctgccaaacaactacgtctacatg

SEQ ID NO: 63149 - DNA, 25 bp, Saccharomyces pastorianus
gaggacaaccaatttgcgtcaacag

SEQ ID NO: 63150 - DNA, 25 bp, Saccharomyces pastorianus
gaaccaaatcattgctctagccgtg

SEQ ID NO: 63151 - DNA, 25 bp, Saccharomyces pastorianus
tttgtctcaagctggtaaccttcta

SEQ ID NO: 63152 - DNA, 25 bp, Saccharomyces pastorianus
atgttacattactccaaaccctttg

SEQ ID NO: 63153 - DNA, 25 bp, Saccharomyces pastorianus
attattcgttgtgctgttcctcaaa

SEQ ID NO: 63154 - DNA, 25 bp, Saccharomyces pastorianus
gatgcactcaagatttggtccaaaa

SEQ ID NO: 63155 - DNA, 25 bp, Saccharomyces pastorianus
tcgatgctccacgtgatgacaaaga

SEQ ID NO: 63156 - DNA, 25 bp, Saccharomyces pastorianus
atggcgccggaatcgattactggtt

SEQ ID NO: 63157 - DNA, 25 bp, Saccharomyces pastorianus
attatgtatcatgttgcggccggac

SEQ ID NO: 63158 - DNA, 25 bp, Saccharomyces pastorianus
cggccatggtctaacctcgataatg

SEQ ID NO: 63159 - DNA, 25 bp, Saccharomyces pastorianus
atgattactggtaggcggccatggt

SEQ ID NO: 63160 - DNA, 25 bp, Saccharomyces pastorianus
ggacacctatgtatatggcgccgga

SEQ ID NO: 63161 - DNA, 25 bp, Saccharomyces pastorianus
cactccgcagttccccaataaagat

SEQ ID NO: 63162 - DNA, 25 bp, Saccharomyces pastorianus
gtatgttgattttggcgctgccaag

SEQ ID NO: 63163 - DNA, 25 bp, Saccharomyces pastorianus
agacgctcacgcttcggattcaaag

SEQ ID NO: 63164 - DNA, 25 bp, Saccharomyces pastorianus
atgaggtatcctctgctggtaggaa

SEQ ID NO: 63165 - DNA, 25 bp, Saccharomyces pastorianus
tactggaaggtcttgcgtatctgca

SEQ ID NO: 63166 - DNA, 25 bp, Saccharomyces pastorianus
tgcgtatctgcatgaatctgggatt

SEQ ID NO: 63167 - DNA, 25 bp, Saccharomyces pastorianus
aaggcaaattgaactggctcaggaa

SEQ ID NO: 63168 - DNA, 25 bp, Saccharomyces pastorianus
gaacgcgaaataccggacgacgagt

SEQ ID NO: 63169 - DNA, 25 bp, Saccharomyces pastorianus
ggtcccggcttcaatacgcagtatt

SEQ ID NO: 63170 - DNA, 25 bp, Saccharomyces pastorianus
atcggttcgaatggcaaactatgtt

SEQ ID NO: 63171 - DNA, 25 bp, Saccharomyces pastorianus
gagaccatcaagtcacttgtggaca

SEQ ID NO: 63172 - DNA, 25 bp, Saccharomyces pastorianus
ggaaccgaggatttattgtcaagat

SEQ ID NO: 63173 - DNA, 25 bp, Saccharomyces pastorianus
agattattgcaaaaccctatggtga

SEQ ID NO: 63174 - DNA, 25 bp, Saccharomyces pastorianus
tcaaggaaagggtcccggcttcaat

SEQ ID NO: 63175 - DNA, 25 bp, Saccharomyces pastorianus
gaaattccactgattctgtattcca

SEQ ID NO: 63176 - DNA, 25 bp, Saccharomyces pastorianus
ggtcctgaatctttggcctaatgtg

SEQ ID NO: 63177 - DNA, 25 bp, Saccharomyces pastorianus
aatggacttcagattggacgataac

SEQ ID NO: 63178 - DNA, 25 bp, Saccharomyces pastorianus
gatggtacaccattctactatgtta

SEQ ID NO: 63179 - DNA, 25 bp, Saccharomyces pastorianus
agttaaccagccaacctagatctta

SEQ ID NO: 63180 - DNA, 25 bp, Saccharomyces pastorianus
gaaatcttcttctgagactgtgaaa

SEQ ID NO: 63181 - DNA, 25 bp, Saccharomyces pastorianus
acttatttgattggtagccccgaat

SEQ ID NO: 63182 - DNA, 25 bp, Saccharomyces pastorianus
ttatgccctggagtatcaatgtgat

SEQ ID NO: 63183 - DNA, 25 bp, Saccharomyces pastorianus
tcttcactgggttcggatatttcaa

SEQ ID NO: 63184 - DNA, 25 bp, Saccharomyces pastorianus
ttatgtactggtgctgactccacag

SEQ ID NO: 63185 - DNA, 25 bp, Saccharomyces pastorianus
aatggtactcaaactcttcactggg

SEQ ID NO: 63186 - DNA, 25 bp, Saccharomyces pastorianus
aattctcttggttatgtactggtgc

SEQ ID NO: 63187 - DNA, 25 bp, Saccharomyces pastorianus
tagcaactcagtttcctttttggaa

SEQ ID NO: 63188 - DNA, 25 bp, Saccharomyces pastorianus
gactccacaggaaccattgctatgg

SEQ ID NO: 63189 - DNA, 25 bp, Saccharomyces pastorianus
ttgtgctgcgtgtgatggtactgaa

SEQ ID NO: 63190 - DNA, 25 bp, Saccharomyces pastorianus
ccaaatcaagagagggtccggccct

SEQ ID NO: 63191 - DNA, 25 bp, Saccharomyces pastorianus
gccatgttgtcgaggttgctgtcca

SEQ ID NO: 63192 - DNA, 25 bp, Saccharomyces pastorianus
gcagagaatgttttccaccaccgtt

SEQ ID NO: 63193 - DNA, 25 bp, Saccharomyces pastorianus
gttttgcggagcgaaaaatcccata

SEQ ID NO: 63194 - DNA, 25 bp, Saccharomyces pastorianus
ggtactgaagcccaagaagcctaat

SEQ ID NO: 63195 - DNA, 25 bp, Saccharomyces pastorianus
acaagccacgctgaaccaaatcaag

SEQ ID NO: 63196 - DNA, 25 bp, Saccharomyces pastorianus
aaaggcatgcagagtccggctgtct

SEQ ID NO: 63197 - DNA, 25 bp, Saccharomyces pastorianus
tatctttagtttggctcttacccga

SEQ ID NO: 63198 - DNA, 25 bp, Saccharomyces pastorianus
ttgctgtccagctcatggtgtgcgc

SEQ ID NO: 63199 - DNA, 25 bp, Saccharomyces pastorianus
acgcaagaaggtgactacggcccca

SEQ ID NO: 63200 - DNA, 25 bp, Saccharomyces pastorianus
tcgaccgccctagcaataaactatt

SEQ ID NO: 63201 - DNA, 25 bp, Saccharomyces pastorianus
catttcttgggcaaccgggacacaa

SEQ ID NO: 63202 - DNA, 25 bp, Saccharomyces pastorianus
ataaactatttctctgccaaacaaa

SEQ ID NO: 63203 - DNA, 25 bp, Saccharomyces pastorianus
atataacagccacgagcccacaggc

SEQ ID NO: 63204 - DNA, 25 bp, Saccharomyces pastorianus
acgacatgaacctctttctaccgat

SEQ ID NO: 63205 - DNA, 25 bp, Saccharomyces pastorianus
gaacactggtgttaactccttcgac

SEQ ID NO: 63206 - DNA, 25 bp, Saccharomyces pastorianus
agctccttcggagtgaacactggtg

SEQ ID NO: 63207 - DNA, 25 bp, Saccharomyces pastorianus
gttaactccttcgacgacgacgacg

SEQ ID NO: 63208 - DNA, 25 bp, Saccharomyces pastorianus
gttgattccagcaacaacgactccg

SEQ ID NO: 63209 - DNA, 25 bp, Saccharomyces pastorianus
tctgcatacggaatccatttcttgg

SEQ ID NO: 63210 - DNA, 25 bp, Saccharomyces pastorianus
aaacaaacattgctcgaccctactt

SEQ ID NO: 63211 - DNA, 25 bp, Saccharomyces pastorianus
ttatcctgtggccattgcaactaag

SEQ ID NO: 63212 - DNA, 25 bp, Saccharomyces pastorianus
aaccgtgggttatcctgtggccatt

SEQ ID NO: 63213 - DNA, 25 bp, Saccharomyces pastorianus
agttccatggctgcaaccgtgggtt

SEQ ID NO: 63214 - DNA, 25 bp, Saccharomyces pastorianus
gagacatggtcgtactacagcataa

SEQ ID NO: 63215 - DNA, 25 bp, Saccharomyces pastorianus
ggaactaccgaaaccagaacagcta

SEQ ID NO: 63216 - DNA, 25 bp, Saccharomyces pastorianus
acagctactttagtcgattacggga

SEQ ID NO: 63217 - DNA, 25 bp, Saccharomyces pastorianus
gcaactaagtttgtcctagatggta

SEQ ID NO: 63218 - DNA, 25 bp, Saccharomyces pastorianus
ggtacaatcaaaggtccaggtctaa

SEQ ID NO: 63219 - DNA, 25 bp, Saccharomyces pastorianus
taatagcaccatactcgccagagat

SEQ ID NO: 63220 - DNA, 25 bp, Saccharomyces pastorianus
aaggtcggtggctacagttccatgg

SEQ ID NO: 63221 - DNA, 25 bp, Saccharomyces pastorianus
gccagagatcaacgacccaatcatg

SEQ ID NO: 63222 - DNA, 25 bp, Saccharomyces pastorianus
atctaccctggttatgcgtttgtct

SEQ ID NO: 63223 - DNA, 25 bp, Saccharomyces pastorianus
tgatggctactgctaaaccttactt

SEQ ID NO: 63224 - DNA, 25 bp, Saccharomyces pastorianus
gggtgccaagtctgcttctagagaa

SEQ ID NO: 63225 - DNA, 25 bp, Saccharomyces pastorianus
agggagtaaccctctagacactctt

SEQ ID NO: 63226 - DNA, 25 bp, Saccharomyces pastorianus
tgagattccaaggtttcccggagtt

SEQ ID NO: 63227 - DNA, 25 bp, Saccharomyces pastorianus
gatgcaaagaccactccagggagta

SEQ ID NO: 63228 - DNA, 25 bp, Saccharomyces pastorianus
gattgagaccatctcttcggaagat

SEQ ID NO: 63229 - DNA, 25 bp, Saccharomyces pastorianus
ggatacaagttctcatggtcttcta

SEQ ID NO: 63230 - DNA, 25 bp, Saccharomyces pastorianus
taggcttgttctccgatgcaaagac

SEQ ID NO: 63231 - DNA, 25 bp, Saccharomyces pastorianus
ggttgccagctcctgaagattctga

SEQ ID NO: 63232 - DNA, 25 bp, Saccharomyces pastorianus
ttggttgcctccattgactcaaaga

SEQ ID NO: 63233 - DNA, 25 bp, Saccharomyces pastorianus
tgtggtgatacacgtcctggacgca

SEQ ID NO: 63234 - DNA, 25 bp, Saccharomyces pastorianus
agaaaaaggcctcgtcttgctgcgt

SEQ ID NO: 63235 - DNA, 25 bp, Saccharomyces pastorianus
gacaccgagagttatgctgatgcat

SEQ ID NO: 63236 - DNA, 25 bp, Saccharomyces pastorianus
gacagccactgctaaggaagccatt

SEQ ID NO: 63237 - DNA, 25 bp, Saccharomyces pastorianus
ggacacagacgaatcaccaaaggct

SEQ ID NO: 63238 - DNA, 25 bp, Saccharomyces pastorianus
agcaagtcttagacgccacactggg

SEQ ID NO: 63239 - DNA, 25 bp, Saccharomyces pastorianus
atgcattcgggccaaaatctcaaag

SEQ ID NO: 63240 - DNA, 25 bp, Saccharomyces pastorianus
ggaaacgccgcataaacatttgatt

SEQ ID NO: 63241 - DNA, 25 bp, Saccharomyces pastorianus
tcgattcttctgatgtggtgataca

SEQ ID NO: 63242 - DNA, 25 bp, Saccharomyces pastorianus
aaggctagaatcttggacaccgaga

SEQ ID NO: 63243 - DNA, 25 bp, Saccharomyces pastorianus
gagctgtacaaagtcatcgattctt

SEQ ID NO: 63244 - DNA, 25 bp, Saccharomyces pastorianus
aggtgtcttgaagcgttgtcaggta

SEQ ID NO: 63245 - DNA, 25 bp, Saccharomyces pastorianus
gaacagtacattccaggtgtcttga

SEQ ID NO: 63246 - DNA, 25 bp, Saccharomyces pastorianus
aatcctgaacgatttcaacagaggt

SEQ ID NO: 63247 - DNA, 25 bp, Saccharomyces pastorianus
gagcacgttactcatccagaacagt

SEQ ID NO: 63248 - DNA, 25 bp, Saccharomyces pastorianus
ggttcgttgttccacctgagaaagc

SEQ ID NO: 63249 - DNA, 25 bp, Saccharomyces pastorianus
gagcctgacgagtgtagtgtttcca

SEQ ID NO: 63250 - DNA, 25 bp, Saccharomyces pastorianus
agtgtttccaaactaatcctgaacg

SEQ ID NO: 63251 - DNA, 25 bp, Saccharomyces pastorianus
atgccacggacttcattgaaatttt

SEQ ID NO: 63252 - DNA, 25 bp, Saccharomyces pastorianus
actactgaaaggtggtgagcctgac

SEQ ID NO: 63253 - DNA, 25 bp, Saccharomyces pastorianus
tagaaagaacctacgagatctcggg

SEQ ID NO: 63254 - DNA, 25 bp, Saccharomyces pastorianus
gaggtaagatcccttggttcgttgt

SEQ ID NO: 63255 - DNA, 25 bp, Saccharomyces pastorianus
gtatcgctagcggtacctggcaaag

SEQ ID NO: 63256 - DNA, 25 bp, Saccharomyces pastorianus
atgtcatatgcagttccttccttta

SEQ ID NO: 63257 - DNA, 25 bp, Saccharomyces pastorianus
acacgttgccagtcacagcagggaa

SEQ ID NO: 63258 - DNA, 25 bp, Saccharomyces pastorianus
tatacgctcactttttgtcgcagat

SEQ ID NO: 63259 - DNA, 25 bp, Saccharomyces pastorianus
ttgcctaatattcttgtcgtttcca

SEQ ID NO: 63260 - DNA, 25 bp, Saccharomyces pastorianus
atcctatggaccttattttgcctaa

SEQ ID NO: 63261 - DNA, 25 bp, Saccharomyces pastorianus
gtattaccttgctactcatgtcata

SEQ ID NO: 63262 - DNA, 25 bp, Saccharomyces pastorianus
taagactcgccgtatgtcaacgatc

SEQ ID NO: 63263 - DNA, 25 bp, Saccharomyces pastorianus
gttcaaatctccattatacgctcac

SEQ ID NO: 63264 - DNA, 25 bp, Saccharomyces pastorianus
acaggttacgttgcaggtatcgcta

SEQ ID NO: 63265 - DNA, 25 bp, Saccharomyces pastorianus
aagctggcaactttgacacctgggt

SEQ ID NO: 63266 - DNA, 25 bp, Saccharomyces pastorianus
agatcaaaccgccagagccgtaatt

SEQ ID NO: 63267 - DNA, 25 bp, Saccharomyces pastorianus
gacactccctctgttgtcgataatt

SEQ ID NO: 63268 - DNA, 25 bp, Saccharomyces pastorianus
aaagaatccgtcactcactctggtt

SEQ ID NO: 63269 - DNA, 25 bp, Saccharomyces pastorianus
aattgcccatgctatcgagctagga

SEQ ID NO: 63270 - DNA, 25 bp, Saccharomyces pastorianus
caggtgtaccaatcagcccaaaagt

SEQ ID NO: 63271 - DNA, 25 bp, Saccharomyces pastorianus
cttttggcaggtggatcaggtcttc

SEQ ID NO: 63272 - DNA, 25 bp, Saccharomyces pastorianus
tagtgtgttgtggaccacctgtctt

SEQ ID NO: 63273 - DNA, 25 bp, Saccharomyces pastorianus
atatggatccaattcggctgcccat

SEQ ID NO: 63274 - DNA, 25 bp, Saccharomyces pastorianus
gtctttgttgacaccgctagagatc

SEQ ID NO: 63275 - DNA, 25 bp, Saccharomyces pastorianus
taagtggcacctccaatgtcgattt

SEQ ID NO: 63276 - DNA, 25 bp, Saccharomyces pastorianus
ggcccaacgttgaagagctgctgaa

SEQ ID NO: 63277 - DNA, 25 bp, Saccharomyces pastorianus
aattgggcatacaatgggtccgcta

SEQ ID NO: 63278 - DNA, 25 bp, Saccharomyces pastorianus
gacacgttcgagaaagggtactcaa

SEQ ID NO: 63279 - DNA, 25 bp, Saccharomyces pastorianus
attcatgttatgtcggtttgcgtaa

SEQ ID NO: 63280 - DNA, 25 bp, Saccharomyces pastorianus
tgttcttccggttttccgctgcaaa

SEQ ID NO: 63281 - DNA, 25 bp, Saccharomyces pastorianus
gctatgagcctgcaattcaatcgat

SEQ ID NO: 63282 - DNA, 25 bp, Saccharomyces pastorianus
agacttctctggtaaatacccatga

SEQ ID NO: 63283 - DNA, 25 bp, Saccharomyces pastorianus
aagcacctcctagtaagacttctct

SEQ ID NO: 63284 - DNA, 25 bp, Saccharomyces pastorianus
atgactgatgccgaattttatactt

SEQ ID NO: 63285 - DNA, 25 bp, Saccharomyces pastorianus
ttataactatccttctgttcttccg

SEQ ID NO: 63286 - DNA, 25 bp, Saccharomyces pastorianus
cgatgctatattgtctctacgaaga

SEQ ID NO: 63287 - DNA, 25 bp, Saccharomyces pastorianus
tgggtccgctatatatcgctatgag

SEQ ID NO: 63288 - DNA, 25 bp, Saccharomyces pastorianus
aaccaagtcgtctatgctgaacctg

SEQ ID NO: 63289 - DNA, 25 bp, Saccharomyces pastorianus
ggtacgctcgatgaaatcctgcaga

SEQ ID NO: 63290 - DNA, 25 bp, Saccharomyces pastorianus
agtcaggtatttggcgttgcgccta

SEQ ID NO: 63291 - DNA, 25 bp, Saccharomyces pastorianus
ttacacacatcatcggtcagcaaca

SEQ ID NO: 63292 - DNA, 25 bp, Saccharomyces pastorianus
ggaggcccgcgaattaggtgcaaat

SEQ ID NO: 63293 - DNA, 25 bp, Saccharomyces pastorianus
atgtcacttgaaaactctgccctta

SEQ ID NO: 63294 - DNA, 25 bp, Saccharomyces pastorianus
aacgacttgttgttcgacttcctag

SEQ ID NO: 63295 - DNA, 25 bp, Saccharomyces pastorianus
aacaactttcactgaggcggcgagt

SEQ ID NO: 63296 - DNA, 25 bp, Saccharomyces pastorianus
acttcctagctgtacgtcttgatgg

SEQ ID NO: 63297 - DNA, 25 bp, Saccharomyces pastorianus
atggcgtgccggacattccaagcat

SEQ ID NO: 63298 - DNA, 25 bp, Saccharomyces pastorianus
tgaccgcgcacgagaggacttcaag

SEQ ID NO: 63299 - DNA, 25 bp, Saccharomyces pastorianus
tagcttgctttatgttcgtggcttt

SEQ ID NO: 63300 - DNA, 25 bp, Saccharomyces pastorianus
gtggctttgcaagtcgaccgaggaa

SEQ ID NO: 63301 - DNA, 25 bp, Saccharomyces pastorianus
atggtctctcgtcgctattgtgcag

SEQ ID NO: 63302 - DNA, 25 bp, Saccharomyces pastorianus
gaagataccctttctctaggtcatt

SEQ ID NO: 63303 - DNA, 25 bp, Saccharomyces pastorianus
gcagaactaccttcgcagttgatct

SEQ ID NO: 63304 - DNA, 25 bp, Saccharomyces pastorianus
gatccagatgactctatggtctctc

SEQ ID NO: 63305 - DNA, 25 bp, Saccharomyces pastorianus
ggtcattctgactcatcgatagatc

SEQ ID NO: 63306 - DNA, 25 bp, Saccharomyces pastorianus
tttatgcatgcagggcgctactagg

SEQ ID NO: 63307 - DNA, 25 bp, Saccharomyces pastorianus
aatcctttcttaaatcctgcagtcg

SEQ ID NO: 63308 - DNA, 25 bp, Saccharomyces pastorianus
gctactaggccttcttgagggaggt

SEQ ID NO: 63309 - DNA, 25 bp, Saccharomyces pastorianus
ggcgcgtaacgctattagcttgctt

SEQ ID NO: 63310 - DNA, 25 bp, Saccharomyces pastorianus
agagattcagcacccattactacaa

SEQ ID NO: 63311 - DNA, 25 bp, Saccharomyces pastorianus
atagtgggcggaacgagtccttcaa

SEQ ID NO: 63312 - DNA, 25 bp, Saccharomyces pastorianus
gatttaacttagtctccgcagcaga

SEQ ID NO: 63313 - DNA, 25 bp, Saccharomyces pastorianus
gtggtgctacagacggaccggctat

SEQ ID NO: 63314 - DNA, 25 bp, Saccharomyces pastorianus
atgctacgctacgatgtcactgaac

SEQ ID NO: 63315 - DNA, 25 bp, Saccharomyces pastorianus
agactatttgaccacactaactcca

SEQ ID NO: 63316 - DNA, 25 bp, Saccharomyces pastorianus
cacctgctacgggtttggttcagta

SEQ ID NO: 63317 - DNA, 25 bp, Saccharomyces pastorianus
cggtaaagtctattcctatcccaat

SEQ ID NO: 63318 - DNA, 25 bp, Saccharomyces pastorianus
attactacaacgctatggctccaaa

SEQ ID NO: 63319 - DNA, 25 bp, Saccharomyces pastorianus
gggttggcgtttaatcctgtatcca

SEQ ID NO: 63320 - DNA, 25 bp, Saccharomyces pastorianus
atagtgtcctgatctttggtggtgc

SEQ ID NO: 63321 - DNA, 25 bp, Saccharomyces pastorianus
gaaatactgccccttcgaggatatc

SEQ ID NO: 63322 - DNA, 25 bp, Saccharomyces pastorianus
ttctgctgctgctccatagatatga

SEQ ID NO: 63323 - DNA, 25 bp, Saccharomyces pastorianus
gatactggtattgcgactcctgcaa

SEQ ID NO: 63324 - DNA, 25 bp, Saccharomyces pastorianus
gacacgagggacatttccagtgcat

SEQ ID NO: 63325 - DNA, 25 bp, Saccharomyces pastorianus
aattcgctctgtgtcctgtgtgaaa

SEQ ID NO: 63326 - DNA, 25 bp, Saccharomyces pastorianus
caatttcacattttctgctgctgct

SEQ ID NO: 63327 - DNA, 25 bp, Saccharomyces pastorianus
taaccatggttctacttccctgtgg

SEQ ID NO: 63328 - DNA, 25 bp, Saccharomyces pastorianus
gactctactgcgaacaatgcggcga

SEQ ID NO: 63329 - DNA, 25 bp, Saccharomyces pastorianus
caaccgtcttcctcattaacagaaa

SEQ ID NO: 63330 - DNA, 25 bp, Saccharomyces pastorianus
ggtgatcagtcttccattagactct

SEQ ID NO: 63331 - DNA, 25 bp, Saccharomyces pastorianus
agctgtttggaatcgctgcagacgt

SEQ ID NO: 63332 - DNA, 25 bp, Saccharomyces pastorianus
tttgcatccatacatgactcagggt

SEQ ID NO: 63333 - DNA, 25 bp, Saccharomyces pastorianus
aatcctttgataacatctctatgtg

SEQ ID NO: 63334 - DNA, 25 bp, Saccharomyces pastorianus
gagctcttcattagataatcctttg

SEQ ID NO: 63335 - DNA, 25 bp, Saccharomyces pastorianus
tacggcaattctaaaagcggttaca

SEQ ID NO: 63336 - DNA, 25 bp, Saccharomyces pastorianus
taaacacagcgtctgattcaatcag

SEQ ID NO: 63337 - DNA, 25 bp, Saccharomyces pastorianus
gaaatggatgcctggttacaacttt

SEQ ID NO: 63338 - DNA, 25 bp, Saccharomyces pastorianus
ttcgccaaccgataggtctattaag

SEQ ID NO: 63339 - DNA, 25 bp, Saccharomyces pastorianus
aacagggttcatcgacgtacggcaa

SEQ ID NO: 63340 - DNA, 25 bp, Saccharomyces pastorianus
ggattctatcaattttcgccaaccg

SEQ ID NO: 63341 - DNA, 25 bp, Saccharomyces pastorianus
gtccctactacccaaattaagcaag

SEQ ID NO: 63342 - DNA, 25 bp, Saccharomyces pastorianus
ggcgatatctatatacgatctcaac

SEQ ID NO: 63343 - DNA, 25 bp, Saccharomyces pastorianus
tccacctgtggaagacaaattcgag

SEQ ID NO: 63344 - DNA, 25 bp, Saccharomyces pastorianus
gataaccatgaagaaactctagctg

SEQ ID NO: 63345 - DNA, 25 bp, Saccharomyces pastorianus
tagctgcattggattctgtagtcaa

SEQ ID NO: 63346 - DNA, 25 bp, Saccharomyces pastorianus
acactattatggtcgttgaaaactt

SEQ ID NO: 63347 - DNA, 25 bp, Saccharomyces pastorianus
ttaaaccatagtcactacccttcca

SEQ ID NO: 63348 - DNA, 25 bp, Saccharomyces pastorianus
gaaactctagctgcattggattctg

SEQ ID NO: 63349 - DNA, 25 bp, Saccharomyces pastorianus
gaatacatcgagtccgttaagctgt

SEQ ID NO: 63350 - DNA, 25 bp, Saccharomyces pastorianus
gacaaattcgagacactattatggt

SEQ ID NO: 63351 - DNA, 25 bp, Saccharomyces pastorianus
atcaaccactattcgcaaatgtttg

SEQ ID NO: 63352 - DNA, 25 bp, Saccharomyces pastorianus
gagtccgttaagctgtttttcgaga

SEQ ID NO: 63353 - DNA, 25 bp, Saccharomyces pastorianus
aaactttatcaaccactattcgcaa

SEQ ID NO: 63354 - DNA, 25 bp, Saccharomyces pastorianus
aacgaggactacttggacaaccata

SEQ ID NO: 63355 - DNA, 25 bp, Saccharomyces pastorianus
ggaagcgtatgccagaatcacttta

SEQ ID NO: 63356 - DNA, 25 bp, Saccharomyces pastorianus
catttcgaaacctctgcttttagca

SEQ ID NO: 63357 - DNA, 25 bp, Saccharomyces pastorianus
cccattgactaattctctacgttgc

SEQ ID NO: 63358 - DNA, 25 bp, Saccharomyces pastorianus
gaactctctacttttaacctcgtgc

SEQ ID NO: 63359 - DNA, 25 bp, Saccharomyces pastorianus
gatttcttcccatctgattcagtgt

SEQ ID NO: 63360 - DNA, 25 bp, Saccharomyces pastorianus
gtgcccatagtcttgcagatatcat

SEQ ID NO: 63361 - DNA, 25 bp, Saccharomyces pastorianus
gacgtcgggattttcgatgccacaa

SEQ ID NO: 63362 - DNA, 25 bp, Saccharomyces pastorianus
agaagtttgctcgttcaatacagac

SEQ ID NO: 63363 - DNA, 25 bp, Saccharomyces pastorianus
aatttacacctttctccatggacga

SEQ ID NO: 63364 - DNA, 25 bp, Saccharomyces pastorianus
atacgtcttcagaggacctgttcaa

SEQ ID NO: 63365 - DNA, 25 bp, Saccharomyces pastorianus
gatggtaacattttggttttccaag

SEQ ID NO: 63366 - DNA, 25 bp, Saccharomyces pastorianus
tagaccaaacggtaccaagaaggct

SEQ ID NO: 63367 - DNA, 25 bp, Saccharomyces pastorianus
ttggttttccaagtttccatgaaag

SEQ ID NO: 63368 - DNA, 25 bp, Saccharomyces pastorianus
gaaggcttacgttagattgactgct

SEQ ID NO: 63369 - DNA, 25 bp, Saccharomyces pastorianus
gcttacgttagattgactgctgact

SEQ ID NO: 63370 - DNA, 25 bp, Saccharomyces pastorianus
gttttccaagtttccatgaaagcta

SEQ ID NO: 63371 - DNA, 25 bp, Saccharomyces pastorianus
gccgtcaaggaattatacgaagttg

SEQ ID NO: 63372 - DNA, 25 bp, Saccharomyces pastorianus
aggcttacgttagattgactgctga

SEQ ID NO: 63373 - DNA, 25 bp, Saccharomyces pastorianus
gtttccatgaaagctaacaaatacc

SEQ ID NO: 63374 - DNA, 25 bp, Saccharomyces pastorianus
cattttggttttccaagtttccatg

SEQ ID NO: 63375 - DNA, 25 bp, Saccharomyces pastorianus
gaaggccgtcaaggaattatacgaa

SEQ ID NO: 63376 - DNA, 25 bp, Saccharomyces pastorianus
cttccggttccatcaacagaagagt

SEQ ID NO: 63377 - DNA, 25 bp, Saccharomyces pastorianus
tccggttccatcaacagaagagttt

SEQ ID NO: 63378 - DNA, 25 bp, Saccharomyces pastorianus
ccatcaacagaagagttttgcaagc

SEQ ID NO: 63379 - DNA, 25 bp, Saccharomyces pastorianus
ggttccatcaacagaagagttttgc

SEQ ID NO: 63380 - DNA, 25 bp, Saccharomyces pastorianus
tccatcaacagaagagttttgcaag

SEQ ID NO: 63381 - DNA, 25 bp, Saccharomyces pastorianus
ttccggttccatcaacagaagagtt

SEQ ID NO: 63382 - DNA, 25 bp, Saccharomyces pastorianus
cggttccatcaacagaagagttttg

SEQ ID NO: 63383 - DNA, 25 bp, Saccharomyces pastorianus
ccggttccatcaacagaagagtttt

SEQ ID NO: 63384 - DNA, 25 bp, Saccharomyces pastorianus
ttccatcaacagaagagttttgcaa

SEQ ID NO: 63385 - DNA, 25 bp, Saccharomyces pastorianus
gcttccggttccatcaacagaagag

SEQ ID NO: 63386 - DNA, 25 bp, Saccharomyces pastorianus
gttccatcaacagaagagttttgca

SEQ ID NO: 63387 - DNA, 25 bp, Saccharomyces pastorianus
gaatccaatctaccggtagaaagtt

SEQ ID NO: 63388 - DNA, 25 bp, Saccharomyces pastorianus
gtaaggccccaagaatccaatctac

SEQ ID NO: 63389 - DNA, 25 bp, Saccharomyces pastorianus
ccccaagaatccaatctaccggtag

SEQ ID NO: 63390 - DNA, 25 bp, Saccharomyces pastorianus
cccaagaatccaatctaccggtaga

SEQ ID NO: 63391 - DNA, 25 bp, Saccharomyces pastorianus
aggccccaagaatccaatctaccgg

SEQ ID NO: 63392 - DNA, 25 bp, Saccharomyces pastorianus
gccccaagaatccaatctaccggta

SEQ ID NO: 63393 - DNA, 25 bp, Saccharomyces pastorianus
caagaatccaatctaccggtagaaa

SEQ ID NO: 63394 - DNA, 25 bp, Saccharomyces pastorianus
taaggccccaagaatccaatctacc

SEQ ID NO: 63395 - DNA, 25 bp, Saccharomyces pastorianus
ccaagaatccaatctaccggtagaa

SEQ ID NO: 63396 - DNA, 25 bp, Saccharomyces pastorianus
ggccccaagaatccaatctaccggt

SEQ ID NO: 63397 - DNA, 25 bp, Saccharomyces pastorianus
aaggccccaagaatccaatctaccg

SEQ ID NO: 63398 - DNA, 25 bp, Saccharomyces pastorianus
gaatattatgaatggccccagccaa

SEQ ID NO: 63399 - DNA, 25 bp, Saccharomyces pastorianus
agaatattatgaatggccccagcca

SEQ ID NO: 63400 - DNA, 25 bp, Saccharomyces pastorianus
aatattatgaatggccccagccaac

SEQ ID NO: 63401 - DNA, 25 bp, Saccharomyces pastorianus
atgaatggccccagccaacatccat

SEQ ID NO: 63402 - DNA, 25 bp, Saccharomyces pastorianus
agtcaaattatacactttcttagct

SEQ ID NO: 63403 - DNA, 25 bp, Saccharomyces pastorianus
agctcgtatgttaaagaatattatg

SEQ ID NO: 63404 - DNA, 25 bp, Saccharomyces pastorianus
ccccagccaacatccatttctggtt

SEQ ID NO: 63405 - DNA, 25 bp, Saccharomyces pastorianus
tatgaatggccccagccaacatcca

SEQ ID NO: 63406 - DNA, 25 bp, Saccharomyces pastorianus
gaatggccccagccaacatccattt

SEQ ID NO: 63407 - DNA, 25 bp, Saccharomyces pastorianus
aagaatattatgaatggccccagcc

SEQ ID NO: 63408 - DNA, 25 bp, Saccharomyces pastorianus
cactttcttagctcgtatgttaaag

SEQ ID NO: 63409 - DNA, 25 bp, Saccharomyces pastorianus
cagcgatttggtttatttcggtaat

SEQ ID NO: 63410 - DNA, 25 bp, Saccharomyces pastorianus
gaatatgtcaacgacgtcggaattt

SEQ ID NO: 63411 - DNA, 25 bp, Saccharomyces pastorianus
acagctttactcttgcatctcaata

SEQ ID NO: 63412 - DNA, 25 bp, Saccharomyces pastorianus
gcaaatatatctcgtattccagaat

SEQ ID NO: 63413 - DNA, 25 bp, Saccharomyces pastorianus
cagttttgtatttcaagctggactt

SEQ ID NO: 63414 - DNA, 25 bp, Saccharomyces pastorianus
catcgtatatgagatttgccaccaa

SEQ ID NO: 63415 - DNA, 25 bp, Saccharomyces pastorianus
tgttaccgagatgttccaaagagga

SEQ ID NO: 63416 - DNA, 25 bp, Saccharomyces pastorianus
gaaaaattgcacagctttactcttg

SEQ ID NO: 63417 - DNA, 25 bp, Saccharomyces pastorianus
tcggaatttacaacaacccaacaag

SEQ ID NO: 63418 - DNA, 25 bp, Saccharomyces pastorianus
agcccagacactaaaactatcgaga

SEQ ID NO: 63419 - DNA, 25 bp, Saccharomyces pastorianus
aatgccaaactcatagatttcgaat

SEQ ID NO: 63420 - DNA, 25 bp, Saccharomyces pastorianus
cataaacggcaacggcagtacgcgc

SEQ ID NO: 63421 - DNA, 25 bp, Saccharomyces pastorianus
gattgcctacgctgactttatgtac

SEQ ID NO: 63422 - DNA, 25 bp, Saccharomyces pastorianus
gttattcagaactttcccaagcgtc

SEQ ID NO: 63423 - DNA, 25 bp, Saccharomyces pastorianus
aagagacaatcgatcgcggcaggga

SEQ ID NO: 63424 - DNA, 25 bp, Saccharomyces pastorianus
agtgcccattgagacgacgctgaga

SEQ ID NO: 63425 - DNA, 25 bp, Saccharomyces pastorianus
ggtcgcacatagaatcatcgtacat

SEQ ID NO: 63426 - DNA, 25 bp, Saccharomyces pastorianus
ggccgaatccggaggagcagtatct

SEQ ID NO: 63427 - DNA, 25 bp, Saccharomyces pastorianus
aaactgttcaggcaatactcttcgt

SEQ ID NO: 63428 - DNA, 25 bp, Saccharomyces pastorianus
aagcgtctgctgaacccgaacgaaa

SEQ ID NO: 63429 - DNA, 25 bp, Saccharomyces pastorianus
tacgcgccagataccaaggccgaat

SEQ ID NO: 63430 - DNA, 25 bp, Saccharomyces pastorianus
atactcttcgtacacgtttggaggt

SEQ ID NO: 63431 - DNA, 25 bp, Saccharomyces pastorianus
aaagctattttatactacaggaaga

SEQ ID NO: 63432 - DNA, 25 bp, Saccharomyces pastorianus
tggcatatcccgagacttgtgatag

SEQ ID NO: 63433 - DNA, 25 bp, Saccharomyces pastorianus
atggcatatcccgagacttgtgata

SEQ ID NO: 63434 - DNA, 25 bp, Saccharomyces pastorianus
ccgagacttgtgatagatatggatt

SEQ ID NO: 63435 - DNA, 25 bp, Saccharomyces pastorianus
ggcatatcccgagacttgtgataga

SEQ ID NO: 63436 - DNA, 25 bp, Saccharomyces pastorianus
atcccgagacttgtgatagatatgg

SEQ ID NO: 63437 - DNA, 25 bp, Saccharomyces pastorianus
catatcccgagacttgtgatagata

SEQ ID NO: 63438 - DNA, 25 bp, Saccharomyces pastorianus
gcatatcccgagacttgtgatagat

SEQ ID NO: 63439 - DNA, 25 bp, Saccharomyces pastorianus
agaatatgataaatggttggttgaa

SEQ ID NO: 63440 - DNA, 25 bp, Saccharomyces pastorianus
agctattttatactacaggaagaat

SEQ ID NO: 63441 - DNA, 25 bp, Saccharomyces pastorianus
gaaaagctattttatactacaggaa

SEQ ID NO: 63442 - DNA, 25 bp, Saccharomyces pastorianus
gatatttgttacgactacctctgta

SEQ ID NO: 63443 - DNA, 25 bp, Saccharomyces pastorianus
gtagctacggcagactcttcaatta

SEQ ID NO: 63444 - DNA, 25 bp, Saccharomyces pastorianus
gaggcaaaatcttccgtcaacagtt

SEQ ID NO: 63445 - DNA, 25 bp, Saccharomyces pastorianus
atacttcaggttctatcggcacgag

SEQ ID NO: 63446 - DNA, 25 bp, Saccharomyces pastorianus
gtaagacttcttccgtcatctggta

SEQ ID NO: 63447 - DNA, 25 bp, Saccharomyces pastorianus
aatcgctggtgttgtcatcggtgta

SEQ ID NO: 63448 - DNA, 25 bp, Saccharomyces pastorianus
gcgattctgcttttcttagtatgga

SEQ ID NO: 63449 - DNA, 25 bp, Saccharomyces pastorianus
gtttagtgccaactcattacctgat

SEQ ID NO: 63450 - DNA, 25 bp, Saccharomyces pastorianus
cagccttattcatttggcgacgaag

SEQ ID NO: 63451 - DNA, 25 bp, Saccharomyces pastorianus
tcgaaaggacgtctgcagtagctac

SEQ ID NO: 63452 - DNA, 25 bp, Saccharomyces pastorianus
gagcgggcctttacaagtggtgaat

SEQ ID NO: 63453 - DNA, 25 bp, Saccharomyces pastorianus
ttcatctactacagaagcgtccacc

SEQ ID NO: 63454 - DNA, 25 bp, Saccharomyces pastorianus
aaatgttctggatggccataccaaa

SEQ ID NO: 63455 - DNA, 25 bp, Saccharomyces pastorianus
agtgtcctactgtcaaaatcaatgt

SEQ ID NO: 63456 - DNA, 25 bp, Saccharomyces pastorianus
atgctaaagtttctgtttcctccgt

SEQ ID NO: 63457 - DNA, 25 bp, Saccharomyces pastorianus
actcgctcgagcacgttaaagtcac

SEQ ID NO: 63458 - DNA, 25 bp, Saccharomyces pastorianus
taccaaatgtgtggcggttcatcct

SEQ ID NO: 63459 - DNA, 25 bp, Saccharomyces pastorianus
tatataacctcaacgactcgctcga

SEQ ID NO: 63460 - DNA, 25 bp, Saccharomyces pastorianus
gcggagattctgtaactgtcttaag

SEQ ID NO: 63461 - DNA, 25 bp, Saccharomyces pastorianus
gtttcctccgttgaatcttcatcta

SEQ ID NO: 63462 - DNA, 25 bp, Saccharomyces pastorianus
aatgtcctgattctgctgtagtggc

SEQ ID NO: 63463 - DNA, 25 bp, Saccharomyces pastorianus
tcagtctgctggactatctctcaaa

SEQ ID NO: 63464 - DNA, 25 bp, Saccharomyces pastorianus
ttgccgctattaaccgctatcatca

SEQ ID NO: 63465 - DNA, 25 bp, Saccharomyces pastorianus
ggaaccattccgaatatctcttcca

SEQ ID NO: 63466 - DNA, 25 bp, Saccharomyces pastorianus
cagttttctttatttcagtgtcggt

SEQ ID NO: 63467 - DNA, 25 bp, Saccharomyces pastorianus
tgtcggtagtttgttgttccttgcc

SEQ ID NO: 63468 - DNA, 25 bp, Saccharomyces pastorianus
aggactagcagcatattttgttata

SEQ ID NO: 63469 - DNA, 25 bp, Saccharomyces pastorianus
gacaagatttcctgaatcgttgttc

SEQ ID NO: 63470 - DNA, 25 bp, Saccharomyces pastorianus
tcacttgggaacttgtaacgctggt

SEQ ID NO: 63471 - DNA, 25 bp, Saccharomyces pastorianus
acctccttatatccggtactgcttt

SEQ ID NO: 63472 - DNA, 25 bp, Saccharomyces pastorianus
gctggtggtggcgtcaatgatctat

SEQ ID NO: 63473 - DNA, 25 bp, Saccharomyces pastorianus
ggtactgctttttatcacttcttta

SEQ ID NO: 63474 - DNA, 25 bp, Saccharomyces pastorianus
gaccgataaactcaactcctacaaa

SEQ ID NO: 63475 - DNA, 25 bp, Saccharomyces pastorianus
ggcctctttgacgacagtagaacga

SEQ ID NO: 63476 - DNA, 25 bp, Saccharomyces pastorianus
aggttacttccaatacggatgcgga

SEQ ID NO: 63477 - DNA, 25 bp, Saccharomyces pastorianus
gcgatgcgtctggagaggttacttc

SEQ ID NO: 63478 - DNA, 25 bp, Saccharomyces pastorianus
ataaatccagcaggagtgagtcgct

SEQ ID NO: 63479 - DNA, 25 bp, Saccharomyces pastorianus
agcatggcctctttgacgacagtag

SEQ ID NO: 63480 - DNA, 25 bp, Saccharomyces pastorianus
gaacgaagcccagtcaagacggcaa

SEQ ID NO: 63481 - DNA, 25 bp, Saccharomyces pastorianus
aacggaaaagtatagcgatgcgtct

SEQ ID NO: 63482 - DNA, 25 bp, Saccharomyces pastorianus
tgcgttccaggatttggccaaatgg

SEQ ID NO: 63483 - DNA, 25 bp, Saccharomyces pastorianus
tcgctggtagcgttgatatatcttc

SEQ ID NO: 63484 - DNA, 25 bp, Saccharomyces pastorianus
gactaagaagggatttgcgttccag

SEQ ID NO: 63485 - DNA, 25 bp, Saccharomyces pastorianus
gatatatcttctgggctcgatgtca

SEQ ID NO: 63486 - DNA, 25 bp, Saccharomyces pastorianus
tagatctgttcgtcttcgcactatt

SEQ ID NO: 63487 - DNA, 25 bp, Saccharomyces pastorianus
gaattttgttccttagcactaacga

SEQ ID NO: 63488 - DNA, 25 bp, Saccharomyces pastorianus
gacccaatcccaaggcaacatgcgt

SEQ ID NO: 63489 - DNA, 25 bp, Saccharomyces pastorianus
gcaacatgcgttttgggcaacccgt

SEQ ID NO: 63490 - DNA, 25 bp, Saccharomyces pastorianus
gtctataggtaacactctcccagat

SEQ ID NO: 63491 - DNA, 25 bp, Saccharomyces pastorianus
cgggatagtggcgtgtttctttgaa

SEQ ID NO: 63492 - DNA, 25 bp, Saccharomyces pastorianus
atagatgatgattggctgtgcggcc

SEQ ID NO: 63493 - DNA, 25 bp, Saccharomyces pastorianus
gagttgtttgagtttgcacctgtgt

SEQ ID NO: 63494 - DNA, 25 bp, Saccharomyces pastorianus
gattctactagatctgttcgtcttc

SEQ ID NO: 63495 - DNA, 25 bp, Saccharomyces pastorianus
ttgcacctgtgttaagacccaatcc

SEQ ID NO: 63496 - DNA, 25 bp, Saccharomyces pastorianus
tcgcactattcaccgattccgaaaa

SEQ ID NO: 63497 - DNA, 25 bp, Saccharomyces pastorianus
ggtcacaagggcatattccgccaac

SEQ ID NO: 63498 - DNA, 25 bp, Saccharomyces pastorianus
cgttttaccggccagaaagctagag

SEQ ID NO: 63499 - DNA, 25 bp, Saccharomyces pastorianus
aagagcggatcatttcgcggaaatt

SEQ ID NO: 63500 - DNA, 25 bp, Saccharomyces pastorianus
gaaaccgctctgcacgatacgaatt

SEQ ID NO: 63501 - DNA, 25 bp, Saccharomyces pastorianus
gcggagactgcctatcgacgagtat

SEQ ID NO: 63502 - DNA, 25 bp, Saccharomyces pastorianus
gtgtacttaactgccgacacagacg

SEQ ID NO: 63503 - DNA, 25 bp, Saccharomyces pastorianus
gtagaagggtgctgaccacgacgca

SEQ ID NO: 63504 - DNA, 25 bp, Saccharomyces pastorianus
tagtcagtttgtcgaatcaggtcac

SEQ ID NO: 63505 - DNA, 25 bp, Saccharomyces pastorianus
aaaagctaggcatcccaacgcggag

SEQ ID NO: 63506 - DNA, 25 bp, Saccharomyces pastorianus
gatcatactcgactgttcctttgac

SEQ ID NO: 63507 - DNA, 25 bp, Saccharomyces pastorianus
gagagcctcgggtcaatgtaaacca

SEQ ID NO: 63508 - DNA, 25 bp, Saccharomyces pastorianus
aagaaatggctactccttcgtccaa

SEQ ID NO: 63509 - DNA, 25 bp, Saccharomyces pastorianus
atcatggtacgtgacctactgctta

SEQ ID NO: 63510 - DNA, 25 bp, Saccharomyces pastorianus
gttgttgtcatctctctagactgga

SEQ ID NO: 63511 - DNA, 25 bp, Saccharomyces pastorianus
tgattttgaacgcttcctggttggt

SEQ ID NO: 63512 - DNA, 25 bp, Saccharomyces pastorianus
tttctgtttgcctgcttgggtaaca

SEQ ID NO: 63513 - DNA, 25 bp, Saccharomyces pastorianus
ggcagtggaccctattcatctttct

SEQ ID NO: 63514 - DNA, 25 bp, Saccharomyces pastorianus
agcagccgctgttgaacacgcaagg

SEQ ID NO: 63515 - DNA, 25 bp, Saccharomyces pastorianus
cgtttattttctccgttgttgtcat

SEQ ID NO: 63516 - DNA, 25 bp, Saccharomyces pastorianus
atgttttgcacgacgtcttcaacga

SEQ ID NO: 63517 - DNA, 25 bp, Saccharomyces pastorianus
gatttcgtcatcttttcccagtttt

SEQ ID NO: 63518 - DNA, 25 bp, Saccharomyces pastorianus
aggcactctgttcatggatttcgtc

SEQ ID NO: 63519 - DNA, 25 bp, Saccharomyces pastorianus
cattccaaagggtactgacttggct

SEQ ID NO: 63520 - DNA, 25 bp, Saccharomyces pastorianus
agccgctcacattccaaagggtact

SEQ ID NO: 63521 - DNA, 25 bp, Saccharomyces pastorianus
gtctgccggccaatgggttgccatt

SEQ ID NO: 63522 - DNA, 25 bp, Saccharomyces pastorianus
aaggccatgggttacagagtcgtcg

SEQ ID NO: 63523 - DNA, 25 bp, Saccharomyces pastorianus
ctggcctttgccagtcaagctacca

SEQ ID NO: 63524 - DNA, 25 bp, Saccharomyces pastorianus
catgggttacagagtcgtcggtatt

SEQ ID NO: 63525 - DNA, 25 bp, Saccharomyces pastorianus
ctgacttggctgaatgtgctccagt

SEQ ID NO: 63526 - DNA, 25 bp, Saccharomyces pastorianus
gaatgtgctccagtcttgtgtgctg

SEQ ID NO: 63527 - DNA, 25 bp, Saccharomyces pastorianus
gctaacttgtctgccggccaatggg

SEQ ID NO: 63528 - DNA, 25 bp, Saccharomyces pastorianus
tttgaagtccgctaacttgtctgcc

SEQ ID NO: 63529 - DNA, 25 bp, Saccharomyces pastorianus
gaagttttcatcgatttcactactg

SEQ ID NO: 63530 - DNA, 25 bp, Saccharomyces pastorianus
aacacactcagtgggcagtttccat

SEQ ID NO: 63531 - DNA, 25 bp, Saccharomyces pastorianus
ggtaactctatctgagacggcggaa

SEQ ID NO: 63532 - DNA, 25 bp, Saccharomyces pastorianus
tatgagcacttccttttcagacgaa

SEQ ID NO: 63533 - DNA, 25 bp, Saccharomyces pastorianus
aaacgatcgcacgttgcacgttgaa

SEQ ID NO: 63534 - DNA, 25 bp, Saccharomyces pastorianus
gcctctgaggttttcagcgtccaaa

SEQ ID NO: 63535 - DNA, 25 bp, Saccharomyces pastorianus
taaaagacagtaccccattgcccga

SEQ ID NO: 63536 - DNA, 25 bp, Saccharomyces pastorianus
agacgcgctttcttcatttgatgaa

SEQ ID NO: 63537 - DNA, 25 bp, Saccharomyces pastorianus
tttccatactttacaagaccccgat

SEQ ID NO: 63538 - DNA, 25 bp, Saccharomyces pastorianus
gagttttctaactcagcctctgagg

SEQ ID NO: 63539 - DNA, 25 bp, Saccharomyces pastorianus
cgcttatcggttactctgtcaacat

SEQ ID NO: 63540 - DNA, 25 bp, Saccharomyces pastorianus
aaggaattgtggcatttccctgctc

SEQ ID NO: 63541 - DNA, 25 bp, Saccharomyces pastorianus
gttatcgaccaatacaacaaatcaa

SEQ ID NO: 63542 - DNA, 25 bp, Saccharomyces pastorianus
gttcgctgttatcgaccaatacaac

SEQ ID NO: 63543 - DNA, 25 bp, Saccharomyces pastorianus
aacaaatcaacttactcggcagcaa

SEQ ID NO: 63544 - DNA, 25 bp, Saccharomyces pastorianus
gaaacgaaaacgttcgagttcgctg

SEQ ID NO: 63545 - DNA, 25 bp, Saccharomyces pastorianus
gagcagcatgtattttggcaaccag

SEQ ID NO: 63546 - DNA, 25 bp, Saccharomyces pastorianus
gttcgagttcgctgttatcgaccaa

SEQ ID NO: 63547 - DNA, 25 bp, Saccharomyces pastorianus
gaccagtttaatttatatgatgagc

SEQ ID NO: 63548 - DNA, 25 bp, Saccharomyces pastorianus
gataaatttatcgaccagtttaatt

SEQ ID NO: 63549 - DNA, 25 bp, Saccharomyces pastorianus
aggccaaaacaatcaagagctgtat

SEQ ID NO: 63550 - DNA, 25 bp, Saccharomyces pastorianus
cttactcggcagcaaatacaaaggc

SEQ ID NO: 63551 - DNA, 25 bp, Saccharomyces pastorianus
atgtattttggcaaccagcagaaaa

SEQ ID NO: 63552 - DNA, 25 bp, Saccharomyces pastorianus
gtacacacctgaactaatgaccgct

SEQ ID NO: 63553 - DNA, 25 bp, Saccharomyces pastorianus
ggcggagagtttacaggcctcccaa

SEQ ID NO: 63554 - DNA, 25 bp, Saccharomyces pastorianus
gcaccatcgatatgggcccacatga

SEQ ID NO: 63555 - DNA, 25 bp, Saccharomyces pastorianus
gggacagttctttatacttccaact

SEQ ID NO: 63556 - DNA, 25 bp, Saccharomyces pastorianus
agactgtgatctgccaggatcccga

SEQ ID NO: 63557 - DNA, 25 bp, Saccharomyces pastorianus
gaggcccgtcaccaagagtagatct

SEQ ID NO: 63558 - DNA, 25 bp, Saccharomyces pastorianus
aacttactagacactttcggcggca

SEQ ID NO: 63559 - DNA, 25 bp, Saccharomyces pastorianus
ataacacgacttccatactggcggg

SEQ ID NO: 63560 - DNA, 25 bp, Saccharomyces pastorianus
aatcggcagactaccggaactggat

SEQ ID NO: 63561 - DNA, 25 bp, Saccharomyces pastorianus
gaccgcttccaccatcgaaatagaa

SEQ ID NO: 63562 - DNA, 25 bp, Saccharomyces pastorianus
taagcacatccatatctctgtcttg

SEQ ID NO: 63563 - DNA, 25 bp, Saccharomyces pastorianus
ttgctagtggaaacggctcaactgc

SEQ ID NO: 63564 - DNA, 25 bp, Saccharomyces pastorianus
tacattgtaccaccagagggccgta

SEQ ID NO: 63565 - DNA, 25 bp, Saccharomyces pastorianus
gaggtactactttgaggcggtgtcc

SEQ ID NO: 63566 - DNA, 25 bp, Saccharomyces pastorianus
gaggatttccgcgaagtacaaactg

SEQ ID NO: 63567 - DNA, 25 bp, Saccharomyces pastorianus
gagcacgatggagcacacacctgat

SEQ ID NO: 63568 - DNA, 25 bp, Saccharomyces pastorianus
gggataacaactaccaagacctatt

SEQ ID NO: 63569 - DNA, 25 bp, Saccharomyces pastorianus
taccgagatcgtgactagactacaa

SEQ ID NO: 63570 - DNA, 25 bp, Saccharomyces pastorianus
gggacattacagtttcaccacttaa

SEQ ID NO: 63571 - DNA, 25 bp, Saccharomyces pastorianus
gggccgtatacactggcacgataat

SEQ ID NO: 63572 - DNA, 25 bp, Saccharomyces pastorianus
gtgtccggccaagagtgtaccgaga

SEQ ID NO: 63573 - DNA, 25 bp, Saccharomyces pastorianus
aacattcatcgtcaagcgttgctag

SEQ ID NO: 63574 - DNA, 25 bp, Saccharomyces pastorianus
tagcacgcccaatgaggatcacaaa

SEQ ID NO: 63575 - DNA, 25 bp, Saccharomyces pastorianus
agacaaacggcgtgccccaagagat

SEQ ID NO: 63576 - DNA, 25 bp, Saccharomyces pastorianus
ttcccagatttctaccgtcagtgaa

SEQ ID NO: 63577 - DNA, 25 bp, Saccharomyces pastorianus
gtttccagtgtgatacctgacttat

SEQ ID NO: 63578 - DNA, 25 bp, Saccharomyces pastorianus
atccacactgtctcaagtgaccaag

SEQ ID NO: 63579 - DNA, 25 bp, Saccharomyces pastorianus
aatcagactcatactactcggcagc

SEQ ID NO: 63580 - DNA, 25 bp, Saccharomyces pastorianus
agaaacttacttgaccaggccacta

SEQ ID NO: 63581 - DNA, 25 bp, Saccharomyces pastorianus
ggtccaccccaaaatgttggtcatt

SEQ ID NO: 63582 - DNA, 25 bp, Saccharomyces pastorianus
gacgacacgttaaaggctgctcata

SEQ ID NO: 63583 - DNA, 25 bp, Saccharomyces pastorianus
tgatatcgatacactgaaccagctg

SEQ ID NO: 63584 - DNA, 25 bp, Saccharomyces pastorianus
gatgagcccaatacgttctgagaca

SEQ ID NO: 63585 - DNA, 25 bp, Saccharomyces pastorianus
aagactgcgttcagcgttggtgccg

SEQ ID NO: 63586 - DNA, 25 bp, Saccharomyces pastorianus
cgagccatgctgtgataggatccta

SEQ ID NO: 63587 - DNA, 25 bp, Saccharomyces pastorianus
gaaacacagaaaccgctttggagct

SEQ ID NO: 63588 - DNA, 25 bp, Saccharomyces pastorianus
aatgtgccctgatcaaatactccca

SEQ ID NO: 63589 - DNA, 25 bp, Saccharomyces pastorianus
ggatccatccgcacagcaagggaga

SEQ ID NO: 63590 - DNA, 25 bp, Saccharomyces pastorianus
atgccttccggtatgagtccctgga

SEQ ID NO: 63591 - DNA, 25 bp, Saccharomyces pastorianus
ggagaatacctgctgggccgtcaat

SEQ ID NO: 63592 - DNA, 25 bp, Saccharomyces pastorianus
attggcactgtcttcgtgggcgtca

SEQ ID NO: 63593 - DNA, 25 bp, Saccharomyces pastorianus
gggacattgctctacacgacgatgg

SEQ ID NO: 63594 - DNA, 25 bp, Saccharomyces pastorianus
gagcctcatcgccaatacatggaga

SEQ ID NO: 63595 - DNA, 25 bp, Saccharomyces pastorianus
gtgcgggccaacaaagactgcgttc

SEQ ID NO: 63596 - DNA, 25 bp, Saccharomyces pastorianus
gcggcaccatcgacgatttgctgaa

SEQ ID NO: 63597 - DNA, 25 bp, Saccharomyces pastorianus
gtttggttccatggcgagctcgaat

SEQ ID NO: 63598 - DNA, 25 bp, Saccharomyces pastorianus
aagagcaagttcacacacctggtac

SEQ ID NO: 63599 - DNA, 25 bp, Saccharomyces pastorianus
tggagaataacgcaccggccgataa

SEQ ID NO: 63600 - DNA, 25 bp, Saccharomyces pastorianus
gttcccttcgtccaagatacgcaaa

SEQ ID NO: 63601 - DNA, 25 bp, Saccharomyces pastorianus
atcaagtgcaaagcctctccaaatt

SEQ ID NO: 63602 - DNA, 25 bp, Saccharomyces pastorianus
aaattgtccggccacgacatgatca

SEQ ID NO: 63603 - DNA, 25 bp, Saccharomyces pastorianus
cacctggtacagaattccctttgtt

SEQ ID NO: 63604 - DNA, 25 bp, Saccharomyces pastorianus
ggactcacacgcattgcacgtttgg

SEQ ID NO: 63605 - DNA, 25 bp, Saccharomyces pastorianus
tgcgaagaccaagacccatgcgtga

SEQ ID NO: 63606 - DNA, 25 bp, Saccharomyces pastorianus
gagaccacggacttattcgagataa

SEQ ID NO: 63607 - DNA, 25 bp, Saccharomyces pastorianus
gttctttgcaacttcttgttttcca

SEQ ID NO: 63608 - DNA, 25 bp, Saccharomyces pastorianus
gtggcgctggatttggtcataaatt

SEQ ID NO: 63609 - DNA, 25 bp, Saccharomyces pastorianus
aatggagcctcgttctttgcaactt

SEQ ID NO: 63610 - DNA, 25 bp, Saccharomyces pastorianus
agcctcgttctttgcaacttcttgt

SEQ ID NO: 63611 - DNA, 25 bp, Saccharomyces pastorianus
tgttttccattaactgtggcgctgg

SEQ ID NO: 63612 - DNA, 25 bp, Saccharomyces pastorianus
ggtcataaattggtcatcaggagaa

SEQ ID NO: 63613 - DNA, 25 bp, Saccharomyces pastorianus
actgtggcgctggatttggtcataa

SEQ ID NO: 63614 - DNA, 25 bp, Saccharomyces pastorianus
gcaacttcttgttttccattaactg

SEQ ID NO: 63615 - DNA, 25 bp, Saccharomyces pastorianus
ttaactgtggcgctggatttggtca

SEQ ID NO: 63616 - DNA, 25 bp, Saccharomyces pastorianus
gtcatcaggagaatcgattttgatt

SEQ ID NO: 63617 - DNA, 25 bp, Saccharomyces pastorianus
ggatttggtcataaattggtcatca

SEQ ID NO: 63618 - DNA, 25 bp, Saccharomyces pastorianus
gcaactgctaactgatgaaaacgta

SEQ ID NO: 63619 - DNA, 25 bp, Saccharomyces pastorianus
aagagattggccctgactgaccctc

SEQ ID NO: 63620 - DNA, 25 bp, Saccharomyces pastorianus
aacgccactgggatgcgtatatcct

SEQ ID NO: 63621 - DNA, 25 bp, Saccharomyces pastorianus
gtagctttgccattaaagccccaga

SEQ ID NO: 63622 - DNA, 25 bp, Saccharomyces pastorianus
gaaaacattcctggtttcttgaaag

SEQ ID NO: 63623 - DNA, 25 bp, Saccharomyces pastorianus
ggttataccaccactgattacacct

SEQ ID NO: 63624 - DNA, 25 bp, Saccharomyces pastorianus
catggagttgattgagcccgaatta

SEQ ID NO: 63625 - DNA, 25 bp, Saccharomyces pastorianus
ttatggttgtattttattcgacgac

SEQ ID NO: 63626 - DNA, 25 bp, Saccharomyces pastorianus
gacattcgtcaaaatatatccgttg

SEQ ID NO: 63627 - DNA, 25 bp, Saccharomyces pastorianus
gactgaccctctgaaatacgtgcta

SEQ ID NO: 63628 - DNA, 25 bp, Saccharomyces pastorianus
taaagccccagatttacttactcaa

SEQ ID NO: 63629 - DNA, 25 bp, Saccharomyces pastorianus
ccagtaataccgttggtgcagccaa

SEQ ID NO: 63630 - DNA, 25 bp, Saccharomyces pastorianus
tccagtatgaacattacgcaagttt

SEQ ID NO: 63631 - DNA, 25 bp, Saccharomyces pastorianus
atcaccatttccagtaataccgttg

SEQ ID NO: 63632 - DNA, 25 bp, Saccharomyces pastorianus
gaggctaagaatttccagtatgaac

SEQ ID NO: 63633 - DNA, 25 bp, Saccharomyces pastorianus
tcacaatcatcaccatttccagtaa

SEQ ID NO: 63634 - DNA, 25 bp, Saccharomyces pastorianus
tataccgttcttcacaatcatcacc

SEQ ID NO: 63635 - DNA, 25 bp, Saccharomyces pastorianus
tgtcggcaggcctgttggaaattat

SEQ ID NO: 63636 - DNA, 25 bp, Saccharomyces pastorianus
atatgtttcggaatgtcggcaggcc

SEQ ID NO: 63637 - DNA, 25 bp, Saccharomyces pastorianus
gccccaaggagaacatatacgtatt

SEQ ID NO: 63638 - DNA, 25 bp, Saccharomyces pastorianus
ggcctgttggaaattataccgttct

SEQ ID NO: 63639 - DNA, 25 bp, Saccharomyces pastorianus
tggtgcagccaagtggtgctcctct

SEQ ID NO: 63640 - DNA, 25 bp, Saccharomyces pastorianus
aaatggctcctgtactcgatgtcaa

SEQ ID NO: 63641 - DNA, 25 bp, Saccharomyces pastorianus
ttttatttcgtttctttgccgcagt

SEQ ID NO: 63642 - DNA, 25 bp, Saccharomyces pastorianus
gtttccactaccatttgcaattcaa

SEQ ID NO: 63643 - DNA, 25 bp, Saccharomyces pastorianus
actcgcgtcaactttcagatgtcta

SEQ ID NO: 63644 - DNA, 25 bp, Saccharomyces pastorianus
gccgcagtttttcatctttgtcatc

SEQ ID NO: 63645 - DNA, 25 bp, Saccharomyces pastorianus
gagcttcacgccatttgtttacaga

SEQ ID NO: 63646 - DNA, 25 bp, Saccharomyces pastorianus
tactttgtcgacgtgctacacttga

SEQ ID NO: 63647 - DNA, 25 bp, Saccharomyces pastorianus
ggtatgtctctatagcctttttctt

SEQ ID NO: 63648 - DNA, 25 bp, Saccharomyces pastorianus
gcagtcctggaatgggcttctacta

SEQ ID NO: 63649 - DNA, 25 bp, Saccharomyces pastorianus
gatggcttacctgcaaactgttctc

SEQ ID NO: 63650 - DNA, 25 bp, Saccharomyces pastorianus
gggtgcctcgctgtggattattaag

SEQ ID NO: 63651 - DNA, 25 bp, Saccharomyces pastorianus
gcacaacctgattggtactaccaca

SEQ ID NO: 63652 - DNA, 25 bp, Saccharomyces pastorianus
atagtttctggcacgaccttgagtc

SEQ ID NO: 63653 - DNA, 25 bp, Saccharomyces pastorianus
atccaagaccaatcgggccataagg

SEQ ID NO: 63654 - DNA, 25 bp, Saccharomyces pastorianus
atatgcgtcgactccactcgcggag

SEQ ID NO: 63655 - DNA, 25 bp, Saccharomyces pastorianus
atgtcaactagagcacaacctgatt

SEQ ID NO: 63656 - DNA, 25 bp, Saccharomyces pastorianus
caaggccccgatagtgcaatggtat

SEQ ID NO: 63657 - DNA, 25 bp, Saccharomyces pastorianus
ttgagtcgtgtcaccagatcatctg

SEQ ID NO: 63658 - DNA, 25 bp, Saccharomyces pastorianus
gtactaccacagacatccatatgcg

SEQ ID NO: 63659 - DNA, 25 bp, Saccharomyces pastorianus
gctcgtcaagcatagtttctggcac

SEQ ID NO: 63660 - DNA, 25 bp, Saccharomyces pastorianus
gggtcgaaaacttggatggcataca

SEQ ID NO: 63661 - DNA, 25 bp, Saccharomyces pastorianus
gagcacaagcagcaatgtcaactag

SEQ ID NO: 63662 - DNA, 25 bp, Saccharomyces pastorianus
tgcggcgattcgttgggtacagcaa

SEQ ID NO: 63663 - DNA, 25 bp, Saccharomyces pastorianus
cgggactcttgaccattatttccaa

SEQ ID NO: 63664 - DNA, 25 bp, Saccharomyces pastorianus
gcaacgaggtctgaacggtcatcat

SEQ ID NO: 63665 - DNA, 25 bp, Saccharomyces pastorianus
ggtctgaacggtcatcatcactaaa

SEQ ID NO: 63666 - DNA, 25 bp, Saccharomyces pastorianus
accttcttagtatggtcagcctcac

SEQ ID NO: 63667 - DNA, 25 bp, Saccharomyces pastorianus
tcatcatcactaaacgttgacgaga

SEQ ID NO: 63668 - DNA, 25 bp, Saccharomyces pastorianus
ttatttccaaggaccttcttagtat

SEQ ID NO: 63669 - DNA, 25 bp, Saccharomyces pastorianus
cagcctcactcccaatgagtttgga

SEQ ID NO: 63670 - DNA, 25 bp, Saccharomyces pastorianus
ttagtatggtcagcctcactcccaa

SEQ ID NO: 63671 - DNA, 25 bp, Saccharomyces pastorianus
ttgggtacagcaacgaggtctgaac

SEQ ID NO: 63672 - DNA, 25 bp, Saccharomyces pastorianus
atgcatgcggcgattcgttgggtac

SEQ ID NO: 63673 - DNA, 25 bp, Saccharomyces pastorianus
gattcagcttgttggtagcagcgtt

SEQ ID NO: 63674 - DNA, 25 bp, Saccharomyces pastorianus
aaacgagttattttccagtgctaga

SEQ ID NO: 63675 - DNA, 25 bp, Saccharomyces pastorianus
attttccagtgctagattcaacaaa

SEQ ID NO: 63676 - DNA, 25 bp, Saccharomyces pastorianus
gacttttctggattcagcttgttgg

SEQ ID NO: 63677 - DNA, 25 bp, Saccharomyces pastorianus
aaattctccaattctgacttttctg

SEQ ID NO: 63678 - DNA, 25 bp, Saccharomyces pastorianus
tgtaaatcggaagccctttcaaacg

SEQ ID NO: 63679 - DNA, 25 bp, Saccharomyces pastorianus
tcggaagccctttcaaacgagttat

SEQ ID NO: 63680 - DNA, 25 bp, Saccharomyces pastorianus
gagttattttccagtgctagattca

SEQ ID NO: 63681 - DNA, 25 bp, Saccharomyces pastorianus
tccagtgctagattcaacaaaaaca

SEQ ID NO: 63682 - DNA, 25 bp, Saccharomyces pastorianus
aattctgacttttctggattcagct

SEQ ID NO: 63683 - DNA, 25 bp, Saccharomyces pastorianus
cagcttgttggtagcagcgttatct

SEQ ID NO: 63684 - DNA, 25 bp, Saccharomyces pastorianus
ggagaacccatattacaacattgac

SEQ ID NO: 63685 - DNA, 25 bp, Saccharomyces pastorianus
tgggtcagccgcctatactaaaagc

SEQ ID NO: 63686 - DNA, 25 bp, Saccharomyces pastorianus
gactatggactatgctgcgcctgaa

SEQ ID NO: 63687 - DNA, 25 bp, Saccharomyces pastorianus
aagcgggccattcgatgtctttgtt

SEQ ID NO: 63688 - DNA, 25 bp, Saccharomyces pastorianus
gcgcctgaagtccttggcggttcat

SEQ ID NO: 63689 - DNA, 25 bp, Saccharomyces pastorianus
ttaattgactttgggtcagccgcct

SEQ ID NO: 63690 - DNA, 25 bp, Saccharomyces pastorianus
aaaccgcaagacatttgggcactcg

SEQ ID NO: 63691 - DNA, 25 bp, Saccharomyces pastorianus
tgaaaccccagttcatggagagact

SEQ ID NO: 63692 - DNA, 25 bp, Saccharomyces pastorianus
gggtactactctatactattatcta

SEQ ID NO: 63693 - DNA, 25 bp, Saccharomyces pastorianus
gattactactacattgaaaccccag

SEQ ID NO: 63694 - DNA, 25 bp, Saccharomyces pastorianus
gcacttgcacgatcaaggtattgtt

SEQ ID NO: 63695 - DNA, 25 bp, Saccharomyces pastorianus
taagagtcgacgctgttgcacatcc

SEQ ID NO: 63696 - DNA, 25 bp, Saccharomyces pastorianus
gtctttggaaacacttcgaatcatg

SEQ ID NO: 63697 - DNA, 25 bp, Saccharomyces pastorianus
gaaggctccacccacttaaagaaga

SEQ ID NO: 63698 - DNA, 25 bp, Saccharomyces pastorianus
gaggtaccactgttggagctggctt

SEQ ID NO: 63699 - DNA, 25 bp, Saccharomyces pastorianus
agtgacgcagagatcgatagcattc

SEQ ID NO: 63700 - DNA, 25 bp, Saccharomyces pastorianus
gatctcctacaggtagagtgacgca

SEQ ID NO: 63701 - DNA, 25 bp, Saccharomyces pastorianus
cgacagggcaactttgggccaggaa

SEQ ID NO: 63702 - DNA, 25 bp, Saccharomyces pastorianus
acggtacccttttacaagatcatca

SEQ ID NO: 63703 - DNA, 25 bp, Saccharomyces pastorianus
gggccaggaaattaccatcgaaggt

SEQ ID NO: 63704 - DNA, 25 bp, Saccharomyces pastorianus
atccagctcctcatgacaacaagcg

SEQ ID NO: 63705 - DNA, 25 bp, Saccharomyces pastorianus
acaagcgctctatctttgtaggtaa

SEQ ID NO: 63706 - DNA, 25 bp, Saccharomyces pastorianus
tggctccgggatgttttgcaagtaa

SEQ ID NO: 63707 - DNA, 25 bp, Saccharomyces pastorianus
gtagttcaagttgctgttctgccag

SEQ ID NO: 63708 - DNA, 25 bp, Saccharomyces pastorianus
agaacgttgcttctggattgcgcgt

SEQ ID NO: 63709 - DNA, 25 bp, Saccharomyces pastorianus
aatttctgccaatcgctttctaaca

SEQ ID NO: 63710 - DNA, 25 bp, Saccharomyces pastorianus
gtagttcagtgccagcgaatgccaa

SEQ ID NO: 63711 - DNA, 25 bp, Saccharomyces pastorianus
agaataccccatcggatgtggcttc

SEQ ID NO: 63712 - DNA, 25 bp, Saccharomyces pastorianus
tcaatacagatgatccggcctccgt

SEQ ID NO: 63713 - DNA, 25 bp, Saccharomyces pastorianus
ctccgtctcgttaatcctggagaac

SEQ ID NO: 63714 - DNA, 25 bp, Saccharomyces pastorianus
atgtggcttccaatgcaaatgacta

SEQ ID NO: 63715 - DNA, 25 bp, Saccharomyces pastorianus
gaccggtaccaacctgctgtaaaga

SEQ ID NO: 63716 - DNA, 25 bp, Saccharomyces pastorianus
gggcaggacaataccattgcaccca

SEQ ID NO: 63717 - DNA, 25 bp, Saccharomyces pastorianus
aattctgccactttcgacgaagttg

SEQ ID NO: 63718 - DNA, 25 bp, Saccharomyces pastorianus
ctattcctaccctgactttagacat

SEQ ID NO: 63719 - DNA, 25 bp, Saccharomyces pastorianus
acatccccaatcagacgttactgtg

SEQ ID NO: 63720 - DNA, 25 bp, Saccharomyces pastorianus
ccatacttcaacactttggtccgta

SEQ ID NO: 63721 - DNA, 25 bp, Saccharomyces pastorianus
gaaatgcacaatttgccggcagagc

SEQ ID NO: 63722 - DNA, 25 bp, Saccharomyces pastorianus
caacacgttgtatgatggctgccca

SEQ ID NO: 63723 - DNA, 25 bp, Saccharomyces pastorianus
tatctatacacatttcacatcccca

SEQ ID NO: 63724 - DNA, 25 bp, Saccharomyces pastorianus
tggctgcccaatatttctattctgg

SEQ ID NO: 63725 - DNA, 25 bp, Saccharomyces pastorianus
taaccaaggacccaaattctgccac

SEQ ID NO: 63726 - DNA, 25 bp, Saccharomyces pastorianus
gaaccattaagtttgactcaccgtg

SEQ ID NO: 63727 - DNA, 25 bp, Saccharomyces pastorianus
acttttgttcctacagactctgaca

SEQ ID NO: 63728 - DNA, 25 bp, Saccharomyces pastorianus
tgatgcattacacgcgaagagactt

SEQ ID NO: 63729 - DNA, 25 bp, Saccharomyces pastorianus
taactgggaggtcggtgtacatatc

SEQ ID NO: 63730 - DNA, 25 bp, Saccharomyces pastorianus
ggtactgatttgtgttctctgaaac

SEQ ID NO: 63731 - DNA, 25 bp, Saccharomyces pastorianus
ttgaatttggcatctcctgaggtta

SEQ ID NO: 63732 - DNA, 25 bp, Saccharomyces pastorianus
ggtacatctgtctacttggtggata

SEQ ID NO: 63733 - DNA, 25 bp, Saccharomyces pastorianus
ggtgccgcaagaggtacatctgtct

SEQ ID NO: 63734 - DNA, 25 bp, Saccharomyces pastorianus
atcgccgacgttactcattttgtta

SEQ ID NO: 63735 - DNA, 25 bp, Saccharomyces pastorianus
gagagctctgttggacttgtctata

SEQ ID NO: 63736 - DNA, 25 bp, Saccharomyces pastorianus
aaaagagactggaagccggcgcctt

SEQ ID NO: 63737 - DNA, 25 bp, Saccharomyces pastorianus
aaatactgccctagacgcggaaggt

SEQ ID NO: 63738 - DNA, 25 bp, Saccharomyces pastorianus
gatagtgaaacctcggatccaaacg

SEQ ID NO: 63739 - DNA, 25 bp, Saccharomyces pastorianus
ttccaagatcgggttttgctccaaa

SEQ ID NO: 63740 - DNA, 25 bp, Saccharomyces pastorianus
aacggcatcaatcacatgtctcaat

SEQ ID NO: 63741 - DNA, 25 bp, Saccharomyces pastorianus
tcccaaagagacgttattccccata

SEQ ID NO: 63742 - DNA, 25 bp, Saccharomyces pastorianus
atgaggccttatgctggtcaaccac

SEQ ID NO: 63743 - DNA, 25 bp, Saccharomyces pastorianus
gcaaggctaccaacctgcttataag

SEQ ID NO: 63744 - DNA, 25 bp, Saccharomyces pastorianus
gaagcgtacaaccaaatgcctcaaa

SEQ ID NO: 63745 - DNA, 25 bp, Saccharomyces pastorianus
tattccccatagaaacccttcaagg

SEQ ID NO: 63746 - DNA, 25 bp, Saccharomyces pastorianus
gagatttcaggcagtccatccttag

SEQ ID NO: 63747 - DNA, 25 bp, Saccharomyces pastorianus
aagaactatccctgttggtccagat

SEQ ID NO: 63748 - DNA, 25 bp, Saccharomyces pastorianus
cttatttcaacattggcccaagcca

SEQ ID NO: 63749 - DNA, 25 bp, Saccharomyces pastorianus
ttagcatcctcagattactcccaaa

SEQ ID NO: 63750 - DNA, 25 bp, Saccharomyces pastorianus
actagcatccaatgagtccttcact

SEQ ID NO: 63751 - DNA, 25 bp, Saccharomyces pastorianus
agaggctatgaatctgcatttgcaa

SEQ ID NO: 63752 - DNA, 25 bp, Saccharomyces pastorianus
gaaatcgcctgttgacttttggaat

SEQ ID NO: 63753 - DNA, 25 bp, Saccharomyces pastorianus
ttcttcctcggactcgaacttacta

SEQ ID NO: 63754 - DNA, 25 bp, Saccharomyces pastorianus
aacacgagagatcgtacttcccttg

SEQ ID NO: 63755 - DNA, 25 bp, Saccharomyces pastorianus
gaaaccaagccaactcaggcaagtg

SEQ ID NO: 63756 - DNA, 25 bp, Saccharomyces pastorianus
ggttccataatttcctcaacgggca

SEQ ID NO: 63757 - DNA, 25 bp, Saccharomyces pastorianus
ggctattcaacaaccattaacgcta

SEQ ID NO: 63758 - DNA, 25 bp, Saccharomyces pastorianus
attaacgctatggacgattcgaaat

SEQ ID NO: 63759 - DNA, 25 bp, Saccharomyces pastorianus
gaacttactagattgtggctattca

SEQ ID NO: 63760 - DNA, 25 bp, Saccharomyces pastorianus
gagtccttcactctttactgtggaa

SEQ ID NO: 63761 - DNA, 25 bp, Saccharomyces pastorianus
gaaatcaacttggagttcagtggaa

SEQ ID NO: 63762 - DNA, 25 bp, Saccharomyces pastorianus
aaagtgccagcggaaatttgttaga

SEQ ID NO: 63763 - DNA, 25 bp, Saccharomyces pastorianus
atatcgacccaagactttcggtggt

SEQ ID NO: 63764 - DNA, 25 bp, Saccharomyces pastorianus
tacagctggacaagggtctcttgaa

SEQ ID NO: 63765 - DNA, 25 bp, Saccharomyces pastorianus
gcgtattcagactagttccattcaa

SEQ ID NO: 63766 - DNA, 25 bp, Saccharomyces pastorianus
aaaagggccattttacagctggaca

SEQ ID NO: 63767 - DNA, 25 bp, Saccharomyces pastorianus
gaggatgaagctaccattcataaaa

SEQ ID NO: 63768 - DNA, 25 bp, Saccharomyces pastorianus
gagttattgcccgagactcaactaa

SEQ ID NO: 63769 - DNA, 25 bp, Saccharomyces pastorianus
aggccagcaataggatacaagaact

SEQ ID NO: 63770 - DNA, 25 bp, Saccharomyces pastorianus
tcaccaaagggcatgcacaaacggt

SEQ ID NO: 63771 - DNA, 25 bp, Saccharomyces pastorianus
aaaagttcgctgcaaaagggccatt

SEQ ID NO: 63772 - DNA, 25 bp, Saccharomyces pastorianus
agtagacctacctccacaagctgag

SEQ ID NO: 63773 - DNA, 25 bp, Saccharomyces pastorianus
atgggccacgcttaaacataacggt

SEQ ID NO: 63774 - DNA, 25 bp, Saccharomyces pastorianus
tgcgttattagaaagtgaccatgcc

SEQ ID NO: 63775 - DNA, 25 bp, Saccharomyces pastorianus
tgaccatgccaagaatcctgttttt

SEQ ID NO: 63776 - DNA, 25 bp, Saccharomyces pastorianus
ttctttaacgatttcttacaggtgt

SEQ ID NO: 63777 - DNA, 25 bp, Saccharomyces pastorianus
gttttctcgttgtgatttcaccaag

SEQ ID NO: 63778 - DNA, 25 bp, Saccharomyces pastorianus
gatttcaccaagatgttcgactatt

SEQ ID NO: 63779 - DNA, 25 bp, Saccharomyces pastorianus
aactatactacgacggcaacccagt

SEQ ID NO: 63780 - DNA, 25 bp, Saccharomyces pastorianus
acataacggtgtcatatttcctcca

SEQ ID NO: 63781 - DNA, 25 bp, Saccharomyces pastorianus
gatgttcgactatttccaagtgcaa

SEQ ID NO: 63782 - DNA, 25 bp, Saccharomyces pastorianus
cgggttcttcgctgcgttattagaa

SEQ ID NO: 63783 - DNA, 25 bp, Saccharomyces pastorianus
cccgtattctgtttatttgcgctta

SEQ ID NO: 63784 - DNA, 25 bp, Saccharomyces pastorianus
cggactatttgtttgcttcggatta

SEQ ID NO: 63785 - DNA, 25 bp, Saccharomyces pastorianus
attctcatcaactcttccatttttt

SEQ ID NO: 63786 - DNA, 25 bp, Saccharomyces pastorianus
gattgttccgatttttagtggcctt

SEQ ID NO: 63787 - DNA, 25 bp, Saccharomyces pastorianus
gagtagttcctttcactgtttcaag

SEQ ID NO: 63788 - DNA, 25 bp, Saccharomyces pastorianus
gagactaccacatggcttgatcata

SEQ ID NO: 63789 - DNA, 25 bp, Saccharomyces pastorianus
tatataatcggtgccgtcctttatg

SEQ ID NO: 63790 - DNA, 25 bp, Saccharomyces pastorianus
agctggactatctcggtatttgcat

SEQ ID NO: 63791 - DNA, 25 bp, Saccharomyces pastorianus
attactctcagctttggtgttgcat

SEQ ID NO: 63792 - DNA, 25 bp, Saccharomyces pastorianus
gttatcgcagccttatgtcacatga

SEQ ID NO: 63793 - DNA, 25 bp, Saccharomyces pastorianus
ttccccgagaaggtttatcctggca

SEQ ID NO: 63794 - DNA, 25 bp, Saccharomyces pastorianus
tgaaactacacctgagcctcaaact

SEQ ID NO: 63795 - DNA, 25 bp, Saccharomyces pastorianus
aaatgcctgatgtcttatccaataa

SEQ ID NO: 63796 - DNA, 25 bp, Saccharomyces pastorianus
agctatcacagttcctcaaattcgt

SEQ ID NO: 63797 - DNA, 25 bp, Saccharomyces pastorianus
ttcagtattttccagcaacagcgtt

SEQ ID NO: 63798 - DNA, 25 bp, Saccharomyces pastorianus
gaggccgggctcaaagattcaattc

SEQ ID NO: 63799 - DNA, 25 bp, Saccharomyces pastorianus
aagcgctgcaattgtgtcgtctgag

SEQ ID NO: 63800 - DNA, 25 bp, Saccharomyces pastorianus
gtgtcgtctgagcttaagtccaata

SEQ ID NO: 63801 - DNA, 25 bp, Saccharomyces pastorianus
agtactgcatcttccattcttttag

SEQ ID NO: 63802 - DNA, 25 bp, Saccharomyces pastorianus
gcattagcagcgttggaagacatca

SEQ ID NO: 63803 - DNA, 25 bp, Saccharomyces pastorianus
ggacactcataaggaaagcgctgca

SEQ ID NO: 63804 - DNA, 25 bp, Saccharomyces pastorianus
ttaagtccaatagcgcttcgttaga

SEQ ID NO: 63805 - DNA, 25 bp, Saccharomyces pastorianus
tttaaagacccaaaatcgccagcag

SEQ ID NO: 63806 - DNA, 25 bp, Saccharomyces pastorianus
ttctggttgataatcagctggtatc

SEQ ID NO: 63807 - DNA, 25 bp, Saccharomyces pastorianus
gaaagcaacttcttgtctacagtca

SEQ ID NO: 63808 - DNA, 25 bp, Saccharomyces pastorianus
ggttcaaatttcgacctaccgagcg

SEQ ID NO: 63809 - DNA, 25 bp, Saccharomyces pastorianus
gaggactttgcaagccgatgtaaaa

SEQ ID NO: 63810 - DNA, 25 bp, Saccharomyces pastorianus
atcgccagcagagtgtatccaaagt

SEQ ID NO: 63811 - DNA, 25 bp, Saccharomyces pastorianus
gtgagccatatcaagttctggttga

SEQ ID NO: 63812 - DNA, 25 bp, Saccharomyces pastorianus
cgtttaaatttcgtgagccatatca

SEQ ID NO: 63813 - DNA, 25 bp, Saccharomyces pastorianus
tcgacctaccgagcgggttaaagag

SEQ ID NO: 63814 - DNA, 25 bp, Saccharomyces pastorianus
aaaagtcatgattacacagtgttgc

SEQ ID NO: 63815 - DNA, 25 bp, Saccharomyces pastorianus
tcttgtctacagtcacacgtttaaa

SEQ ID NO: 63816 - DNA, 25 bp, Saccharomyces pastorianus
gtagtactagttcccaatcacaaga

SEQ ID NO: 63817 - DNA, 25 bp, Saccharomyces pastorianus
aagctatatgcttcttccttttcgt

SEQ ID NO: 63818 - DNA, 25 bp, Saccharomyces pastorianus
aagttccacgacgtcacaaagctca

SEQ ID NO: 63819 - DNA, 25 bp, Saccharomyces pastorianus
acttccgtaatatactcaaccgctc

SEQ ID NO: 63820 - DNA, 25 bp, Saccharomyces pastorianus
acactgagggtggttctacaatatt

SEQ ID NO: 63821 - DNA, 25 bp, Saccharomyces pastorianus
ttcttccttttcgtccaatcatggg

SEQ ID NO: 63822 - DNA, 25 bp, Saccharomyces pastorianus
aatcatgggccttcgtccggaagtg

SEQ ID NO: 63823 - DNA, 25 bp, Saccharomyces pastorianus
gatactaatccgttcgatgactcaa

SEQ ID NO: 63824 - DNA, 25 bp, Saccharomyces pastorianus
acatcacagagctcaagttccacga

SEQ ID NO: 63825 - DNA, 25 bp, Saccharomyces pastorianus
gttggagccgtagtaattgcacttg

SEQ ID NO: 63826 - DNA, 25 bp, Saccharomyces pastorianus
ggtacagcagcatcagactcgacga

SEQ ID NO: 63827 - DNA, 25 bp, Saccharomyces pastorianus
ttgtcgcaagcaagcacctacacgt

SEQ ID NO: 63828 - DNA, 25 bp, Saccharomyces pastorianus
cgacttttcacaagacgatacgtat

SEQ ID NO: 63829 - DNA, 25 bp, Saccharomyces pastorianus
ttttagctcactgccttccgacttt

SEQ ID NO: 63830 - DNA, 25 bp, Saccharomyces pastorianus
cacgttggtggactgttttagctca

SEQ ID NO: 63831 - DNA, 25 bp, Saccharomyces pastorianus
tggactgttttagctcactgccttc

SEQ ID NO: 63832 - DNA, 25 bp, Saccharomyces pastorianus
aaattcagtttgcttttggctttat

SEQ ID NO: 63833 - DNA, 25 bp, Saccharomyces pastorianus
gtttgcttttggctttattgcccgc

SEQ ID NO: 63834 - DNA, 25 bp, Saccharomyces pastorianus
tggtggactgttttagctcactgcc

SEQ ID NO: 63835 - DNA, 25 bp, Saccharomyces pastorianus
gcaagcacctacacgttggtggact

SEQ ID NO: 63836 - DNA, 25 bp, Saccharomyces pastorianus
ttattgcccgccttgtcgcaagcaa

SEQ ID NO: 63837 - DNA, 25 bp, Saccharomyces pastorianus
gccttccgacttttcacaagacgat

SEQ ID NO: 63838 - DNA, 25 bp, Saccharomyces pastorianus
ggcaaacgaagcactcttcaacaat

SEQ ID NO: 63839 - DNA, 25 bp, Saccharomyces pastorianus
gaagcactcttcaacaatagcgctc

SEQ ID NO: 63840 - DNA, 25 bp, Saccharomyces pastorianus
aatagcgctcattgaacctcgcgga

SEQ ID NO: 63841 - DNA, 25 bp, Saccharomyces pastorianus
aaaaaggcaaacgaagcactcttca

SEQ ID NO: 63842 - DNA, 25 bp, Saccharomyces pastorianus
tagcgctcattgaacctcgcggaga

SEQ ID NO: 63843 - DNA, 25 bp, Saccharomyces pastorianus
acaatagcgctcattgaacctcgcg

SEQ ID NO: 63844 - DNA, 25 bp, Saccharomyces pastorianus
agcgctcattgaacctcgcggagag

SEQ ID NO: 63845 - DNA, 25 bp, Saccharomyces pastorianus
gcactcttcaacaatagcgctcatt

SEQ ID NO: 63846 - DNA, 25 bp, Saccharomyces pastorianus
ctcattgaacctcgcggagaggcga

SEQ ID NO: 63847 - DNA, 25 bp, Saccharomyces pastorianus
atagcgctcattgaacctcgcggag

SEQ ID NO: 63848 - DNA, 25 bp, Saccharomyces pastorianus
actcttcaacaatagcgctcattga

SEQ ID NO: 63849 - DNA, 25 bp, Saccharomyces pastorianus
gaatatggtggttacttgcataaca

SEQ ID NO: 63850 - DNA, 25 bp, Saccharomyces pastorianus
aagttggcaaattcatctctaaggt

SEQ ID NO: 63851 - DNA, 25 bp, Saccharomyces pastorianus
ttactcattgttcccaactttctgg

SEQ ID NO: 63852 - DNA, 25 bp, Saccharomyces pastorianus
ggttcccggacaacctatgacaggg

SEQ ID NO: 63853 - DNA, 25 bp, Saccharomyces pastorianus
ataacaaaaacaccttcaccgtctg

SEQ ID NO: 63854 - DNA, 25 bp, Saccharomyces pastorianus
gagctatgaccatgtttggagaaac

SEQ ID NO: 63855 - DNA, 25 bp, Saccharomyces pastorianus
ggcaaattcatggaagccttcattg

SEQ ID NO: 63856 - DNA, 25 bp, Saccharomyces pastorianus
gttagtattctattacacgattggg

SEQ ID NO: 63857 - DNA, 25 bp, Saccharomyces pastorianus
gacagggcagacttgtggcaaattc

SEQ ID NO: 63858 - DNA, 25 bp, Saccharomyces pastorianus
atgagtgaaatggttcccggacaac

SEQ ID NO: 63859 - DNA, 25 bp, Saccharomyces pastorianus
gaaactttggtatcgagtgggcttt

SEQ ID NO: 63860 - DNA, 25 bp, Saccharomyces pastorianus
accgttcttcttttatcgcaatgca

SEQ ID NO: 63861 - DNA, 25 bp, Saccharomyces pastorianus
accctgggtttgtggttgatctata

SEQ ID NO: 63862 - DNA, 25 bp, Saccharomyces pastorianus
gcattcttttgctgtgggttcaaca

SEQ ID NO: 63863 - DNA, 25 bp, Saccharomyces pastorianus
gttcaacaatgctggctggagtgct

SEQ ID NO: 63864 - DNA, 25 bp, Saccharomyces pastorianus
gctagatcgaacacctaccattgga

SEQ ID NO: 63865 - DNA, 25 bp, Saccharomyces pastorianus
gagatttgacttacgttatggccaa

SEQ ID NO: 63866 - DNA, 25 bp, Saccharomyces pastorianus
ggcacttacaagttcagcgttgttt

SEQ ID NO: 63867 - DNA, 25 bp, Saccharomyces pastorianus
atatgcttttctctgcttactatgc

SEQ ID NO: 63868 - DNA, 25 bp, Saccharomyces pastorianus
gttgtttttcgtttgcgcattcttt

SEQ ID NO: 63869 - DNA, 25 bp, Saccharomyces pastorianus
tgcttactatgcaaccctgggtttg

SEQ ID NO: 63870 - DNA, 25 bp, Saccharomyces pastorianus
aacagccttcatatttacagcaact

SEQ ID NO: 63871 - DNA, 25 bp, Saccharomyces pastorianus
agcttcacttctacaccaactgggt

SEQ ID NO: 63872 - DNA, 25 bp, Saccharomyces pastorianus
ttctgtcgcaaatttgttcgctggt

SEQ ID NO: 63873 - DNA, 25 bp, Saccharomyces pastorianus
gtttgtgtggattgcctacttaaat

SEQ ID NO: 63874 - DNA, 25 bp, Saccharomyces pastorianus
gtatgcctcttacgttatctactta

SEQ ID NO: 63875 - DNA, 25 bp, Saccharomyces pastorianus
taatttctgcatggtgtcactgttc

SEQ ID NO: 63876 - DNA, 25 bp, Saccharomyces pastorianus
aacaacgattggttcttactcaaga

SEQ ID NO: 63877 - DNA, 25 bp, Saccharomyces pastorianus
tgacgacgttaattgcgccgaccat

SEQ ID NO: 63878 - DNA, 25 bp, Saccharomyces pastorianus
tttattttcttgctgttcctttcct

SEQ ID NO: 63879 - DNA, 25 bp, Saccharomyces pastorianus
aaattctgtttggttgtcgtattca

SEQ ID NO: 63880 - DNA, 25 bp, Saccharomyces pastorianus
gtcactgttctctttgacgacgtta

SEQ ID NO: 63881 - DNA, 25 bp, Saccharomyces pastorianus
aactctttcaaccacagtgttcgat

SEQ ID NO: 63882 - DNA, 25 bp, Saccharomyces pastorianus
aaaaccttagtcaccctgaaatcag

SEQ ID NO: 63883 - DNA, 25 bp, Saccharomyces pastorianus
gcccttgttctcgaggcaatttcag

SEQ ID NO: 63884 - DNA, 25 bp, Saccharomyces pastorianus
agacaaaaccaattgcgcccttgtt

SEQ ID NO: 63885 - DNA, 25 bp, Saccharomyces pastorianus
aagcatgaagtcgtgcccgagggaa

SEQ ID NO: 63886 - DNA, 25 bp, Saccharomyces pastorianus
tattactacctctatgccattggga

SEQ ID NO: 63887 - DNA, 25 bp, Saccharomyces pastorianus
aattcgtacgccaatgattacctaa

SEQ ID NO: 63888 - DNA, 25 bp, Saccharomyces pastorianus
ggccaacgatttcgatgccgtaggt

SEQ ID NO: 63889 - DNA, 25 bp, Saccharomyces pastorianus
gagagcttcgagaacgctgtttaag

SEQ ID NO: 63890 - DNA, 25 bp, Saccharomyces pastorianus
gtatatggagtcgtcctgggcacca

SEQ ID NO: 63891 - DNA, 25 bp, Saccharomyces pastorianus
ttgcctgccacattatctgacgatg

SEQ ID NO: 63892 - DNA, 25 bp, Saccharomyces pastorianus
tttttgacgacttgactgcgagaaa

SEQ ID NO: 63893 - DNA, 25 bp, Saccharomyces pastorianus
gcccctgatggcactgtcattgtta

SEQ ID NO: 63894 - DNA, 25 bp, Saccharomyces pastorianus
gcatttctttacctgctttcacgaa

SEQ ID NO: 63895 - DNA, 25 bp, Saccharomyces pastorianus
atcgcgactttgtttacttcatcct

SEQ ID NO: 63896 - DNA, 25 bp, Saccharomyces pastorianus
ttcatccttcttcgctcatgcattt

SEQ ID NO: 63897 - DNA, 25 bp, Saccharomyces pastorianus
gtgctcgtggtcaattatcaagtct

SEQ ID NO: 63898 - DNA, 25 bp, Saccharomyces pastorianus
tgagatagatttcgacattaccgcc

SEQ ID NO: 63899 - DNA, 25 bp, Saccharomyces pastorianus
gtctctactatgatttgttctctga

SEQ ID NO: 63900 - DNA, 25 bp, Saccharomyces pastorianus
atgcgtgtttttgctctgatcgcga

SEQ ID NO: 63901 - DNA, 25 bp, Saccharomyces pastorianus
ggaaactgtttcctctcaagaaagg

SEQ ID NO: 63902 - DNA, 25 bp, Saccharomyces pastorianus
gattcaaggttaacgtggctatcat

SEQ ID NO: 63903 - DNA, 25 bp, Saccharomyces pastorianus
attttcctccaactatgctcctata

SEQ ID NO: 63904 - DNA, 25 bp, Saccharomyces pastorianus
accccgatgcccgtgaatatatttc

SEQ ID NO: 63905 - DNA, 25 bp, Saccharomyces pastorianus
cgactacaaaccaagctgcgtgcat

SEQ ID NO: 63906 - DNA, 25 bp, Saccharomyces pastorianus
atacgccaagaagggtgctctacga

SEQ ID NO: 63907 - DNA, 25 bp, Saccharomyces pastorianus
gggaagtcaattctacctttacaga

SEQ ID NO: 63908 - DNA, 25 bp, Saccharomyces pastorianus
tccaaacttcttccatgcatcagat

SEQ ID NO: 63909 - DNA, 25 bp, Saccharomyces pastorianus
acttggatatgttggtcggctttaa

SEQ ID NO: 63910 - DNA, 25 bp, Saccharomyces pastorianus
gaatctgccaacatttgcttcgaga

SEQ ID NO: 63911 - DNA, 25 bp, Saccharomyces pastorianus
gaaagatattctggaccccgatgcc

SEQ ID NO: 63912 - DNA, 25 bp, Saccharomyces pastorianus
atcaaattttggtccctcacgacta

SEQ ID NO: 63913 - DNA, 25 bp, Saccharomyces pastorianus
gaagaaccaagtccttacacgtcag

SEQ ID NO: 63914 - DNA, 25 bp, Saccharomyces pastorianus
ggaaccagacacatcccgaaaggat

SEQ ID NO: 63915 - DNA, 25 bp, Saccharomyces pastorianus
taagccacctgaaatagcccatggg

SEQ ID NO: 63916 - DNA, 25 bp, Saccharomyces pastorianus
tgaggaaaccccacctgacaagtta

SEQ ID NO: 63917 - DNA, 25 bp, Saccharomyces pastorianus
atggctataatgtcctgtccaggcg

SEQ ID NO: 63918 - DNA, 25 bp, Saccharomyces pastorianus
acatagcgcccttcagatggttgat

SEQ ID NO: 63919 - DNA, 25 bp, Saccharomyces pastorianus
actgcggcagaggacgttaatgaca

SEQ ID NO: 63920 - DNA, 25 bp, Saccharomyces pastorianus
tgacaagttacgttccgacctacat

SEQ ID NO: 63921 - DNA, 25 bp, Saccharomyces pastorianus
actagcgggtcatataccttccaaa

SEQ ID NO: 63922 - DNA, 25 bp, Saccharomyces pastorianus
atggattggccatacaagcgctgct

SEQ ID NO: 63923 - DNA, 25 bp, Saccharomyces pastorianus
gaagcctacaagagcacgaacgcgc

SEQ ID NO: 63924 - DNA, 25 bp, Saccharomyces pastorianus
gcgctgctctcatagatgctgtcaa

SEQ ID NO: 63925 - DNA, 25 bp, Saccharomyces pastorianus
tacccgagagatggacaaggccttt

SEQ ID NO: 63926 - DNA, 25 bp, Saccharomyces pastorianus
aaaacccatttgtctcattctccat

SEQ ID NO: 63927 - DNA, 25 bp, Saccharomyces pastorianus
ggtgaagatttaccacccgcttatc

SEQ ID NO: 63928 - DNA, 25 bp, Saccharomyces pastorianus
ggcaaacttcatctacatccttaaa

SEQ ID NO: 63929 - DNA, 25 bp, Saccharomyces pastorianus
gcaacacggatagctccttcaattt

SEQ ID NO: 63930 - DNA, 25 bp, Saccharomyces pastorianus
acctcctcggtatcattacaacaac

SEQ ID NO: 63931 - DNA, 25 bp, Saccharomyces pastorianus
gcaacagcgcctccggaagtagata

SEQ ID NO: 63932 - DNA, 25 bp, Saccharomyces pastorianus
cgagcttcgctcacttatcgagaag

SEQ ID NO: 63933 - DNA, 25 bp, Saccharomyces pastorianus
ttcgcggccccaaaaagcaattcgg

SEQ ID NO: 63934 - DNA, 25 bp, Saccharomyces pastorianus
atgacttggagctttcgactttaag

SEQ ID NO: 63935 - DNA, 25 bp, Saccharomyces pastorianus
aatttgaatctatctttcgcggccc

SEQ ID NO: 63936 - DNA, 25 bp, Saccharomyces pastorianus
tgaatagtccttcgttgaccccgag

SEQ ID NO: 63937 - DNA, 25 bp, Saccharomyces pastorianus
gaagcctatgacttgacttccaagg

SEQ ID NO: 63938 - DNA, 25 bp, Saccharomyces pastorianus
gtactggcaacagcactaccaatga

SEQ ID NO: 63939 - DNA, 25 bp, Saccharomyces pastorianus
acccgatattgcagggtttatcatg

SEQ ID NO: 63940 - DNA, 25 bp, Saccharomyces pastorianus
tcggctattaaatcgcacgtttctt

SEQ ID NO: 63941 - DNA, 25 bp, Saccharomyces pastorianus
gaagtggactttatatcggctatta

SEQ ID NO: 63942 - DNA, 25 bp, Saccharomyces pastorianus
gtttacaacgtctatcacgtctgtg

SEQ ID NO: 63943 - DNA, 25 bp, Saccharomyces pastorianus
ggacgtttagattatgccatgctgc

SEQ ID NO: 63944 - DNA, 25 bp, Saccharomyces pastorianus
ggccgcaatgcaaggacgtttacaa

SEQ ID NO: 63945 - DNA, 25 bp, Saccharomyces pastorianus
aactaaccatacaaaggccgcaatg

SEQ ID NO: 63946 - DNA, 25 bp, Saccharomyces pastorianus
gaaggacttacctggtactggcaac

SEQ ID NO: 63947 - DNA, 25 bp, Saccharomyces pastorianus
atgccatgctgccaagtttacttga

SEQ ID NO: 63948 - DNA, 25 bp, Saccharomyces pastorianus
tcttcccattacatcgagagacatg

SEQ ID NO: 63949 - DNA, 25 bp, Saccharomyces pastorianus
aagctcaaaaattctccggtcagga

SEQ ID NO: 63950 - DNA, 25 bp, Saccharomyces pastorianus
agttccaacattgcgagtagcgtac

SEQ ID NO: 63951 - DNA, 25 bp, Saccharomyces pastorianus
cgagccatttgttcaactttccgaa

SEQ ID NO: 63952 - DNA, 25 bp, Saccharomyces pastorianus
acggtgacgacctagcttttaagct

SEQ ID NO: 63953 - DNA, 25 bp, Saccharomyces pastorianus
tgggctcgtgagtggcaataccaac

SEQ ID NO: 63954 - DNA, 25 bp, Saccharomyces pastorianus
ggagacatttccatgtaacacccaa

SEQ ID NO: 63955 - DNA, 25 bp, Saccharomyces pastorianus
gaactggtagggtttcgcacaatat

SEQ ID NO: 63956 - DNA, 25 bp, Saccharomyces pastorianus
aactggcaaaggcagcgaccacaac

SEQ ID NO: 63957 - DNA, 25 bp, Saccharomyces pastorianus
gacttggatggcctagaaccagcta

SEQ ID NO: 63958 - DNA, 25 bp, Saccharomyces pastorianus
atgacgcaagcgagccatttgttca

SEQ ID NO: 63959 - DNA, 25 bp, Saccharomyces pastorianus
tgttcaacattctatgcctccagca

SEQ ID NO: 63960 - DNA, 25 bp, Saccharomyces pastorianus
taacacaggcttactatgcgccgtt

SEQ ID NO: 63961 - DNA, 25 bp, Saccharomyces pastorianus
aagtggccagtatgactcgtcgttc

SEQ ID NO: 63962 - DNA, 25 bp, Saccharomyces pastorianus
gagtacatcgatatatggaagcctt

SEQ ID NO: 63963 - DNA, 25 bp, Saccharomyces pastorianus
gacgacagaaaacggcaatgctatt

SEQ ID NO: 63964 - DNA, 25 bp, Saccharomyces pastorianus
agtacctcgagccatggctcagtaa

SEQ ID NO: 63965 - DNA, 25 bp, Saccharomyces pastorianus
actgatactttgacttccataccca

SEQ ID NO: 63966 - DNA, 25 bp, Saccharomyces pastorianus
caagcgcctattcatgttcaacatt

SEQ ID NO: 63967 - DNA, 25 bp, Saccharomyces pastorianus
agtatgactcgtcgttccctagtac

SEQ ID NO: 63968 - DNA, 25 bp, Saccharomyces pastorianus
gaccgacagtaccacgatgacgaca

SEQ ID NO: 63969 - DNA, 25 bp, Saccharomyces pastorianus
aattcgtaccctataagtggccagt

SEQ ID NO: 63970 - DNA, 25 bp, Saccharomyces pastorianus
gattgtagaactgcccaggactgta

SEQ ID NO: 63971 - DNA, 25 bp, Saccharomyces pastorianus
ttttcgattgtagaactgcccagga

SEQ ID NO: 63972 - DNA, 25 bp, Saccharomyces pastorianus
tgcccaggactgtaacgaagagcag

SEQ ID NO: 63973 - DNA, 25 bp, Saccharomyces pastorianus
gaactgcccaggactgtaacgaaga

SEQ ID NO: 63974 - DNA, 25 bp, Saccharomyces pastorianus
ttcgattgtagaactgcccaggact

SEQ ID NO: 63975 - DNA, 25 bp, Saccharomyces pastorianus
tagaactgcccaggactgtaacgaa

SEQ ID NO: 63976 - DNA, 25 bp, Saccharomyces pastorianus
gagtgataaagtcgccgttaaggtt

SEQ ID NO: 63977 - DNA, 25 bp, Saccharomyces pastorianus
ccaggactgtaacgaagagcaggct

SEQ ID NO: 63978 - DNA, 25 bp, Saccharomyces pastorianus
acctgagtgataaagtcgccgttaa

SEQ ID NO: 63979 - DNA, 25 bp, Saccharomyces pastorianus
actgcccaggactgtaacgaagagc

SEQ ID NO: 63980 - DNA, 25 bp, Saccharomyces pastorianus
tgtagaactgcccaggactgtaacg

SEQ ID NO: 63981 - DNA, 25 bp, Saccharomyces pastorianus
taccacggtcgtctcaaagaagcat

SEQ ID NO: 63982 - DNA, 25 bp, Saccharomyces pastorianus
gtactagttcattaccacggtcgtc

SEQ ID NO: 63983 - DNA, 25 bp, Saccharomyces pastorianus
taaggccctaacaagcagtactagt

SEQ ID NO: 63984 - DNA, 25 bp, Saccharomyces pastorianus
gggagtcctagcagacagccattat

SEQ ID NO: 63985 - DNA, 25 bp, Saccharomyces pastorianus
ggccctcgctaaggaaaagcctcat

SEQ ID NO: 63986 - DNA, 25 bp, Saccharomyces pastorianus
tagggttaccaagccaagccaaagc

SEQ ID NO: 63987 - DNA, 25 bp, Saccharomyces pastorianus
aaagcctcatgggtgccaaatcgca

SEQ ID NO: 63988 - DNA, 25 bp, Saccharomyces pastorianus
attattcaattcgtcacccatcttg

SEQ ID NO: 63989 - DNA, 25 bp, Saccharomyces pastorianus
gtgagcatacaaaggccctcgctaa

SEQ ID NO: 63990 - DNA, 25 bp, Saccharomyces pastorianus
gaatcttttgatcgtaaggccctaa

SEQ ID NO: 63991 - DNA, 25 bp, Saccharomyces pastorianus
ttattcccgcgcaatgtcaatcaaa

SEQ ID NO: 63992 - DNA, 25 bp, Saccharomyces pastorianus
agtcatacagacacaagatttgccg

SEQ ID NO: 63993 - DNA, 25 bp, Saccharomyces pastorianus
gatggtttattgcattcgtcttagc

SEQ ID NO: 63994 - DNA, 25 bp, Saccharomyces pastorianus
taacgatgtgtctgtcagtcataca

SEQ ID NO: 63995 - DNA, 25 bp, Saccharomyces pastorianus
gtgcggtggtattagacaggttcaa

SEQ ID NO: 63996 - DNA, 25 bp, Saccharomyces pastorianus
gaccgcctagatgatgttttccaat

SEQ ID NO: 63997 - DNA, 25 bp, Saccharomyces pastorianus
tcgtcttagcgaactgggatatatg

SEQ ID NO: 63998 - DNA, 25 bp, Saccharomyces pastorianus
gaggagattgttactttgtcacatt

SEQ ID NO: 63999 - DNA, 25 bp, Saccharomyces pastorianus
aaatactactggcttgtcttctagt

SEQ ID NO: 64000 - DNA, 25 bp, Saccharomyces pastorianus
gaatacggacgcttttagtagtaat

SEQ ID NO: 64001 - DNA, 25 bp, Saccharomyces pastorianus
gatggtgggcttatggttcccaata

SEQ ID NO: 64002 - DNA, 25 bp, Saccharomyces pastorianus
gaaaatactaattgcgtgcggtggt

SEQ ID NO: 64003 - DNA, 25 bp, Saccharomyces pastorianus
gcttcccaatacatctttttcgagg

SEQ ID NO: 64004 - DNA, 25 bp, Saccharomyces pastorianus
gaagcatgtgggacgtacctacttt

SEQ ID NO: 64005 - DNA, 25 bp, Saccharomyces pastorianus
atttaacgcgccttcttatactgtg

SEQ ID NO: 64006 - DNA, 25 bp, Saccharomyces pastorianus
acggcaggtgatactttttggtcat

SEQ ID NO: 64007 - DNA, 25 bp, Saccharomyces pastorianus
gactactcagagtacctcaatggaa

SEQ ID NO: 64008 - DNA, 25 bp, Saccharomyces pastorianus
gtgttggcattagtttcctagaagc

SEQ ID NO: 64009 - DNA, 25 bp, Saccharomyces pastorianus
gaagcgactccgaatgacgctacaa

SEQ ID NO: 64010 - DNA, 25 bp, Saccharomyces pastorianus
gaattgcaacccattgactttttgg

SEQ ID NO: 64011 - DNA, 25 bp, Saccharomyces pastorianus
tggatacaggccttatgcttcccaa

SEQ ID NO: 64012 - DNA, 25 bp, Saccharomyces pastorianus
gaaagctaatggcacccttaatact

SEQ ID NO: 64013 - DNA, 25 bp, Saccharomyces pastorianus
ttatactgtgcccaaggacctaaaa

SEQ ID NO: 64014 - DNA, 25 bp, Saccharomyces pastorianus
gcagacatggacacagctttgaaca

SEQ ID NO: 64015 - DNA, 25 bp, Saccharomyces pastorianus
gagcaatgcatcttcactggtgaca

SEQ ID NO: 64016 - DNA, 25 bp, Saccharomyces pastorianus
gattggacgaccctgcagttagagc

SEQ ID NO: 64017 - DNA, 25 bp, Saccharomyces pastorianus
gaaatacctcagcacatggaacagt

SEQ ID NO: 64018 - DNA, 25 bp, Saccharomyces pastorianus
aacaattgctggatccaacgcttct

SEQ ID NO: 64019 - DNA, 25 bp, Saccharomyces pastorianus
taaacactttgatgcactggaacag

SEQ ID NO: 64020 - DNA, 25 bp, Saccharomyces pastorianus
gtgcaccactggtcattttacattg

SEQ ID NO: 64021 - DNA, 25 bp, Saccharomyces pastorianus
ggtgacagtctttttaatgcaggct

SEQ ID NO: 64022 - DNA, 25 bp, Saccharomyces pastorianus
taagagccgtaggtgagcccaactg

SEQ ID NO: 64023 - DNA, 25 bp, Saccharomyces pastorianus
acgccatgtcatactaaggattcca

SEQ ID NO: 64024 - DNA, 25 bp, Saccharomyces pastorianus
gagctggaatacaatccgttcatga

SEQ ID NO: 64025 - DNA, 25 bp, Saccharomyces pastorianus
gtttctccttctttaacattttgtg

SEQ ID NO: 64026 - DNA, 25 bp, Saccharomyces pastorianus
tggagcttctttcttctcaactgaa

SEQ ID NO: 64027 - DNA, 25 bp, Saccharomyces pastorianus
atcggcgctgagatcgacatctgta

SEQ ID NO: 64028 - DNA, 25 bp, Saccharomyces pastorianus
ttcagacctgtttctggccggtaag

SEQ ID NO: 64029 - DNA, 25 bp, Saccharomyces pastorianus
gaaactgcctttgtatcatcattag

SEQ ID NO: 64030 - DNA, 25 bp, Saccharomyces pastorianus
tatcttctttctcatcggcgctgag

SEQ ID NO: 64031 - DNA, 25 bp, Saccharomyces pastorianus
tgtctgcagcatcactatcttcttt

SEQ ID NO: 64032 - DNA, 25 bp, Saccharomyces pastorianus
gaaaagcatcctttaactcctgcaa

SEQ ID NO: 64033 - DNA, 25 bp, Saccharomyces pastorianus
ggtgctcttatccttgtctgcagca

SEQ ID NO: 64034 - DNA, 25 bp, Saccharomyces pastorianus
aatattgggttctcctttggcgcag

SEQ ID NO: 64035 - DNA, 25 bp, Saccharomyces pastorianus
gtagtctttgcgatatcctcatcaa

SEQ ID NO: 64036 - DNA, 25 bp, Saccharomyces pastorianus
cgacatatgatcttgattccgtaat

SEQ ID NO: 64037 - DNA, 25 bp, Saccharomyces pastorianus
tcgcgccttcttttattatgctgag

SEQ ID NO: 64038 - DNA, 25 bp, Saccharomyces pastorianus
ataggaacagtactcaacccgtcaa

SEQ ID NO: 64039 - DNA, 25 bp, Saccharomyces pastorianus
gttacaatgcccaagctggtttcaa

SEQ ID NO: 64040 - DNA, 25 bp, Saccharomyces pastorianus
aaaacaactctcgtcgctggaactt

SEQ ID NO: 64041 - DNA, 25 bp, Saccharomyces pastorianus
accgattaattccattgccgtcaaa

SEQ ID NO: 64042 - DNA, 25 bp, Saccharomyces pastorianus
gttgggcccaaaggtattactcaat

SEQ ID NO: 64043 - DNA, 25 bp, Saccharomyces pastorianus
gggaagatgatctgtccaattcaag

SEQ ID NO: 64044 - DNA, 25 bp, Saccharomyces pastorianus
gggtcattaccagatttgtctacta

SEQ ID NO: 64045 - DNA, 25 bp, Saccharomyces pastorianus
agcaaaatattgtcccagttgggcc

SEQ ID NO: 64046 - DNA, 25 bp, Saccharomyces pastorianus
aaggactggcggttatcgcgccttc

SEQ ID NO: 64047 - DNA, 25 bp, Saccharomyces pastorianus
gactttgacaattttccatccggga

SEQ ID NO: 64048 - DNA, 25 bp, Saccharomyces pastorianus
gccatttccttttccgcatatatat

SEQ ID NO: 64049 - DNA, 25 bp, Saccharomyces pastorianus
tactgaccatttttactcgttgctg

SEQ ID NO: 64050 - DNA, 25 bp, Saccharomyces pastorianus
gctaaactcatctcattcaaactct

SEQ ID NO: 64051 - DNA, 25 bp, Saccharomyces pastorianus
ttccatccgggatatgccttcaaag

SEQ ID NO: 64052 - DNA, 25 bp, Saccharomyces pastorianus
gcagttgtagatggcgactccctaa

SEQ ID NO: 64053 - DNA, 25 bp, Saccharomyces pastorianus
ataccgtgacttgaggcttgaacct

SEQ ID NO: 64054 - DNA, 25 bp, Saccharomyces pastorianus
cctggattccttgatgatggccatc

SEQ ID NO: 64055 - DNA, 25 bp, Saccharomyces pastorianus
gcgatgaccgtatcagtactgacca

SEQ ID NO: 64056 - DNA, 25 bp, Saccharomyces pastorianus
atggtacttcattatcctggattcc

SEQ ID NO: 64057 - DNA, 25 bp, Saccharomyces pastorianus
gggtcacgttgatcctgaaactctg

SEQ ID NO: 64058 - DNA, 25 bp, Saccharomyces pastorianus
agacatactggtcgttgcacccttg

SEQ ID NO: 64059 - DNA, 25 bp, Saccharomyces pastorianus
gtgacaatcttttgacaagcgtgat

SEQ ID NO: 64060 - DNA, 25 bp, Saccharomyces pastorianus
aattaggcggttatcctgacacttc

SEQ ID NO: 64061 - DNA, 25 bp, Saccharomyces pastorianus
agaccctgtcttacatatcgagcta

SEQ ID NO: 64062 - DNA, 25 bp, Saccharomyces pastorianus
acccttgaccgcaaatacgttagca

SEQ ID NO: 64063 - DNA, 25 bp, Saccharomyces pastorianus
atttctagcgccttcaatgggcagt

SEQ ID NO: 64064 - DNA, 25 bp, Saccharomyces pastorianus
ggcagtggcacgttcaactctataa

SEQ ID NO: 64065 - DNA, 25 bp, Saccharomyces pastorianus
gtgggtaactgtattcaagccttct

SEQ ID NO: 64066 - DNA, 25 bp, Saccharomyces pastorianus
atcctgacacttctgccgggaaaga

SEQ ID NO: 64067 - DNA, 25 bp, Saccharomyces pastorianus
gaatccgacgttccctatatttcta

SEQ ID NO: 64068 - DNA, 25 bp, Saccharomyces pastorianus
tatcgagctacgtcgttgggcagac

SEQ ID NO: 64069 - DNA, 25 bp, Saccharomyces pastorianus
attactgccgccgacgataatatcg

SEQ ID NO: 64070 - DNA, 25 bp, Saccharomyces pastorianus
accttctgttatctcctatgctaaa

SEQ ID NO: 64071 - DNA, 25 bp, Saccharomyces pastorianus
gaacaacacggttatctagtcctaa

SEQ ID NO: 64072 - DNA, 25 bp, Saccharomyces pastorianus
gcaaagggtagtcatattccacaac

SEQ ID NO: 64073 - DNA, 25 bp, Saccharomyces pastorianus
agcttgtcaaacgatctgctgtcca

SEQ ID NO: 64074 - DNA, 25 bp, Saccharomyces pastorianus
aaacgccttccagaaacacggtgag

SEQ ID NO: 64075 - DNA, 25 bp, Saccharomyces pastorianus
gaatgtccagtaaaaccgcgtcaat

SEQ ID NO: 64076 - DNA, 25 bp, Saccharomyces pastorianus
gaattcagttcctcgtcatatgcag

SEQ ID NO: 64077 - DNA, 25 bp, Saccharomyces pastorianus
ggaactcacagaggcctgctttgaa

SEQ ID NO: 64078 - DNA, 25 bp, Saccharomyces pastorianus
tctgctgtccacaccggtaaggaga

SEQ ID NO: 64079 - DNA, 25 bp, Saccharomyces pastorianus
gaggtaaatcgtctgaccttctgtt

SEQ ID NO: 64080 - DNA, 25 bp, Saccharomyces pastorianus
ccaggatcggattatagcggcatat

SEQ ID NO: 64081 - DNA, 25 bp, Saccharomyces pastorianus
aattctgctctagacacggacacaa

SEQ ID NO: 64082 - DNA, 25 bp, Saccharomyces pastorianus
ggtgcgtttcatacagcggtcagag

SEQ ID NO: 64083 - DNA, 25 bp, Saccharomyces pastorianus
gtggcccaccattattcttatagta

SEQ ID NO: 64084 - DNA, 25 bp, Saccharomyces pastorianus
tgtagctacgttttttgtcttccct

SEQ ID NO: 64085 - DNA, 25 bp, Saccharomyces pastorianus
gtcttccctgtagcactgattatga

SEQ ID NO: 64086 - DNA, 25 bp, Saccharomyces pastorianus
aatggcctgggaactgcgtatagtc

SEQ ID NO: 64087 - DNA, 25 bp, Saccharomyces pastorianus
tactcgactatgaatgacggtgctt

SEQ ID NO: 64088 - DNA, 25 bp, Saccharomyces pastorianus
aattaccttttgatgacagccggag

SEQ ID NO: 64089 - DNA, 25 bp, Saccharomyces pastorianus
atcagggttccgatctacataaagg

SEQ ID NO: 64090 - DNA, 25 bp, Saccharomyces pastorianus
aatgctcatggagtgatcgtggcta

SEQ ID NO: 64091 - DNA, 25 bp, Saccharomyces pastorianus
aacgggttcactgctaccaaaacag

SEQ ID NO: 64092 - DNA, 25 bp, Saccharomyces pastorianus
gagtgcactccgttaatccagcaga

SEQ ID NO: 64093 - DNA, 25 bp, Saccharomyces pastorianus
ttcacctcaacagtctatggctagc

SEQ ID NO: 64094 - DNA, 25 bp, Saccharomyces pastorianus
tcatggaccttcgacgcccagaaat

SEQ ID NO: 64095 - DNA, 25 bp, Saccharomyces pastorianus
aagaggtgccactatcatggtaaat

SEQ ID NO: 64096 - DNA, 25 bp, Saccharomyces pastorianus
aaacctggttaacgctgctcatgga

SEQ ID NO: 64097 - DNA, 25 bp, Saccharomyces pastorianus
aacaacagcgccagttccagatgct

SEQ ID NO: 64098 - DNA, 25 bp, Saccharomyces pastorianus
agatcaacatagctctttcacctca

SEQ ID NO: 64099 - DNA, 25 bp, Saccharomyces pastorianus
agcagatcatctgggtacctcaata

SEQ ID NO: 64100 - DNA, 25 bp, Saccharomyces pastorianus
aatcgcacactaacatgagctcttc

SEQ ID NO: 64101 - DNA, 25 bp, Saccharomyces pastorianus
agtgcaagcgcaatcccaaaccaat

SEQ ID NO: 64102 - DNA, 25 bp, Saccharomyces pastorianus
tgtgttttttgttatcttaccccag

SEQ ID NO: 64103 - DNA, 25 bp, Saccharomyces pastorianus
caaattttagcggtccttcccatat

SEQ ID NO: 64104 - DNA, 25 bp, Saccharomyces pastorianus
gtccttcccatattattcgatccat

SEQ ID NO: 64105 - DNA, 25 bp, Saccharomyces pastorianus
tcattaaccctttgtgggctggctt

SEQ ID NO: 64106 - DNA, 25 bp, Saccharomyces pastorianus
gttgcttcagctggttacgtttctt

SEQ ID NO: 64107 - DNA, 25 bp, Saccharomyces pastorianus
cataatcagctcatggtttgcccta

SEQ ID NO: 64108 - DNA, 25 bp, Saccharomyces pastorianus
agattccgcccaaactaacatttat

SEQ ID NO: 64109 - DNA, 25 bp, Saccharomyces pastorianus
tgtacccgcttcttttcaaagggca

SEQ ID NO: 64110 - DNA, 25 bp, Saccharomyces pastorianus
gggctggcttcatatttgtttggat

SEQ ID NO: 64111 - DNA, 25 bp, Saccharomyces pastorianus
ttttggttccgtttatgcttgttgc

SEQ ID NO: 64112 - DNA, 25 bp, Saccharomyces pastorianus
gttattatcccatttacattccttg

SEQ ID NO: 64113 - DNA, 25 bp, Saccharomyces pastorianus
tacaccctacggatgaatttgcgaa

SEQ ID NO: 64114 - DNA, 25 bp, Saccharomyces pastorianus
gttggtgtacactctgacattctag

SEQ ID NO: 64115 - DNA, 25 bp, Saccharomyces pastorianus
caggctgtgccttaaacgtgattaa

SEQ ID NO: 64116 - DNA, 25 bp, Saccharomyces pastorianus
taaaaaatcgatcacccgttggtgt

SEQ ID NO: 64117 - DNA, 25 bp, Saccharomyces pastorianus
ggtcgagattatcgcaccaggctgt

SEQ ID NO: 64118 - DNA, 25 bp, Saccharomyces pastorianus
gattctgaattgatcctttaccatg

SEQ ID NO: 64119 - DNA, 25 bp, Saccharomyces pastorianus
gctagttcgattaacccaaaccaat

SEQ ID NO: 64120 - DNA, 25 bp, Saccharomyces pastorianus
cgcgttcagtgaccctatagtttta

SEQ ID NO: 64121 - DNA, 25 bp, Saccharomyces pastorianus
aattgtcgatccaaacttgcgcgtt

SEQ ID NO: 64122 - DNA, 25 bp, Saccharomyces pastorianus
ctaaaatgacgttgaggcctgatat

SEQ ID NO: 64123 - DNA, 25 bp, Saccharomyces pastorianus
atgttgttatagcatcgtcagacta

SEQ ID NO: 64124 - DNA, 25 bp, Saccharomyces pastorianus
gtacttctaaaagtgcttccttact

SEQ ID NO: 64125 - DNA, 25 bp, Saccharomyces pastorianus
ctaaaagtatcaatggcgaatccag

SEQ ID NO: 64126 - DNA, 25 bp, Saccharomyces pastorianus
aaagacccctcaaatatagcccaat

SEQ ID NO: 64127 - DNA, 25 bp, Saccharomyces pastorianus
accagcaccttctaaaagcacggaa

SEQ ID NO: 64128 - DNA, 25 bp, Saccharomyces pastorianus
aagacttgaagtctcttcttgcaaa

SEQ ID NO: 64129 - DNA, 25 bp, Saccharomyces pastorianus
cttcaaatcaacacactttcacatt

SEQ ID NO: 64130 - DNA, 25 bp, Saccharomyces pastorianus
tatagcccaatcacaaagtacttct

SEQ ID NO: 64131 - DNA, 25 bp, Saccharomyces pastorianus
gacacagaggcaaaaccagcacctt

SEQ ID NO: 64132 - DNA, 25 bp, Saccharomyces pastorianus
aactctctgctttaaggaaaccata

SEQ ID NO: 64133 - DNA, 25 bp, Saccharomyces pastorianus
gaagtctcttcttgcaaaagatagg

SEQ ID NO: 64134 - DNA, 25 bp, Saccharomyces pastorianus
aagttcaaaactctctgctttaagg

SEQ ID NO: 64135 - DNA, 25 bp, Saccharomyces pastorianus
ggtggtagtttattgtatgcctctt

SEQ ID NO: 64136 - DNA, 25 bp, Saccharomyces pastorianus
gaagaggaagttgttttaccccatg

SEQ ID NO: 64137 - DNA, 25 bp, Saccharomyces pastorianus
attgtatgcctctttcacagcattt

SEQ ID NO: 64138 - DNA, 25 bp, Saccharomyces pastorianus
ggaggctcacacgatcatgacttga

SEQ ID NO: 64139 - DNA, 25 bp, Saccharomyces pastorianus
tgtgttgctaggtgtgagcattccg

SEQ ID NO: 64140 - DNA, 25 bp, Saccharomyces pastorianus
gatcatgacttgagcgtagaagagg

SEQ ID NO: 64141 - DNA, 25 bp, Saccharomyces pastorianus
agtttattgtatgcctctttcacag

SEQ ID NO: 64142 - DNA, 25 bp, Saccharomyces pastorianus
catttgttggtggaggctcacacga

SEQ ID NO: 64143 - DNA, 25 bp, Saccharomyces pastorianus
atccatttatgtgttgctaggtgtg

SEQ ID NO: 64144 - DNA, 25 bp, Saccharomyces pastorianus
tcacacgatcatgacttgagcgtag

SEQ ID NO: 64145 - DNA, 25 bp, Saccharomyces pastorianus
gaggaagttgttttaccccatgatg

SEQ ID NO: 64146 - DNA, 25 bp, Saccharomyces pastorianus
gaagacgacacaggtggccagccat

SEQ ID NO: 64147 - DNA, 25 bp, Saccharomyces pastorianus
attcattaccaacgtgccgttctta

SEQ ID NO: 64148 - DNA, 25 bp, Saccharomyces pastorianus
gcttacttgaatatcgacgggtgct

SEQ ID NO: 64149 - DNA, 25 bp, Saccharomyces pastorianus
gtggccagccattggcttacttgaa

SEQ ID NO: 64150 - DNA, 25 bp, Saccharomyces pastorianus
acgggtgctcgcaagtgtctcatat

SEQ ID NO: 64151 - DNA, 25 bp, Saccharomyces pastorianus
agcggatccgctttgacgaaattat

SEQ ID NO: 64152 - DNA, 25 bp, Saccharomyces pastorianus
tatcacggttaatatgctgcgagct

SEQ ID NO: 64153 - DNA, 25 bp, Saccharomyces pastorianus
ctgcgagctcagaatttagtcaaac

SEQ ID NO: 64154 - DNA, 25 bp, Saccharomyces pastorianus
cttatcccatgcgagttcactaaat

SEQ ID NO: 64155 - DNA, 25 bp, Saccharomyces pastorianus
gaaagtttgccgattgctaatgata

SEQ ID NO: 64156 - DNA, 25 bp, Saccharomyces pastorianus
ggcaattgccctaatatgcagtttt

SEQ ID NO: 64157 - DNA, 25 bp, Saccharomyces pastorianus
aattctgtcaggctcagctgggtga

SEQ ID NO: 64158 - DNA, 25 bp, Saccharomyces pastorianus
gttatccatcatcaagacgccgaag

SEQ ID NO: 64159 - DNA, 25 bp, Saccharomyces pastorianus
tcattcgataacacttaccttcacc

SEQ ID NO: 64160 - DNA, 25 bp, Saccharomyces pastorianus
ttctccatcctccattttcaataag

SEQ ID NO: 64161 - DNA, 25 bp, Saccharomyces pastorianus
aactagattcttcatcaacttcccc

SEQ ID NO: 64162 - DNA, 25 bp, Saccharomyces pastorianus
ggcgtcgacctagaagaatcctctt

SEQ ID NO: 64163 - DNA, 25 bp, Saccharomyces pastorianus
tttcctcccacgatgttcaaacaaa

SEQ ID NO: 64164 - DNA, 25 bp, Saccharomyces pastorianus
aatcctcttccaattcgttatccat

SEQ ID NO: 64165 - DNA, 25 bp, Saccharomyces pastorianus
agaaaccctttgcaattctgtcagg

SEQ ID NO: 64166 - DNA, 25 bp, Saccharomyces pastorianus
agggtatgtcgaccgcaacaaagga

SEQ ID NO: 64167 - DNA, 25 bp, Saccharomyces pastorianus
catttgctattgactcttccagttt

SEQ ID NO: 64168 - DNA, 25 bp, Saccharomyces pastorianus
gaatccgacctgatgcccaaagtga

SEQ ID NO: 64169 - DNA, 25 bp, Saccharomyces pastorianus
tatctcttaggtatcctgcagcaaa

SEQ ID NO: 64170 - DNA, 25 bp, Saccharomyces pastorianus
gaacaacgtcaatctctataggcac

SEQ ID NO: 64171 - DNA, 25 bp, Saccharomyces pastorianus
gacatgaacgaccactatctcttag

SEQ ID NO: 64172 - DNA, 25 bp, Saccharomyces pastorianus
gtcgccagtatattctgcgtccaca

SEQ ID NO: 64173 - DNA, 25 bp, Saccharomyces pastorianus
agatgcgccatttgcgaacgtcccg

SEQ ID NO: 64174 - DNA, 25 bp, Saccharomyces pastorianus
gtacctggttcgacaacaagccctt

SEQ ID NO: 64175 - DNA, 25 bp, Saccharomyces pastorianus
gtccctatacaactacaagctgctg

SEQ ID NO: 64176 - DNA, 25 bp, Saccharomyces pastorianus
tccctgttggcgaacgtgctcaata

SEQ ID NO: 64177 - DNA, 25 bp, Saccharomyces pastorianus
gcctgctgtacctgatcagaaccaa

SEQ ID NO: 64178 - DNA, 25 bp, Saccharomyces pastorianus
aatgggtccgcaaccttggtaacat

SEQ ID NO: 64179 - DNA, 25 bp, Saccharomyces pastorianus
agcaacgtcaagttcgtgcgcaaac

SEQ ID NO: 64180 - DNA, 25 bp, Saccharomyces pastorianus
atcctgcagaacatcatcgacttcg

SEQ ID NO: 64181 - DNA, 25 bp, Saccharomyces pastorianus
acattcgcgagttcgttctcacgta

SEQ ID NO: 64182 - DNA, 25 bp, Saccharomyces pastorianus
atggaccaggcgcagaacttgctat

SEQ ID NO: 64183 - DNA, 25 bp, Saccharomyces pastorianus
gtgtccgccagaaaaccagctgttt

SEQ ID NO: 64184 - DNA, 25 bp, Saccharomyces pastorianus
gaacaactccttttttgccaacgcg

SEQ ID NO: 64185 - DNA, 25 bp, Saccharomyces pastorianus
ggccaagttcaaccaggcgttcgaa

SEQ ID NO: 64186 - DNA, 25 bp, Saccharomyces pastorianus
gacttcgaacggacggcggccaaag

SEQ ID NO: 64187 - DNA, 25 bp, Saccharomyces pastorianus
aaaagaccttgcagaactaccacct

SEQ ID NO: 64188 - DNA, 25 bp, Saccharomyces pastorianus
tatatgaacatgcagtccttcgcgc

SEQ ID NO: 64189 - DNA, 25 bp, Saccharomyces pastorianus
gcgccctttttgatcagcaacgtca

SEQ ID NO: 64190 - DNA, 25 bp, Saccharomyces pastorianus
agcaaggtcgtgtgggagtactact

SEQ ID NO: 64191 - DNA, 25 bp, Saccharomyces pastorianus
gcccacgagttcagcggctacgaag

SEQ ID NO: 64192 - DNA, 25 bp, Saccharomyces pastorianus
caacattgtgtttctgcacggcagc

SEQ ID NO: 64193 - DNA, 25 bp, Saccharomyces pastorianus
aagctgggcactggcttcgactgga

SEQ ID NO: 64194 - DNA, 25 bp, Saccharomyces pastorianus
agctcgtctacgacgtgtacaccaa

SEQ ID NO: 64195 - DNA, 25 bp, Saccharomyces pastorianus
ggacggtcactacgcgctgcacaag

SEQ ID NO: 64196 - DNA, 25 bp, Saccharomyces pastorianus
tgaacgttgctgtcggccattccat

SEQ ID NO: 64197 - DNA, 25 bp, Saccharomyces pastorianus
attccatgggtggtttccaggcgct

SEQ ID NO: 64198 - DNA, 25 bp, Saccharomyces pastorianus
ctggcgccacaagcgtcaacattgt

SEQ ID NO: 64199 - DNA, 25 bp, Saccharomyces pastorianus
acaagctcgtgctgatcgaccaggc

SEQ ID NO: 64200 - DNA, 25 bp, Saccharomyces pastorianus
gggagtactacttgtcacggatcgt

SEQ ID NO: 64201 - DNA, 25 bp, Saccharomyces pastorianus
agtaatgtacttcttgcccaatgag

SEQ ID NO: 64202 - DNA, 25 bp, Saccharomyces pastorianus
tatgttggcctcattggtcgttacc

SEQ ID NO: 64203 - DNA, 25 bp, Saccharomyces pastorianus
gtgcccacatgttcaaccagatcag

SEQ ID NO: 64204 - DNA, 25 bp, Saccharomyces pastorianus
aactgatgatctccatcttctcttc

SEQ ID NO: 64205 - DNA, 25 bp, Saccharomyces pastorianus
gtcatggttctcatctacggtatgt

SEQ ID NO: 64206 - DNA, 25 bp, Saccharomyces pastorianus
gttaccttggtcacgggcattccat

SEQ ID NO: 64207 - DNA, 25 bp, Saccharomyces pastorianus
ctttgaccactgtcttctcgataaa

SEQ ID NO: 64208 - DNA, 25 bp, Saccharomyces pastorianus
agcatacttcattgacgctgccttg

SEQ ID NO: 64209 - DNA, 25 bp, Saccharomyces pastorianus
ctctcatctgtatccaaacgcgaag

SEQ ID NO: 64210 - DNA, 25 bp, Saccharomyces pastorianus
atcatctgcatgatcagtgcccaca

SEQ ID NO: 64211 - DNA, 25 bp, Saccharomyces pastorianus
aatacgcagctggtaggcgtcggcc

SEQ ID NO: 64212 - DNA, 25 bp, Saccharomyces pastorianus
gaaaacgcgtacatagtcgccctct

SEQ ID NO: 64213 - DNA, 25 bp, Saccharomyces pastorianus
aatgtccaccggcaaactgctaaag

SEQ ID NO: 64214 - DNA, 25 bp, Saccharomyces pastorianus
aggtcaacgacttctctttgcactt

SEQ ID NO: 64215 - DNA, 25 bp, Saccharomyces pastorianus
tttttggtctccttgattttcttct

SEQ ID NO: 64216 - DNA, 25 bp, Saccharomyces pastorianus
tttgcacttacccatggactggacc

SEQ ID NO: 64217 - DNA, 25 bp, Saccharomyces pastorianus
tgttccctgtgtctcgaattggagt

SEQ ID NO: 64218 - DNA, 25 bp, Saccharomyces pastorianus
aaaggctttccaattcttccaactg

SEQ ID NO: 64219 - DNA, 25 bp, Saccharomyces pastorianus
aatacgacaccatcgtggcatcgtg

SEQ ID NO: 64220 - DNA, 25 bp, Saccharomyces pastorianus
gattttcttctgtggcgtgtcctca

SEQ ID NO: 64221 - DNA, 25 bp, Saccharomyces pastorianus
atcgtggttcgatgaccatccagaa

SEQ ID NO: 64222 - DNA, 25 bp, Saccharomyces pastorianus
aggtatcaaacagctttcccaggtc

SEQ ID NO: 64223 - DNA, 25 bp, Saccharomyces pastorianus
ggaaattctcacagctataattact

SEQ ID NO: 64224 - DNA, 25 bp, Saccharomyces pastorianus
gaaaaagtggaaattctcacagcta

SEQ ID NO: 64225 - DNA, 25 bp, Saccharomyces pastorianus
cacagctataattactgacttactt

SEQ ID NO: 64226 - DNA, 25 bp, Saccharomyces pastorianus
aattctcacagctataattactgac

SEQ ID NO: 64227 - DNA, 25 bp, Saccharomyces pastorianus
gacgtcaaagaacttactgaaaaag

SEQ ID NO: 64228 - DNA, 25 bp, Saccharomyces pastorianus
aaagatgacgtcaaagaacttactg

SEQ ID NO: 64229 - DNA, 25 bp, Saccharomyces pastorianus
aaaagtggaaattctcacagctata

SEQ ID NO: 64230 - DNA, 25 bp, Saccharomyces pastorianus
ttctcacagctataattactgactt

SEQ ID NO: 64231 - DNA, 25 bp, Saccharomyces pastorianus
gatgacgtcaaagaacttactgaaa

SEQ ID NO: 64232 - DNA, 25 bp, Saccharomyces pastorianus
gtggaaattctcacagctataatta

SEQ ID NO: 64233 - DNA, 25 bp, Saccharomyces pastorianus
agtggaaattctcacagctataatt

SEQ ID NO: 64234 - DNA, 25 bp, Saccharomyces pastorianus
atgtccttccatcaaaacgcgctaa

SEQ ID NO: 64235 - DNA, 25 bp, Saccharomyces pastorianus
ttatcgtttcggtcattcttctaaa

SEQ ID NO: 64236 - DNA, 25 bp, Saccharomyces pastorianus
aaaagagatatcacgggcccgattt

SEQ ID NO: 64237 - DNA, 25 bp, Saccharomyces pastorianus
agacgtttatgtctctcctttaaat

SEQ ID NO: 64238 - DNA, 25 bp, Saccharomyces pastorianus
cagggcacctgatgaagacgtttat

SEQ ID NO: 64239 - DNA, 25 bp, Saccharomyces pastorianus
tatgatcggattcactcagggtttc

SEQ ID NO: 64240 - DNA, 25 bp, Saccharomyces pastorianus
ctatggttactactttatcgtttcg

SEQ ID NO: 64241 - DNA, 25 bp, Saccharomyces pastorianus
gtttggactccgctgatggtaaaag

SEQ ID NO: 64242 - DNA, 25 bp, Saccharomyces pastorianus
tcttcttccttctgttcttaattat

SEQ ID NO: 64243 - DNA, 25 bp, Saccharomyces pastorianus
atgatgcctatattccatgtccttc

SEQ ID NO: 64244 - DNA, 25 bp, Saccharomyces pastorianus
gattgaactgcttatgatgcctata

SEQ ID NO: 64245 - DNA, 25 bp, Saccharomyces pastorianus
ggaagccctcaggtagagagctcat

SEQ ID NO: 64246 - DNA, 25 bp, Saccharomyces pastorianus
cagtcgccaacttcgcggagtggaa

SEQ ID NO: 64247 - DNA, 25 bp, Saccharomyces pastorianus
ataacaccgtcgacgaagcggcaca

SEQ ID NO: 64248 - DNA, 25 bp, Saccharomyces pastorianus
atcctgaagatgaccgccgagaaca

SEQ ID NO: 64249 - DNA, 25 bp, Saccharomyces pastorianus
tatcatgtcgaagcacggcaaccta

SEQ ID NO: 64250 - DNA, 25 bp, Saccharomyces pastorianus
gaccaccaggacgacagcggtatca

SEQ ID NO: 64251 - DNA, 25 bp, Saccharomyces pastorianus
aagaagaatcacatcatcgccaaga

SEQ ID NO: 64252 - DNA, 25 bp, Saccharomyces pastorianus
cactctctaccagaaggctttgtac

SEQ ID NO: 64253 - DNA, 25 bp, Saccharomyces pastorianus
ggtcgttcgagtcagataacaccgt

SEQ ID NO: 64254 - DNA, 25 bp, Saccharomyces pastorianus
agggctccgcatgggatctgtccga

SEQ ID NO: 64255 - DNA, 25 bp, Saccharomyces pastorianus
tgtccgaattcacagacgccttaaa

SEQ ID NO: 64256 - DNA, 25 bp, Saccharomyces pastorianus
cccgctttagcgttcattatggact

SEQ ID NO: 64257 - DNA, 25 bp, Saccharomyces pastorianus
atggctgtcatcctggcgttaatca

SEQ ID NO: 64258 - DNA, 25 bp, Saccharomyces pastorianus
gaatgcacttctttcttcttgatgc

SEQ ID NO: 64259 - DNA, 25 bp, Saccharomyces pastorianus
taaagccttattcgtcacttcggag

SEQ ID NO: 64260 - DNA, 25 bp, Saccharomyces pastorianus
aaggctgctgtgatcttagtgttca

SEQ ID NO: 64261 - DNA, 25 bp, Saccharomyces pastorianus
tttacctcttatgtgggagctgcct

SEQ ID NO: 64262 - DNA, 25 bp, Saccharomyces pastorianus
actaccctaatctatttcactgcga

SEQ ID NO: 64263 - DNA, 25 bp, Saccharomyces pastorianus
gaacccgttcagatggaatgcactt

SEQ ID NO: 64264 - DNA, 25 bp, Saccharomyces pastorianus
agtgccattcggtttaatcctatta

SEQ ID NO: 64265 - DNA, 25 bp, Saccharomyces pastorianus
tcatcccctgggttaaagccttatt

SEQ ID NO: 64266 - DNA, 25 bp, Saccharomyces pastorianus
aatcctattaggtgccactctgggt

SEQ ID NO: 64267 - DNA, 25 bp, Saccharomyces pastorianus
agcatgaattcatccgcggtagtgt

SEQ ID NO: 64268 - DNA, 25 bp, Saccharomyces pastorianus
atggatacacagtcctctgaccaac

SEQ ID NO: 64269 - DNA, 25 bp, Saccharomyces pastorianus
ttactggctctttacgttccgtgga

SEQ ID NO: 64270 - DNA, 25 bp, Saccharomyces pastorianus
gctttttctcccaatctgtctagaa

SEQ ID NO: 64271 - DNA, 25 bp, Saccharomyces pastorianus
agttctcttagctctcaaagaccgt

SEQ ID NO: 64272 - DNA, 25 bp, Saccharomyces pastorianus
aagaatagccgcaggaactccatta

SEQ ID NO: 64273 - DNA, 25 bp, Saccharomyces pastorianus
atatgcgtgagctacccgctgaaga

SEQ ID NO: 64274 - DNA, 25 bp, Saccharomyces pastorianus
aaacctactcaagctgtgttcccaa

SEQ ID NO: 64275 - DNA, 25 bp, Saccharomyces pastorianus
gtcaaccaatcgcatataccactga

SEQ ID NO: 64276 - DNA, 25 bp, Saccharomyces pastorianus
gcggtagtgtccatcgatagcatta

SEQ ID NO: 64277 - DNA, 25 bp, Saccharomyces pastorianus
ggaaccaggcagacaacgctttttc

SEQ ID NO: 64278 - DNA, 25 bp, Saccharomyces pastorianus
gccacaaccctatcttaggtaactt

SEQ ID NO: 64279 - DNA, 25 bp, Saccharomyces pastorianus
gtgctgttcggaggcaaatgcgttc

SEQ ID NO: 64280 - DNA, 25 bp, Saccharomyces pastorianus
aaatgcgttcgattactttgtatgt

SEQ ID NO: 64281 - DNA, 25 bp, Saccharomyces pastorianus
aaccctgttaccatgtgttgacgga

SEQ ID NO: 64282 - DNA, 25 bp, Saccharomyces pastorianus
ggtcaatccagaaaccctgttacca

SEQ ID NO: 64283 - DNA, 25 bp, Saccharomyces pastorianus
atgtcagctgtactaattcacaagg

SEQ ID NO: 64284 - DNA, 25 bp, Saccharomyces pastorianus
aaagatccattcattaccgaacaat

SEQ ID NO: 64285 - DNA, 25 bp, Saccharomyces pastorianus
gaacaggtgacttgggtttcatcaa

SEQ ID NO: 64286 - DNA, 25 bp, Saccharomyces pastorianus
ttagatgtaaggaccgccacaaccc

SEQ ID NO: 64287 - DNA, 25 bp, Saccharomyces pastorianus
gaggtacacgctgatattggtagtt

SEQ ID NO: 64288 - DNA, 25 bp, Saccharomyces pastorianus
gattgccaaggcaggcggattgtta

SEQ ID NO: 64289 - DNA, 25 bp, Saccharomyces pastorianus
aatggcgaaacaacagatactactt

SEQ ID NO: 64290 - DNA, 25 bp, Saccharomyces pastorianus
gctcacacatcaaaccttctttatg

SEQ ID NO: 64291 - DNA, 25 bp, Saccharomyces pastorianus
gataccattctaaatatttgtcctg

SEQ ID NO: 64292 - DNA, 25 bp, Saccharomyces pastorianus
gggaatcaatctgctcaacctaaag

SEQ ID NO: 64293 - DNA, 25 bp, Saccharomyces pastorianus
aagtggcgaaacatcttcgggatac

SEQ ID NO: 64294 - DNA, 25 bp, Saccharomyces pastorianus
gatatacgtgctttcactcatagaa

SEQ ID NO: 64295 - DNA, 25 bp, Saccharomyces pastorianus
gagttgttgaatcccactatctaca

SEQ ID NO: 64296 - DNA, 25 bp, Saccharomyces pastorianus
aacctaaaggtaacactggagcaga

SEQ ID NO: 64297 - DNA, 25 bp, Saccharomyces pastorianus
agattacctaactgggctcacacat

SEQ ID NO: 64298 - DNA, 25 bp, Saccharomyces pastorianus
accaatgtgcatttagtgtgccaga

SEQ ID NO: 64299 - DNA, 25 bp, Saccharomyces pastorianus
ggtggtagaaagctccctagcaaaa

SEQ ID NO: 64300 - DNA, 25 bp, Saccharomyces pastorianus
aaccaaccttggtgtgtcatcggta

SEQ ID NO: 64301 - DNA, 25 bp, Saccharomyces pastorianus
atctttgtgatagattctagtgcta

SEQ ID NO: 64302 - DNA, 25 bp, Saccharomyces pastorianus
gacctctctggagacattattttcc

SEQ ID NO: 64303 - DNA, 25 bp, Saccharomyces pastorianus
ggagacattattttccagccaccac

SEQ ID NO: 64304 - DNA, 25 bp, Saccharomyces pastorianus
gtagtactgctggtatgggcaaaca

SEQ ID NO: 64305 - DNA, 25 bp, Saccharomyces pastorianus
gtaacgccttatccggacagggtct

SEQ ID NO: 64306 - DNA, 25 bp, Saccharomyces pastorianus
tgtcatcggtagtaacgccttatcc

SEQ ID NO: 64307 - DNA, 25 bp, Saccharomyces pastorianus
caccaccgcacttatctttgtgata

SEQ ID NO: 64308 - DNA, 25 bp, Saccharomyces pastorianus
tctagtgctagaaaccgtatggaag

SEQ ID NO: 64309 - DNA, 25 bp, Saccharomyces pastorianus
gacaacaaagattgagacctctctg

SEQ ID NO: 64310 - DNA, 25 bp, Saccharomyces pastorianus
acagggtcttgttgaaggattatcc

SEQ ID NO: 64311 - DNA, 25 bp, Saccharomyces pastorianus
ctgggaaaactatttggctcgaaag

SEQ ID NO: 64312 - DNA, 25 bp, Saccharomyces pastorianus
ggcaattcaatttcgaaggttctgg

SEQ ID NO: 64313 - DNA, 25 bp, Saccharomyces pastorianus
atgggcaattcaatttcgaaggttc

SEQ ID NO: 64314 - DNA, 25 bp, Saccharomyces pastorianus
caattcaatttcgaaggttctggga

SEQ ID NO: 64315 - DNA, 25 bp, Saccharomyces pastorianus
gggcaattcaatttcgaaggttctg

SEQ ID NO: 64316 - DNA, 25 bp, Saccharomyces pastorianus
gttctgggaaaactatttggctcga

SEQ ID NO: 64317 - DNA, 25 bp, Saccharomyces pastorianus
ggttctgggaaaactatttggctcg

SEQ ID NO: 64318 - DNA, 25 bp, Saccharomyces pastorianus
tgggaaaactatttggctcgaaaga

SEQ ID NO: 64319 - DNA, 25 bp, Saccharomyces pastorianus
ttctgggaaaactatttggctcgaa

SEQ ID NO: 64320 - DNA, 25 bp, Saccharomyces pastorianus
tctgggaaaactatttggctcgaaa

SEQ ID NO: 64321 - DNA, 25 bp, Saccharomyces pastorianus
tgggcaattcaatttcgaaggttct

SEQ ID NO: 64322 - DNA, 25 bp, Saccharomyces pastorianus
ttggaattacaagttgctcaagctt

SEQ ID NO: 64323 - DNA, 25 bp, Saccharomyces pastorianus
ccacaagccaagattttgtctcaag

SEQ ID NO: 64324 - DNA, 25 bp, Saccharomyces pastorianus
atgtctgctccacaagccaagattt

SEQ ID NO: 64325 - DNA, 25 bp, Saccharomyces pastorianus
tgtctgctccacaagccaagatttt

SEQ ID NO: 64326 - DNA, 25 bp, Saccharomyces pastorianus
tccacaagccaagattttgtctcaa

SEQ ID NO: 64327 - DNA, 25 bp, Saccharomyces pastorianus
gtctgctccacaagccaagattttg

SEQ ID NO: 64328 - DNA, 25 bp, Saccharomyces pastorianus
tctgctccacaagccaagattttgt

SEQ ID NO: 64329 - DNA, 25 bp, Saccharomyces pastorianus
gctccacaagccaagattttgtctc

SEQ ID NO: 64330 - DNA, 25 bp, Saccharomyces pastorianus
cacaagccaagattttgtctcaagc

SEQ ID NO: 64331 - DNA, 25 bp, Saccharomyces pastorianus
acaagccaagattttgtctcaagct

SEQ ID NO: 64332 - DNA, 25 bp, Saccharomyces pastorianus
tgctccacaagccaagattttgtct

SEQ ID NO: 64333 - DNA, 25 bp, Saccharomyces pastorianus
gtaacctcaaactcaccaacaagac

SEQ ID NO: 64334 - DNA, 25 bp, Saccharomyces pastorianus
ttgccccacacagatgatgaaacct

SEQ ID NO: 64335 - DNA, 25 bp, Saccharomyces pastorianus
ggaatccctggaaaactatcacata

SEQ ID NO: 64336 - DNA, 25 bp, Saccharomyces pastorianus
gaatgcaaactggattattcctagc

SEQ ID NO: 64337 - DNA, 25 bp, Saccharomyces pastorianus
atgaactcaccaaaagctctgtttt

SEQ ID NO: 64338 - DNA, 25 bp, Saccharomyces pastorianus
gattattcctagcaaaaccaaaaag

SEQ ID NO: 64339 - DNA, 25 bp, Saccharomyces pastorianus
aagctctgttttttggaatccctgg

SEQ ID NO: 64340 - DNA, 25 bp, Saccharomyces pastorianus
aactatcacataattgtaacctcaa

SEQ ID NO: 64341 - DNA, 25 bp, Saccharomyces pastorianus
gaaacctgataaaaatgcgttgaag

SEQ ID NO: 64342 - DNA, 25 bp, Saccharomyces pastorianus
gacaaattgccccacacagatgatg

SEQ ID NO: 64343 - DNA, 25 bp, Saccharomyces pastorianus
aacaagacaaattgccccacacaga

SEQ ID NO: 64344 - DNA, 25 bp, Saccharomyces pastorianus
cgcatttttatcaggtttcatcatc

SEQ ID NO: 64345 - DNA, 25 bp, Saccharomyces pastorianus
aatccagtttgcattcattgtttta

SEQ ID NO: 64346 - DNA, 25 bp, Saccharomyces pastorianus
agacttccaagaaggcgtactttgc

SEQ ID NO: 64347 - DNA, 25 bp, Saccharomyces pastorianus
gtcttgttggtgagtttgaggttac

SEQ ID NO: 64348 - DNA, 25 bp, Saccharomyces pastorianus
aagcactacatcatctgcggtcata

SEQ ID NO: 64349 - DNA, 25 bp, Saccharomyces pastorianus
tttccccttcaacgcatttttatca

SEQ ID NO: 64350 - DNA, 25 bp, Saccharomyces pastorianus
gcgtactttgcccagattgaaaaaa

SEQ ID NO: 64351 - DNA, 25 bp, Saccharomyces pastorianus
gcttttggtgagttcattgttgcta

SEQ ID NO: 64352 - DNA, 25 bp, Saccharomyces pastorianus
cagggattccaaaaaacagagcttt

SEQ ID NO: 64353 - DNA, 25 bp, Saccharomyces pastorianus
tatgtgatagttttccagggattcc

SEQ ID NO: 64354 - DNA, 25 bp, Saccharomyces pastorianus
ttaatccgtgacaatttccccttca

SEQ ID NO: 64355 - DNA, 25 bp, Saccharomyces pastorianus
ttcaactcgggaaaggacctactgc

SEQ ID NO: 64356 - DNA, 25 bp, Saccharomyces pastorianus
aatagctctattgtctctttgtcgg

SEQ ID NO: 64357 - DNA, 25 bp, Saccharomyces pastorianus
aagagctaagcagtcatccacaata

SEQ ID NO: 64358 - DNA, 25 bp, Saccharomyces pastorianus
aaccggagcggcgatggtcttccag

SEQ ID NO: 64359 - DNA, 25 bp, Saccharomyces pastorianus
gattactatacgcaatccactggcg

SEQ ID NO: 64360 - DNA, 25 bp, Saccharomyces pastorianus
ggagacttctacaaacacagccgct

SEQ ID NO: 64361 - DNA, 25 bp, Saccharomyces pastorianus
tgaatcacagagcagctgcgcttct

SEQ ID NO: 64362 - DNA, 25 bp, Saccharomyces pastorianus
gtaacagcaccatttgcctcaatat

SEQ ID NO: 64363 - DNA, 25 bp, Saccharomyces pastorianus
tctttgtcggcgctaggcgaagaaa

SEQ ID NO: 64364 - DNA, 25 bp, Saccharomyces pastorianus
gacgggtaccatcgatttgtgaatt

SEQ ID NO: 64365 - DNA, 25 bp, Saccharomyces pastorianus
ggctgtgcgccggaacaagaactta

SEQ ID NO: 64366 - DNA, 25 bp, Saccharomyces pastorianus
agtgttccgagcttatgcgacatac

SEQ ID NO: 64367 - DNA, 25 bp, Saccharomyces pastorianus
accgctagaaaagagtgatcacaaa

SEQ ID NO: 64368 - DNA, 25 bp, Saccharomyces pastorianus
cgagtgttccgagcttatgcgacat

SEQ ID NO: 64369 - DNA, 25 bp, Saccharomyces pastorianus
gagtgttccgagcttatgcgacata

SEQ ID NO: 64370 - DNA, 25 bp, Saccharomyces pastorianus
gcgagtgttccgagcttatgcgaca

SEQ ID NO: 64371 - DNA, 25 bp, Saccharomyces pastorianus
gttccgagcttatgcgacatactga

SEQ ID NO: 64372 - DNA, 25 bp, Saccharomyces pastorianus
taccgctagaaaagagtgatcacaa

SEQ ID NO: 64373 - DNA, 25 bp, Saccharomyces pastorianus
tgttccgagcttatgcgacatactg

SEQ ID NO: 64374 - DNA, 25 bp, Saccharomyces pastorianus
ggcgagtgttccgagcttatgcgac

SEQ ID NO: 64375 - DNA, 25 bp, Saccharomyces pastorianus
agaaaagagtgatcacaaagctcac

SEQ ID NO: 64376 - DNA, 25 bp, Saccharomyces pastorianus
gtgttccgagcttatgcgacatact

SEQ ID NO: 64377 - DNA, 25 bp, Saccharomyces pastorianus
agtgttccgagcttatgcgacatac

SEQ ID NO: 64378 - DNA, 25 bp, Saccharomyces pastorianus
ttatgcgacatactgataccgctag

SEQ ID NO: 64379 - DNA, 25 bp, Saccharomyces pastorianus
cgagtgttccgagcttatgcgacat

SEQ ID NO: 64380 - DNA, 25 bp, Saccharomyces pastorianus
gagtgttccgagcttatgcgacata

SEQ ID NO: 64381 - DNA, 25 bp, Saccharomyces pastorianus
gcgagtgttccgagcttatgcgaca

SEQ ID NO: 64382 - DNA, 25 bp, Saccharomyces pastorianus
gttccgagcttatgcgacatactga

SEQ ID NO: 64383 - DNA, 25 bp, Saccharomyces pastorianus
tgatcacaaagctcactcaattcaa

SEQ ID NO: 64384 - DNA, 25 bp, Saccharomyces pastorianus
taccgctagaaaagagtgatcacaa

SEQ ID NO: 64385 - DNA, 25 bp, Saccharomyces pastorianus
ggcgagtgttccgagcttatgcgac

SEQ ID NO: 64386 - DNA, 25 bp, Saccharomyces pastorianus
gtgttccgagcttatgcgacatact

SEQ ID NO: 64387 - DNA, 25 bp, Saccharomyces pastorianus
aaagctcactcaattcaacttcgaa

SEQ ID NO: 64388 - DNA, 25 bp, Saccharomyces pastorianus
gtggtagcatgatcatttttcctta

SEQ ID NO: 64389 - DNA, 25 bp, Saccharomyces pastorianus
gcatgatcatttttccttatatagg

SEQ ID NO: 64390 - DNA, 25 bp, Saccharomyces pastorianus
agcatctccagtgtcctcagataca

SEQ ID NO: 64391 - DNA, 25 bp, Saccharomyces pastorianus
gatacaccaataccccacatgttag

SEQ ID NO: 64392 - DNA, 25 bp, Saccharomyces pastorianus
agaagcatctccagtgtcctcagat

SEQ ID NO: 64393 - DNA, 25 bp, Saccharomyces pastorianus
aatgatgttattcaccgtagcaaag

SEQ ID NO: 64394 - DNA, 25 bp, Saccharomyces pastorianus
gctctgacagaagcatctccagtgt

SEQ ID NO: 64395 - DNA, 25 bp, Saccharomyces pastorianus
ataccccacatgttagtggtagcat

SEQ ID NO: 64396 - DNA, 25 bp, Saccharomyces pastorianus
attcaccgtagcaaagacggctctg

SEQ ID NO: 64397 - DNA, 25 bp, Saccharomyces pastorianus
agtgtcctcagatacaccaataccc

SEQ ID NO: 64398 - DNA, 25 bp, Saccharomyces pastorianus
agcaaagacggctctgacagaagca

SEQ ID NO: 64399 - DNA, 25 bp, Saccharomyces pastorianus
gactttgacacctacggttgtgacg

SEQ ID NO: 64400 - DNA, 25 bp, Saccharomyces pastorianus
gaacgaaagcatctcccaagtcaac

SEQ ID NO: 64401 - DNA, 25 bp, Saccharomyces pastorianus
tgcttctaaagcttccacatcaaac

SEQ ID NO: 64402 - DNA, 25 bp, Saccharomyces pastorianus
aagtcaaccagtcgtatggccacag

SEQ ID NO: 64403 - DNA, 25 bp, Saccharomyces pastorianus
agaagcgaattcagcagtgcccaca

SEQ ID NO: 64404 - DNA, 25 bp, Saccharomyces pastorianus
acggtgatactaacgattccatgac

SEQ ID NO: 64405 - DNA, 25 bp, Saccharomyces pastorianus
aaggaagataatctcctcgccgcac

SEQ ID NO: 64406 - DNA, 25 bp, Saccharomyces pastorianus
gaacaatttacgcttgaactcgccc

SEQ ID NO: 64407 - DNA, 25 bp, Saccharomyces pastorianus
tgaggatcgtccaaaaccgcaggtc

SEQ ID NO: 64408 - DNA, 25 bp, Saccharomyces pastorianus
tattgccaaatagtgccgctgacag

SEQ ID NO: 64409 - DNA, 25 bp, Saccharomyces pastorianus
tggcacctagtgtaaagctttcaat

SEQ ID NO: 64410 - DNA, 25 bp, Saccharomyces pastorianus
gaaaccgagattggccgcactttat

SEQ ID NO: 64411 - DNA, 25 bp, Saccharomyces pastorianus
gaaagatccccaagtgaaaccgaga

SEQ ID NO: 64412 - DNA, 25 bp, Saccharomyces pastorianus
gccaccctcaggttgcaaacattaa

SEQ ID NO: 64413 - DNA, 25 bp, Saccharomyces pastorianus
attgtaccatgcttgactgagagac

SEQ ID NO: 64414 - DNA, 25 bp, Saccharomyces pastorianus
gacacaggttgattccgatatcgaa

SEQ ID NO: 64415 - DNA, 25 bp, Saccharomyces pastorianus
ttaacagattctgatgccaccctca

SEQ ID NO: 64416 - DNA, 25 bp, Saccharomyces pastorianus
ttcagaaaccaacactttcccagtt

SEQ ID NO: 64417 - DNA, 25 bp, Saccharomyces pastorianus
cgacttctgttggtaatcgttcgaa

SEQ ID NO: 64418 - DNA, 25 bp, Saccharomyces pastorianus
atcgttcgaatatcttggctacagc

SEQ ID NO: 64419 - DNA, 25 bp, Saccharomyces pastorianus
atgagctgctgagatttcttgcgaa

SEQ ID NO: 64420 - DNA, 25 bp, Saccharomyces pastorianus
taacggttattgctcctggtttgtt

SEQ ID NO: 64421 - DNA, 25 bp, Saccharomyces pastorianus
gcaacaataacaattcgggctcgaa

SEQ ID NO: 64422 - DNA, 25 bp, Saccharomyces pastorianus
ggaagtagcagctccagcaatacta

SEQ ID NO: 64423 - DNA, 25 bp, Saccharomyces pastorianus
gctccaggtgttttattggcgccag

SEQ ID NO: 64424 - DNA, 25 bp, Saccharomyces pastorianus
taaactacaactacactacactacc

SEQ ID NO: 64425 - DNA, 25 bp, Saccharomyces pastorianus
gcgccagccgccaataatgactttg

SEQ ID NO: 64426 - DNA, 25 bp, Saccharomyces pastorianus
aatctcctcaccagaaagccattct

SEQ ID NO: 64427 - DNA, 25 bp, Saccharomyces pastorianus
aacaatcttcctgttgcatcggtag

SEQ ID NO: 64428 - DNA, 25 bp, Saccharomyces pastorianus
tatgaacagctcaaacccctctaat

SEQ ID NO: 64429 - DNA, 25 bp, Saccharomyces pastorianus
tgcatcggtaggtcctgctccaggt

SEQ ID NO: 64430 - DNA, 25 bp, Saccharomyces pastorianus
gggctcgaataccttaatttcacct

SEQ ID NO: 64431 - DNA, 25 bp, Saccharomyces pastorianus
accctacaatcccaatatgttcaca

SEQ ID NO: 64432 - DNA, 25 bp, Saccharomyces pastorianus
aacccagccggtttacaaagcaatg

SEQ ID NO: 64433 - DNA, 25 bp, Saccharomyces pastorianus
ggagaaattgttcaaggtttcgaca

SEQ ID NO: 64434 - DNA, 25 bp, Saccharomyces pastorianus
acaaagcaatggtttgcatatccaa

SEQ ID NO: 64435 - DNA, 25 bp, Saccharomyces pastorianus
attgttcaaggtttcgacaacccag

SEQ ID NO: 64436 - DNA, 25 bp, Saccharomyces pastorianus
gtttatgttgctgagagcagatgat

SEQ ID NO: 64437 - DNA, 25 bp, Saccharomyces pastorianus
tcaaggtttcgacaacccagccggt

SEQ ID NO: 64438 - DNA, 25 bp, Saccharomyces pastorianus
atggtttgcatatccaagggcaaaa

SEQ ID NO: 64439 - DNA, 25 bp, Saccharomyces pastorianus
atatccaagggcaaaagtttatgtt

SEQ ID NO: 64440 - DNA, 25 bp, Saccharomyces pastorianus
tgttcaaggtttcgacaacccagcc

SEQ ID NO: 64441 - DNA, 25 bp, Saccharomyces pastorianus
gcaatggtttgcatatccaagggca

SEQ ID NO: 64442 - DNA, 25 bp, Saccharomyces pastorianus
caaaagtttatgttgctgagagcag

SEQ ID NO: 64443 - DNA, 25 bp, Saccharomyces pastorianus
gttggttttgaaactgcattcagaa

SEQ ID NO: 64444 - DNA, 25 bp, Saccharomyces pastorianus
attccaacatccaccagttcgaaaa

SEQ ID NO: 64445 - DNA, 25 bp, Saccharomyces pastorianus
attcagaaaacagagctcccctact

SEQ ID NO: 64446 - DNA, 25 bp, Saccharomyces pastorianus
gaagacgactttttagtcgacgatg

SEQ ID NO: 64447 - DNA, 25 bp, Saccharomyces pastorianus
tcgacgaagacaatgcggcacgctt

SEQ ID NO: 64448 - DNA, 25 bp, Saccharomyces pastorianus
aatgcggcacgcttaagaaacttaa

SEQ ID NO: 64449 - DNA, 25 bp, Saccharomyces pastorianus
caaggtcctggtacatatattatca

SEQ ID NO: 64450 - DNA, 25 bp, Saccharomyces pastorianus
gagccaccagaagaaacgagtacga

SEQ ID NO: 64451 - DNA, 25 bp, Saccharomyces pastorianus
aacaaagccaaatcctaagagacag

SEQ ID NO: 64452 - DNA, 25 bp, Saccharomyces pastorianus
cctactgcatatggagccaccagaa

SEQ ID NO: 64453 - DNA, 25 bp, Saccharomyces pastorianus
aagaatctccagatgttggttttga

SEQ ID NO: 64454 - DNA, 25 bp, Saccharomyces pastorianus
gaggccgcacatactttcaaagaag

SEQ ID NO: 64455 - DNA, 25 bp, Saccharomyces pastorianus
agctttgaggccagcgttaacgaaa

SEQ ID NO: 64456 - DNA, 25 bp, Saccharomyces pastorianus
tttttatgccagaattccgaacttt

SEQ ID NO: 64457 - DNA, 25 bp, Saccharomyces pastorianus
tccgaactttctaacgattgatcca

SEQ ID NO: 64458 - DNA, 25 bp, Saccharomyces pastorianus
gaagatgccaatgacttttctgacc

SEQ ID NO: 64459 - DNA, 25 bp, Saccharomyces pastorianus
ggaaagtgccaaccatagagaacat

SEQ ID NO: 64460 - DNA, 25 bp, Saccharomyces pastorianus
gattgatccagttccgtttgaccct

SEQ ID NO: 64461 - DNA, 25 bp, Saccharomyces pastorianus
gtttgaccctccaagctttgaggcc

SEQ ID NO: 64462 - DNA, 25 bp, Saccharomyces pastorianus
ttttctgaccaagatgaggccgcac

SEQ ID NO: 64463 - DNA, 25 bp, Saccharomyces pastorianus
gaccaactggatgaccgtcttatcg

SEQ ID NO: 64464 - DNA, 25 bp, Saccharomyces pastorianus
gagatattcccgtgacattgaccaa

SEQ ID NO: 64465 - DNA, 25 bp, Saccharomyces pastorianus
acgctgatacagataaccttacttt

SEQ ID NO: 64466 - DNA, 25 bp, Saccharomyces pastorianus
gatttcaaggaatacggatactcgc

SEQ ID NO: 64467 - DNA, 25 bp, Saccharomyces pastorianus
ttcaacgaaggcaataccgcgactc

SEQ ID NO: 64468 - DNA, 25 bp, Saccharomyces pastorianus
gaaaccatcagtgaagttccagaag

SEQ ID NO: 64469 - DNA, 25 bp, Saccharomyces pastorianus
gatactcgctattttccgttttcat

SEQ ID NO: 64470 - DNA, 25 bp, Saccharomyces pastorianus
gagcccttgccgttcaaggaagtta

SEQ ID NO: 64471 - DNA, 25 bp, Saccharomyces pastorianus
gcgactccttatttcctggtatatg

SEQ ID NO: 64472 - DNA, 25 bp, Saccharomyces pastorianus
ggatgcattcttagaaaccgttaaa

SEQ ID NO: 64473 - DNA, 25 bp, Saccharomyces pastorianus
ccgttttcattcatcgaggcgaggc

SEQ ID NO: 64474 - DNA, 25 bp, Saccharomyces pastorianus
tttaaatctattgagcccttgccgt

SEQ ID NO: 64475 - DNA, 25 bp, Saccharomyces pastorianus
ggaactgttgaatcgtgatggatca

SEQ ID NO: 64476 - DNA, 25 bp, Saccharomyces pastorianus
gatgccccagatttggcttcaccta

SEQ ID NO: 64477 - DNA, 25 bp, Saccharomyces pastorianus
aaagaactggcctatctagcctttg

SEQ ID NO: 64478 - DNA, 25 bp, Saccharomyces pastorianus
agcaaagatgcgtaactccgtcaaa

SEQ ID NO: 64479 - DNA, 25 bp, Saccharomyces pastorianus
gcaatcttttctatgcaatggtgca

SEQ ID NO: 64480 - DNA, 25 bp, Saccharomyces pastorianus
agttgaaaggttcctctcgttattg

SEQ ID NO: 64481 - DNA, 25 bp, Saccharomyces pastorianus
gaaccgcgaggtgcaaacgttataa

SEQ ID NO: 64482 - DNA, 25 bp, Saccharomyces pastorianus
tagttatgagcgacgatgccccaga

SEQ ID NO: 64483 - DNA, 25 bp, Saccharomyces pastorianus
agcctttgccccaagtaatgtcgaa

SEQ ID NO: 64484 - DNA, 25 bp, Saccharomyces pastorianus
acaatgtattgttccgttatctgca

SEQ ID NO: 64485 - DNA, 25 bp, Saccharomyces pastorianus
aagtggttcagagcctattagatat

SEQ ID NO: 64486 - DNA, 25 bp, Saccharomyces pastorianus
gcaatggtgcattcacagcaaagat

SEQ ID NO: 64487 - DNA, 25 bp, Saccharomyces pastorianus
ggtacatcatcataacacgttcaat

SEQ ID NO: 64488 - DNA, 25 bp, Saccharomyces pastorianus
gaacatgctgtcaagtccgagaact

SEQ ID NO: 64489 - DNA, 25 bp, Saccharomyces pastorianus
tggcgtgtactgaggctgttgaaac

SEQ ID NO: 64490 - DNA, 25 bp, Saccharomyces pastorianus
gtattggctcatagatttcctcatt

SEQ ID NO: 64491 - DNA, 25 bp, Saccharomyces pastorianus
gagaacttatccgacgcacaagctg

SEQ ID NO: 64492 - DNA, 25 bp, Saccharomyces pastorianus
aaacggtcattggaggccactacaa

SEQ ID NO: 64493 - DNA, 25 bp, Saccharomyces pastorianus
attcttacatggcaattccctatac

SEQ ID NO: 64494 - DNA, 25 bp, Saccharomyces pastorianus
ggatcgtgttattcgtgttgaccaa

SEQ ID NO: 64495 - DNA, 25 bp, Saccharomyces pastorianus
taccatccgacaattccgggacgat

SEQ ID NO: 64496 - DNA, 25 bp, Saccharomyces pastorianus
aagctgccttcttggatcgtgttat

SEQ ID NO: 64497 - DNA, 25 bp, Saccharomyces pastorianus
acctggccaaccaattcgatctgga

SEQ ID NO: 64498 - DNA, 25 bp, Saccharomyces pastorianus
agtttatttctcttctcatcggtga

SEQ ID NO: 64499 - DNA, 25 bp, Saccharomyces pastorianus
gaaagtcttcttaatgctaccaaaa

SEQ ID NO: 64500 - DNA, 25 bp, Saccharomyces pastorianus
tatctaccttggatagctgtctcct

SEQ ID NO: 64501 - DNA, 25 bp, Saccharomyces pastorianus
tggaaactacaaaccaactccgagg

SEQ ID NO: 64502 - DNA, 25 bp, Saccharomyces pastorianus
ggatagctgtctcctcaacttggga

SEQ ID NO: 64503 - DNA, 25 bp, Saccharomyces pastorianus
atatatcgcttgttgatggcttacg

SEQ ID NO: 64504 - DNA, 25 bp, Saccharomyces pastorianus
cttcacctcatgcagttgctcaaaa

SEQ ID NO: 64505 - DNA, 25 bp, Saccharomyces pastorianus
tccgattttccggtaccaaatagat

SEQ ID NO: 64506 - DNA, 25 bp, Saccharomyces pastorianus
atcgattttcttggatcttttgcaa

SEQ ID NO: 64507 - DNA, 25 bp, Saccharomyces pastorianus
ttgggaccgcgaatccgattttccg

SEQ ID NO: 64508 - DNA, 25 bp, Saccharomyces pastorianus
gtttttcgactattttacattgcat

SEQ ID NO: 64509 - DNA, 25 bp, Saccharomyces pastorianus
gcagttcagccaatgctaatcctaa

SEQ ID NO: 64510 - DNA, 25 bp, Saccharomyces pastorianus
ggacaatctacccattgtttcttca

SEQ ID NO: 64511 - DNA, 25 bp, Saccharomyces pastorianus
aaatcaagcatttcgggcacctcaa

SEQ ID NO: 64512 - DNA, 25 bp, Saccharomyces pastorianus
gagaaacagccccttgaaattaaca

SEQ ID NO: 64513 - DNA, 25 bp, Saccharomyces pastorianus
gaacgtcggacacggcacaagcata

SEQ ID NO: 64514 - DNA, 25 bp, Saccharomyces pastorianus
atggaactaccgcaaccatcgttgc

SEQ ID NO: 64515 - DNA, 25 bp, Saccharomyces pastorianus
tccggattcagcaactccattggac

SEQ ID NO: 64516 - DNA, 25 bp, Saccharomyces pastorianus
tacaagctctttacccaacgatagg

SEQ ID NO: 64517 - DNA, 25 bp, Saccharomyces pastorianus
gttgcccacaacaaacgtcactaaa

SEQ ID NO: 64518 - DNA, 25 bp, Saccharomyces pastorianus
tgacgggtcctactcctaaaaacat

SEQ ID NO: 64519 - DNA, 25 bp, Saccharomyces pastorianus
ttaacaccaagatcctcgttgaatg

SEQ ID NO: 64520 - DNA, 25 bp, Saccharomyces pastorianus
gaaagtcattttgtcagtgcacctg

SEQ ID NO: 64521 - DNA, 25 bp, Saccharomyces pastorianus
aggtgctagtgttttggcgcaaata

SEQ ID NO: 64522 - DNA, 25 bp, Saccharomyces pastorianus
tccagctttggattttattctaact

SEQ ID NO: 64523 - DNA, 25 bp, Saccharomyces pastorianus
gaaaaatacgggagcacttccaaag

SEQ ID NO: 64524 - DNA, 25 bp, Saccharomyces pastorianus
ggtggtagttccaaaattccagctt

SEQ ID NO: 64525 - DNA, 25 bp, Saccharomyces pastorianus
cacgtgatatgaaccctgccttaat

SEQ ID NO: 64526 - DNA, 25 bp, Saccharomyces pastorianus
cggcaatgaacatcttttcccaatc

SEQ ID NO: 64527 - DNA, 25 bp, Saccharomyces pastorianus
tttcccaatcagtattattccgccc

SEQ ID NO: 64528 - DNA, 25 bp, Saccharomyces pastorianus
gagaccttctttgttgagttccaca

SEQ ID NO: 64529 - DNA, 25 bp, Saccharomyces pastorianus
ggatgctcataccatgattgaccaa

SEQ ID NO: 64530 - DNA, 25 bp, Saccharomyces pastorianus
gttccacatcattcccacaatttta

SEQ ID NO: 64531 - DNA, 25 bp, Saccharomyces pastorianus
agacgcccagaagtgtcacgggtct

SEQ ID NO: 64532 - DNA, 25 bp, Saccharomyces pastorianus
tgactccgatgatagcgtcgataac

SEQ ID NO: 64533 - DNA, 25 bp, Saccharomyces pastorianus
gacaatggtgataatgactccgatg

SEQ ID NO: 64534 - DNA, 25 bp, Saccharomyces pastorianus
ggatgataacgatggtgacaatgac

SEQ ID NO: 64535 - DNA, 25 bp, Saccharomyces pastorianus
atccagagacgctgcagaagaggaa

SEQ ID NO: 64536 - DNA, 25 bp, Saccharomyces pastorianus
tagcgtcgataacggaatcggatcc

SEQ ID NO: 64537 - DNA, 25 bp, Saccharomyces pastorianus
aagtgtcacgggtctttcggctgat

SEQ ID NO: 64538 - DNA, 25 bp, Saccharomyces pastorianus
aatcggatccgagacgcccagaagt

SEQ ID NO: 64539 - DNA, 25 bp, Saccharomyces pastorianus
tttcggctgatccagagacgctgca

SEQ ID NO: 64540 - DNA, 25 bp, Saccharomyces pastorianus
aaacattgtgcgtttgagcagccag

SEQ ID NO: 64541 - DNA, 25 bp, Saccharomyces pastorianus
agcagccaggcggaccaggacaatg

SEQ ID NO: 64542 - DNA, 25 bp, Saccharomyces pastorianus
tgaccaaatccttagttttttcgca

SEQ ID NO: 64543 - DNA, 25 bp, Saccharomyces pastorianus
gttacctattggagaagctactgtg

SEQ ID NO: 64544 - DNA, 25 bp, Saccharomyces pastorianus
agttccattccttgatatccaacaa

SEQ ID NO: 64545 - DNA, 25 bp, Saccharomyces pastorianus
tcagacgatccactcaataacgcaa

SEQ ID NO: 64546 - DNA, 25 bp, Saccharomyces pastorianus
acaagaacgctcttcagtcaaatca

SEQ ID NO: 64547 - DNA, 25 bp, Saccharomyces pastorianus
gaattggcccactagcgtggtcaat

SEQ ID NO: 64548 - DNA, 25 bp, Saccharomyces pastorianus
caattcaccaaagttccattccttg

SEQ ID NO: 64549 - DNA, 25 bp, Saccharomyces pastorianus
agttttttcgcaagtgactccaata

SEQ ID NO: 64550 - DNA, 25 bp, Saccharomyces pastorianus
aataagcttattggccctaggaggt

SEQ ID NO: 64551 - DNA, 25 bp, Saccharomyces pastorianus
ggcgagttattttaagctgtgttac

SEQ ID NO: 64552 - DNA, 25 bp, Saccharomyces pastorianus
tacaccttatccaaagaggcgagtt

SEQ ID NO: 64553 - DNA, 25 bp, Saccharomyces pastorianus
tccccgttaacactcactatggtat

SEQ ID NO: 64554 - DNA, 25 bp, Saccharomyces pastorianus
ttccccgttaacactcactatggta

SEQ ID NO: 64555 - DNA, 25 bp, Saccharomyces pastorianus
tgtcttccccgttaacactcactat

SEQ ID NO: 64556 - DNA, 25 bp, Saccharomyces pastorianus
tgctgctgtcttccccgttaacact

SEQ ID NO: 64557 - DNA, 25 bp, Saccharomyces pastorianus
tgcttttgctgctgtcttccccgtt

SEQ ID NO: 64558 - DNA, 25 bp, Saccharomyces pastorianus
cttttgctgctgtcttccccgttaa

SEQ ID NO: 64559 - DNA, 25 bp, Saccharomyces pastorianus
tttgctgctgtcttccccgttaaca

SEQ ID NO: 64560 - DNA, 25 bp, Saccharomyces pastorianus
attctgcttttgctgctgtcttccc

SEQ ID NO: 64561 - DNA, 25 bp, Saccharomyces pastorianus
ccccgttaacactcactatggtatc

SEQ ID NO: 64562 - DNA, 25 bp, Saccharomyces pastorianus
cccgttaacactcactatggtatcc

SEQ ID NO: 64563 - DNA, 25 bp, Saccharomyces pastorianus
tcttccccgttaacactcactatgg

SEQ ID NO: 64564 - DNA, 25 bp, Saccharomyces pastorianus
tccccgttaacactcactatggtat

SEQ ID NO: 64565 - DNA, 25 bp, Saccharomyces pastorianus
atgctttcagtattatttattccta

SEQ ID NO: 64566 - DNA, 25 bp, Saccharomyces pastorianus
ataattctgcttttgctgctgtctt

SEQ ID NO: 64567 - DNA, 25 bp, Saccharomyces pastorianus
ttccccgttaacactcactatggta

SEQ ID NO: 64568 - DNA, 25 bp, Saccharomyces pastorianus
tgtcttccccgttaacactcactat

SEQ ID NO: 64569 - DNA, 25 bp, Saccharomyces pastorianus
attcctataattctgcttttgctgc

SEQ ID NO: 64570 - DNA, 25 bp, Saccharomyces pastorianus
tgctgctgtcttccccgttaacact

SEQ ID NO: 64571 - DNA, 25 bp, Saccharomyces pastorianus
cttttgctgctgtcttccccgttaa

SEQ ID NO: 64572 - DNA, 25 bp, Saccharomyces pastorianus
tttgctgctgtcttccccgttaaca

SEQ ID NO: 64573 - DNA, 25 bp, Saccharomyces pastorianus
attctgcttttgctgctgtcttccc

SEQ ID NO: 64574 - DNA, 25 bp, Saccharomyces pastorianus
cccgttaacactcactatggtatcc

SEQ ID NO: 64575 - DNA, 25 bp, Saccharomyces pastorianus
gatttcgccgaaaacgaactgctga

SEQ ID NO: 64576 - DNA, 25 bp, Saccharomyces pastorianus
aaattccatagtctggagctctccc

SEQ ID NO: 64577 - DNA, 25 bp, Saccharomyces pastorianus
aagttccataatcagcccaattcgg

SEQ ID NO: 64578 - DNA, 25 bp, Saccharomyces pastorianus
tcaacgggtgacagcattgtttcgc

SEQ ID NO: 64579 - DNA, 25 bp, Saccharomyces pastorianus
ttcctcaagagccaccaatgttatc

SEQ ID NO: 64580 - DNA, 25 bp, Saccharomyces pastorianus
tctcccaatgtctcgatcaataggc

SEQ ID NO: 64581 - DNA, 25 bp, Saccharomyces pastorianus
atgtaatgctaacgaactccacctc

SEQ ID NO: 64582 - DNA, 25 bp, Saccharomyces pastorianus
aatcagcccaattcggatgccaatg

SEQ ID NO: 64583 - DNA, 25 bp, Saccharomyces pastorianus
cctttccgatttgcaactggttaat

SEQ ID NO: 64584 - DNA, 25 bp, Saccharomyces pastorianus
atagtgttgcgctgtaagatggtta

SEQ ID NO: 64585 - DNA, 25 bp, Saccharomyces pastorianus
gaaattttggccgatgtaatgctaa

SEQ ID NO: 64586 - DNA, 25 bp, Saccharomyces pastorianus
aattgctaaccccagtattgaacgt

SEQ ID NO: 64587 - DNA, 25 bp, Saccharomyces pastorianus
cgtttccctggaatgcgttagcaaa

SEQ ID NO: 64588 - DNA, 25 bp, Saccharomyces pastorianus
agacgccattagctgtattgtaaag

SEQ ID NO: 64589 - DNA, 25 bp, Saccharomyces pastorianus
gaaaataccgcccattcagacgcca

SEQ ID NO: 64590 - DNA, 25 bp, Saccharomyces pastorianus
taatcggttgatcgtagtactgttc

SEQ ID NO: 64591 - DNA, 25 bp, Saccharomyces pastorianus
agcaactgggtcaggtgaccgtcaa

SEQ ID NO: 64592 - DNA, 25 bp, Saccharomyces pastorianus
gggattcaatactccaccaatctcc

SEQ ID NO: 64593 - DNA, 25 bp, Saccharomyces pastorianus
atctccaccgtatccattgaagttg

SEQ ID NO: 64594 - DNA, 25 bp, Saccharomyces pastorianus
gatttaattatgttctaccccggcg

SEQ ID NO: 64595 - DNA, 25 bp, Saccharomyces pastorianus
gtactgttcataggactggtaacca

SEQ ID NO: 64596 - DNA, 25 bp, Saccharomyces pastorianus
ggaggcgaacaacaacgattccaca

SEQ ID NO: 64597 - DNA, 25 bp, Saccharomyces pastorianus
agaaacgttggacatcgcctccact

SEQ ID NO: 64598 - DNA, 25 bp, Saccharomyces pastorianus
aagtcacgtacgatctatcacaact

SEQ ID NO: 64599 - DNA, 25 bp, Saccharomyces pastorianus
ctgttaaccgttcagccattggtat

SEQ ID NO: 64600 - DNA, 25 bp, Saccharomyces pastorianus
gcacgtttagccatccaatttctag

SEQ ID NO: 64601 - DNA, 25 bp, Saccharomyces pastorianus
ccattggtatccctagtgttcgaga

SEQ ID NO: 64602 - DNA, 25 bp, Saccharomyces pastorianus
gatcccatagccgaagacgtgttga

SEQ ID NO: 64603 - DNA, 25 bp, Saccharomyces pastorianus
attcgccatcgaacagctgttaacc

SEQ ID NO: 64604 - DNA, 25 bp, Saccharomyces pastorianus
gtgttcgagaccatttccaacggta

SEQ ID NO: 64605 - DNA, 25 bp, Saccharomyces pastorianus
agatcccacgaactcacttttggag

SEQ ID NO: 64606 - DNA, 25 bp, Saccharomyces pastorianus
aatgttgcacttgcacgtttagcca

SEQ ID NO: 64607 - DNA, 25 bp, Saccharomyces pastorianus
ttaacactaactcatctccgatttc

SEQ ID NO: 64608 - DNA, 25 bp, Saccharomyces pastorianus
gacccgaattgctagaagccctgga

SEQ ID NO: 64609 - DNA, 25 bp, Saccharomyces pastorianus
ggtatagtacgttctgagactgcac

SEQ ID NO: 64610 - DNA, 25 bp, Saccharomyces pastorianus
aactatactcttatgcggaagccaa

SEQ ID NO: 64611 - DNA, 25 bp, Saccharomyces pastorianus
catctgtttgactcccgacaagaag

SEQ ID NO: 64612 - DNA, 25 bp, Saccharomyces pastorianus
acatccacctagaaccgagtttcat

SEQ ID NO: 64613 - DNA, 25 bp, Saccharomyces pastorianus
tggttgctggctgcatctgtttgac

SEQ ID NO: 64614 - DNA, 25 bp, Saccharomyces pastorianus
tcttatgatcacttcttctgcacat

SEQ ID NO: 64615 - DNA, 25 bp, Saccharomyces pastorianus
aattgttgccaacttgggtacggtg

SEQ ID NO: 64616 - DNA, 25 bp, Saccharomyces pastorianus
ttgagaccgcaagagatgatcctga

SEQ ID NO: 64617 - DNA, 25 bp, Saccharomyces pastorianus
gaacctgattatgaaacgacggcac

SEQ ID NO: 64618 - DNA, 25 bp, Saccharomyces pastorianus
gaaccaagtttattctgccattact

SEQ ID NO: 64619 - DNA, 25 bp, Saccharomyces pastorianus
agggtatatttcattctcgtcgctt

SEQ ID NO: 64620 - DNA, 25 bp, Saccharomyces pastorianus
ctttgaagttctctcacttgctgta

SEQ ID NO: 64621 - DNA, 25 bp, Saccharomyces pastorianus
gggcctgttgtcaatgttgtccaaa

SEQ ID NO: 64622 - DNA, 25 bp, Saccharomyces pastorianus
ccttattcgtgactcttaccttggt

SEQ ID NO: 64623 - DNA, 25 bp, Saccharomyces pastorianus
ttaccttggtctttggagcaacctt

SEQ ID NO: 64624 - DNA, 25 bp, Saccharomyces pastorianus
ggagcaacctttttcgtgattcata

SEQ ID NO: 64625 - DNA, 25 bp, Saccharomyces pastorianus
gaacacgcgctggaagtctttgaag

SEQ ID NO: 64626 - DNA, 25 bp, Saccharomyces pastorianus
gttttagaccaattccgcagacaga

SEQ ID NO: 64627 - DNA, 25 bp, Saccharomyces pastorianus
catgcctgatgtaccaattgctgaa

SEQ ID NO: 64628 - DNA, 25 bp, Saccharomyces pastorianus
tcgctttgcacacatcttgacagaa

SEQ ID NO: 64629 - DNA, 25 bp, Saccharomyces pastorianus
tgacaacgttgagatcatgcctgat

SEQ ID NO: 64630 - DNA, 25 bp, Saccharomyces pastorianus
cggaaaccgttcgccatcgactgaa

SEQ ID NO: 64631 - DNA, 25 bp, Saccharomyces pastorianus
tgggcataatttcgacctgtaaagg

SEQ ID NO: 64632 - DNA, 25 bp, Saccharomyces pastorianus
acggaaaccgttcgccatcgactga

SEQ ID NO: 64633 - DNA, 25 bp, Saccharomyces pastorianus
aacggaaaccgttcgccatcgactg

SEQ ID NO: 64634 - DNA, 25 bp, Saccharomyces pastorianus
gggcataatttcgacctgtaaaggt

SEQ ID NO: 64635 - DNA, 25 bp, Saccharomyces pastorianus
gcataatttcgacctgtaaaggttc

SEQ ID NO: 64636 - DNA, 25 bp, Saccharomyces pastorianus
ttccaacggaaaccgttcgccatcg

SEQ ID NO: 64637 - DNA, 25 bp, Saccharomyces pastorianus
caacggaaaccgttcgccatcgact

SEQ ID NO: 64638 - DNA, 25 bp, Saccharomyces pastorianus
ggcataatttcgacctgtaaaggtt

SEQ ID NO: 64639 - DNA, 25 bp, Saccharomyces pastorianus
gaaaccgttcgccatcgactgaaaa

SEQ ID NO: 64640 - DNA, 25 bp, Saccharomyces pastorianus
atgggcataatttcgacctgtaaag

SEQ ID NO: 64641 - DNA, 25 bp, Saccharomyces pastorianus
ttaccacttccatgtccatatagta

SEQ ID NO: 64642 - DNA, 25 bp, Saccharomyces pastorianus
gctatacctggtcgctattgtgtac

SEQ ID NO: 64643 - DNA, 25 bp, Saccharomyces pastorianus
tcttgggccctgatggttacatgaa

SEQ ID NO: 64644 - DNA, 25 bp, Saccharomyces pastorianus
aaaactcttacgtatgtcattggtg

SEQ ID NO: 64645 - DNA, 25 bp, Saccharomyces pastorianus
aagacgattattcctcaacactatg

SEQ ID NO: 64646 - DNA, 25 bp, Saccharomyces pastorianus
gtgggtcaacaatattctttacgag

SEQ ID NO: 64647 - DNA, 25 bp, Saccharomyces pastorianus
gacggatttgtcatcttacccgata

SEQ ID NO: 64648 - DNA, 25 bp, Saccharomyces pastorianus
agagtttttgtccattaccagccct

SEQ ID NO: 64649 - DNA, 25 bp, Saccharomyces pastorianus
atggttgttcctttcatccaggaga

SEQ ID NO: 64650 - DNA, 25 bp, Saccharomyces pastorianus
tgatggcattgctactagccctgaa

SEQ ID NO: 64651 - DNA, 25 bp, Saccharomyces pastorianus
aatccttgagagacttgggtcccaa

SEQ ID NO: 64652 - DNA, 25 bp, Saccharomyces pastorianus
agaacgcgtgcctgagcgatgactc

SEQ ID NO: 64653 - DNA, 25 bp, Saccharomyces pastorianus
gactctttaaccgatcatcacggaa

SEQ ID NO: 64654 - DNA, 25 bp, Saccharomyces pastorianus
gaagataataagaacgcgtgcctga

SEQ ID NO: 64655 - DNA, 25 bp, Saccharomyces pastorianus
tttcacctcattttttacttgaatg

SEQ ID NO: 64656 - DNA, 25 bp, Saccharomyces pastorianus
gagcgatgactctttaaccgatcat

SEQ ID NO: 64657 - DNA, 25 bp, Saccharomyces pastorianus
gcgtgcctgagcgatgactctttaa

SEQ ID NO: 64658 - DNA, 25 bp, Saccharomyces pastorianus
taataagaacgcgtgcctgagcgat

SEQ ID NO: 64659 - DNA, 25 bp, Saccharomyces pastorianus
taaccgatcatcacggaaacaacaa

SEQ ID NO: 64660 - DNA, 25 bp, Saccharomyces pastorianus
gtgcctgagcgatgactctttaacc

SEQ ID NO: 64661 - DNA, 25 bp, Saccharomyces pastorianus
atgactctttaaccgatcatcacgg

SEQ ID NO: 64662 - DNA, 25 bp, Saccharomyces pastorianus
gcctgagcgatgactctttaaccga

SEQ ID NO: 64663 - DNA, 25 bp, Saccharomyces pastorianus
gtgatctataccttcacatagtaca

SEQ ID NO: 64664 - DNA, 25 bp, Saccharomyces pastorianus
aaacagcattgttatcgagtggaca

SEQ ID NO: 64665 - DNA, 25 bp, Saccharomyces pastorianus
aagaacgtactgtctgaatcaaaac

SEQ ID NO: 64666 - DNA, 25 bp, Saccharomyces pastorianus
gatcgattgcaattcgaatccatta

SEQ ID NO: 64667 - DNA, 25 bp, Saccharomyces pastorianus
aatggtaagtgaaacggtcgccgat

SEQ ID NO: 64668 - DNA, 25 bp, Saccharomyces pastorianus
ctctaccatgaagctgatcgattgc

SEQ ID NO: 64669 - DNA, 25 bp, Saccharomyces pastorianus
aattgcagctactagacgacgttga

SEQ ID NO: 64670 - DNA, 25 bp, Saccharomyces pastorianus
aagctatagtcgacttctctaccat

SEQ ID NO: 64671 - DNA, 25 bp, Saccharomyces pastorianus
aacggtcgccgatagtataataata

SEQ ID NO: 64672 - DNA, 25 bp, Saccharomyces pastorianus
caagcttgattgcagcgaagacgat

SEQ ID NO: 64673 - DNA, 25 bp, Saccharomyces pastorianus
caattcggagattgttttagtgccg

SEQ ID NO: 64674 - DNA, 25 bp, Saccharomyces pastorianus
aataggtatgctccacaagcccaac

SEQ ID NO: 64675 - DNA, 25 bp, Saccharomyces pastorianus
agctaattatgctgcacctgctcag

SEQ ID NO: 64676 - DNA, 25 bp, Saccharomyces pastorianus
agacgatgtcgtatgcaccttctaa

SEQ ID NO: 64677 - DNA, 25 bp, Saccharomyces pastorianus
agttttacttgccagaagctcccca

SEQ ID NO: 64678 - DNA, 25 bp, Saccharomyces pastorianus
aactcgcctattcaaccgcaaatga

SEQ ID NO: 64679 - DNA, 25 bp, Saccharomyces pastorianus
aatgggccacaacctaatatgcaag

SEQ ID NO: 64680 - DNA, 25 bp, Saccharomyces pastorianus
gcacattactcagctggcggaaaca

SEQ ID NO: 64681 - DNA, 25 bp, Saccharomyces pastorianus
aaggtattcgccctaatcagtttca

SEQ ID NO: 64682 - DNA, 25 bp, Saccharomyces pastorianus
atacatactacgtaggccgttcacc

SEQ ID NO: 64683 - DNA, 25 bp, Saccharomyces pastorianus
atggaaacggccactcaggcattgc

SEQ ID NO: 64684 - DNA, 25 bp, Saccharomyces pastorianus
gacgcagttatccacacagcatgaa

SEQ ID NO: 64685 - DNA, 25 bp, Saccharomyces pastorianus
atcttaaccattcccttagtgactt

SEQ ID NO: 64686 - DNA, 25 bp, Saccharomyces pastorianus
atttcaagcaggttgggcccctaga

SEQ ID NO: 64687 - DNA, 25 bp, Saccharomyces pastorianus
ttaataaccagtatcctccgaagga

SEQ ID NO: 64688 - DNA, 25 bp, Saccharomyces pastorianus
ggatccctggttcggatgccatatt

SEQ ID NO: 64689 - DNA, 25 bp, Saccharomyces pastorianus
actgccgcgcgcactaaagagttta

SEQ ID NO: 64690 - DNA, 25 bp, Saccharomyces pastorianus
cagacacgttttccagaaagccctg

SEQ ID NO: 64691 - DNA, 25 bp, Saccharomyces pastorianus
ggaacgctgcaatgatcttttagac

SEQ ID NO: 64692 - DNA, 25 bp, Saccharomyces pastorianus
gccatattccatctgcttttagcat

SEQ ID NO: 64693 - DNA, 25 bp, Saccharomyces pastorianus
gagttttgttcctcaagatctcgaa

SEQ ID NO: 64694 - DNA, 25 bp, Saccharomyces pastorianus
ttactgaccatgatgccttcgaagc

SEQ ID NO: 64695 - DNA, 25 bp, Saccharomyces pastorianus
gaaagccctggcaattactggaacg

SEQ ID NO: 64696 - DNA, 25 bp, Saccharomyces pastorianus
gaacatacactcgtttgagcaaaaa

SEQ ID NO: 64697 - DNA, 25 bp, Saccharomyces pastorianus
cgtgctgggcataaacaaacataat

SEQ ID NO: 64698 - DNA, 25 bp, Saccharomyces pastorianus
acagtcccaactccatatattcaag

SEQ ID NO: 64699 - DNA, 25 bp, Saccharomyces pastorianus
atcacacagtgattagtaaggacgt

SEQ ID NO: 64700 - DNA, 25 bp, Saccharomyces pastorianus
ataagaacatacactcgtttgagca

SEQ ID NO: 64701 - DNA, 25 bp, Saccharomyces pastorianus
gcacctcaaccagacactgtggaaa

SEQ ID NO: 64702 - DNA, 25 bp, Saccharomyces pastorianus
attagtaaggacgtgctgggcataa

SEQ ID NO: 64703 - DNA, 25 bp, Saccharomyces pastorianus
gaaacagtcccaactccatatattc

SEQ ID NO: 64704 - DNA, 25 bp, Saccharomyces pastorianus
attcaaggaacttatcacacagtga

SEQ ID NO: 64705 - DNA, 25 bp, Saccharomyces pastorianus
actgtggaaacagtcccaactccat

SEQ ID NO: 64706 - DNA, 25 bp, Saccharomyces pastorianus
gtcccaactccatatattcaaggaa

SEQ ID NO: 64707 - DNA, 25 bp, Saccharomyces pastorianus
aacagccttgtttgattcctgtcac

SEQ ID NO: 64708 - DNA, 25 bp, Saccharomyces pastorianus
aaagccacaattgtcatcgtcacat

SEQ ID NO: 64709 - DNA, 25 bp, Saccharomyces pastorianus
ggatctttgggctccatattcaaaa

SEQ ID NO: 64710 - DNA, 25 bp, Saccharomyces pastorianus
caagatgggctgcaagctgcgcttt

SEQ ID NO: 64711 - DNA, 25 bp, Saccharomyces pastorianus
acagggctgcgttaatgggatcttt

SEQ ID NO: 64712 - DNA, 25 bp, Saccharomyces pastorianus
gattcctgtcactcaggtacagttt

SEQ ID NO: 64713 - DNA, 25 bp, Saccharomyces pastorianus
gctgcgctttcgtatgctacgggaa

SEQ ID NO: 64714 - DNA, 25 bp, Saccharomyces pastorianus
aaattctcacctgcggatattgtta

SEQ ID NO: 64715 - DNA, 25 bp, Saccharomyces pastorianus
gcgatgtcgcatgcctttatcaagg

SEQ ID NO: 64716 - DNA, 25 bp, Saccharomyces pastorianus
gcaatcgtatttgtctctgctacaa

SEQ ID NO: 64717 - DNA, 25 bp, Saccharomyces pastorianus
ttggatctaccatacacttactcta

SEQ ID NO: 64718 - DNA, 25 bp, Saccharomyces pastorianus
atgccgttcaggtcatgtacgctga

SEQ ID NO: 64719 - DNA, 25 bp, Saccharomyces pastorianus
aagtggctcgtgacgaacgtccagc

SEQ ID NO: 64720 - DNA, 25 bp, Saccharomyces pastorianus
cctgtcgtgtacttttctgcggtag

SEQ ID NO: 64721 - DNA, 25 bp, Saccharomyces pastorianus
cagccaagtggctcgtgacgaacgt

SEQ ID NO: 64722 - DNA, 25 bp, Saccharomyces pastorianus
tgagcgccttccctgtcgtgtactt

SEQ ID NO: 64723 - DNA, 25 bp, Saccharomyces pastorianus
gtgacgaacgtccagcctcccattt

SEQ ID NO: 64724 - DNA, 25 bp, Saccharomyces pastorianus
ttttctgcggtagcgtcagccaagt

SEQ ID NO: 64725 - DNA, 25 bp, Saccharomyces pastorianus
tcaggtcatgtacgctgagcgcctt

SEQ ID NO: 64726 - DNA, 25 bp, Saccharomyces pastorianus
tacttttctgcggtagcgtcagcca

SEQ ID NO: 64727 - DNA, 25 bp, Saccharomyces pastorianus
cgtgtacttttctgcggtagcgtca

SEQ ID NO: 64728 - DNA, 25 bp, Saccharomyces pastorianus
tgcggtagcgtcagccaagtggctc

SEQ ID NO: 64729 - DNA, 25 bp, Saccharomyces pastorianus
caggcgaggatattgtctattaaca

SEQ ID NO: 64730 - DNA, 25 bp, Saccharomyces pastorianus
gaggatattgtctattaacagtgca

SEQ ID NO: 64731 - DNA, 25 bp, Saccharomyces pastorianus
cagtgcagtggccacactcacgttg

SEQ ID NO: 64732 - DNA, 25 bp, Saccharomyces pastorianus
aaggctatttacaggcgaggatatt

SEQ ID NO: 64733 - DNA, 25 bp, Saccharomyces pastorianus
gtctattaacagtgcagtggccaca

SEQ ID NO: 64734 - DNA, 25 bp, Saccharomyces pastorianus
ctatgtgaaggctatttacaggcga

SEQ ID NO: 64735 - DNA, 25 bp, Saccharomyces pastorianus
gtgaaggctatttacaggcgaggat

SEQ ID NO: 64736 - DNA, 25 bp, Saccharomyces pastorianus
attaacagtgcagtggccacactca

SEQ ID NO: 64737 - DNA, 25 bp, Saccharomyces pastorianus
ttgtctattaacagtgcagtggcca

SEQ ID NO: 64738 - DNA, 25 bp, Saccharomyces pastorianus
tttacaggcgaggatattgtctatt

SEQ ID NO: 64739 - DNA, 25 bp, Saccharomyces pastorianus
taacagtgcagtggccacactcacg

SEQ ID NO: 64740 - DNA, 25 bp, Saccharomyces pastorianus
aacatcgcatttcccgaacttgtga

SEQ ID NO: 64741 - DNA, 25 bp, Saccharomyces pastorianus
ggtttatctgaacaatttgcggact

SEQ ID NO: 64742 - DNA, 25 bp, Saccharomyces pastorianus
gtgacaccagtgattatctccttgc

SEQ ID NO: 64743 - DNA, 25 bp, Saccharomyces pastorianus
aatagtggcgtattcattccaatat

SEQ ID NO: 64744 - DNA, 25 bp, Saccharomyces pastorianus
acctggctgcttttgactttgatca

SEQ ID NO: 64745 - DNA, 25 bp, Saccharomyces pastorianus
aagaaaagtgtcaacctggctgctt

SEQ ID NO: 64746 - DNA, 25 bp, Saccharomyces pastorianus
gattcttgaacgatgtagcttggga

SEQ ID NO: 64747 - DNA, 25 bp, Saccharomyces pastorianus
gtagcttgggagaaaacgcctttag

SEQ ID NO: 64748 - DNA, 25 bp, Saccharomyces pastorianus
ttatctccttgcgtcgttatatcaa

SEQ ID NO: 64749 - DNA, 25 bp, Saccharomyces pastorianus
cgcctttaggttcatacgttattgt

SEQ ID NO: 64750 - DNA, 25 bp, Saccharomyces pastorianus
ccaatataccctcttctttctgaaa

SEQ ID NO: 64751 - DNA, 25 bp, Saccharomyces pastorianus
tggttccctagaatacggtacttgt

SEQ ID NO: 64752 - DNA, 25 bp, Saccharomyces pastorianus
gcttacggtgcctctcaattattat

SEQ ID NO: 64753 - DNA, 25 bp, Saccharomyces pastorianus
ttcccatcgcgtatgactgtgggca

SEQ ID NO: 64754 - DNA, 25 bp, Saccharomyces pastorianus
ggtcgatcaaggttttagttattca

SEQ ID NO: 64755 - DNA, 25 bp, Saccharomyces pastorianus
gcatatatcttttttgggccaattt

SEQ ID NO: 64756 - DNA, 25 bp, Saccharomyces pastorianus
tgacgcgtcaacctaccgaaggtag

SEQ ID NO: 64757 - DNA, 25 bp, Saccharomyces pastorianus
aaaatgcacgcaagagcccgtggtc

SEQ ID NO: 64758 - DNA, 25 bp, Saccharomyces pastorianus
gatatgttgtactccggtataacgg

SEQ ID NO: 64759 - DNA, 25 bp, Saccharomyces pastorianus
gagattgtgtcatcgcttacggtgc

SEQ ID NO: 64760 - DNA, 25 bp, Saccharomyces pastorianus
tggtcctagggctgtcctgacgcgt

SEQ ID NO: 64761 - DNA, 25 bp, Saccharomyces pastorianus
agcaggtgttctgaatggttcccta

SEQ ID NO: 64762 - DNA, 25 bp, Saccharomyces pastorianus
agaacattgttcaggcttccgtcac

SEQ ID NO: 64763 - DNA, 25 bp, Saccharomyces pastorianus
aagtgtattctattcgacgccgacg

SEQ ID NO: 64764 - DNA, 25 bp, Saccharomyces pastorianus
gcgaccacagtcattgctcatttga

SEQ ID NO: 64765 - DNA, 25 bp, Saccharomyces pastorianus
aagacctttttgctgtcaatctgga

SEQ ID NO: 64766 - DNA, 25 bp, Saccharomyces pastorianus
gtatagaagccattgcgaccacagt

SEQ ID NO: 64767 - DNA, 25 bp, Saccharomyces pastorianus
gatccaggtggttatttcatcgtta

SEQ ID NO: 64768 - DNA, 25 bp, Saccharomyces pastorianus
cgttgttctcaaagcttgcggtatt

SEQ ID NO: 64769 - DNA, 25 bp, Saccharomyces pastorianus
gaacgaatgcccattggatccaggt

SEQ ID NO: 64770 - DNA, 25 bp, Saccharomyces pastorianus
ggatgcccatcatgctaaggtctaa

SEQ ID NO: 64771 - DNA, 25 bp, Saccharomyces pastorianus
tcatttgaccgtagaggcccttgac

SEQ ID NO: 64772 - DNA, 25 bp, Saccharomyces pastorianus
agaagaaattcctatcgccgttgtt

SEQ ID NO: 64773 - DNA, 25 bp, Saccharomyces pastorianus
gaactcgcaaaaggagacgctcggt

SEQ ID NO: 64774 - DNA, 25 bp, Saccharomyces pastorianus
aattaacaaacgtcatgggctattt

SEQ ID NO: 64775 - DNA, 25 bp, Saccharomyces pastorianus
ggaccgttgtccagaagtgtttcta

SEQ ID NO: 64776 - DNA, 25 bp, Saccharomyces pastorianus
gacgctcggtatgtctaaattacta

SEQ ID NO: 64777 - DNA, 25 bp, Saccharomyces pastorianus
gtgtaaggtgctatcgttcagacta

SEQ ID NO: 64778 - DNA, 25 bp, Saccharomyces pastorianus
aagtgtttctatccgcagttagtga

SEQ ID NO: 64779 - DNA, 25 bp, Saccharomyces pastorianus
gcggttctattcctcaatgttgaat

SEQ ID NO: 64780 - DNA, 25 bp, Saccharomyces pastorianus
aatcgattctattttggtcttcaag

SEQ ID NO: 64781 - DNA, 25 bp, Saccharomyces pastorianus
aagttgacttctacagcggttctat

SEQ ID NO: 64782 - DNA, 25 bp, Saccharomyces pastorianus
acgtcaatgtaattccaggtatcag

SEQ ID NO: 64783 - DNA, 25 bp, Saccharomyces pastorianus
gaggttctgaggctatttttctaga

SEQ ID NO: 64784 - DNA, 25 bp, Saccharomyces pastorianus
gaagcaaatagtctctcaccaattt

SEQ ID NO: 64785 - DNA, 25 bp, Saccharomyces pastorianus
aaggaccttcttcatcattgggcga

SEQ ID NO: 64786 - DNA, 25 bp, Saccharomyces pastorianus
tagtggaccccgaaaaagccaggag

SEQ ID NO: 64787 - DNA, 25 bp, Saccharomyces pastorianus
agctctgccttgaaggcttccaaag

SEQ ID NO: 64788 - DNA, 25 bp, Saccharomyces pastorianus
ggcttccaaagttgcagaccctaag

SEQ ID NO: 64789 - DNA, 25 bp, Saccharomyces pastorianus
ttttgccaattgtcaagtttccaca

SEQ ID NO: 64790 - DNA, 25 bp, Saccharomyces pastorianus
aaacacctgggtcttttcagcgaag

SEQ ID NO: 64791 - DNA, 25 bp, Saccharomyces pastorianus
gtcgaatgcattagagcccacatcc

SEQ ID NO: 64792 - DNA, 25 bp, Saccharomyces pastorianus
gggcgatttattctccaaaagacag

SEQ ID NO: 64793 - DNA, 25 bp, Saccharomyces pastorianus
aagacagcacaatcaggacacaggt

SEQ ID NO: 64794 - DNA, 25 bp, Saccharomyces pastorianus
gcatgggctacgttggtgtgattac

SEQ ID NO: 64795 - DNA, 25 bp, Saccharomyces pastorianus
attttcgctagttgtggctcagacg

SEQ ID NO: 64796 - DNA, 25 bp, Saccharomyces pastorianus
ttggcattagccgttcccgaagagc

SEQ ID NO: 64797 - DNA, 25 bp, Saccharomyces pastorianus
aatagcactcaatcaccacaaactg

SEQ ID NO: 64798 - DNA, 25 bp, Saccharomyces pastorianus
atgatagatccccatctgcggtaca

SEQ ID NO: 64799 - DNA, 25 bp, Saccharomyces pastorianus
ggtgtacgctccagtccagatggac

SEQ ID NO: 64800 - DNA, 25 bp, Saccharomyces pastorianus
atagctagtttctctctctttcgaa

SEQ ID NO: 64801 - DNA, 25 bp, Saccharomyces pastorianus
agaggtctcctccaatattttcgct

SEQ ID NO: 64802 - DNA, 25 bp, Saccharomyces pastorianus
aagatcaacaacttcgggcttcctg

SEQ ID NO: 64803 - DNA, 25 bp, Saccharomyces pastorianus
tctgcggtacaaagcttctacgtta

SEQ ID NO: 64804 - DNA, 25 bp, Saccharomyces pastorianus
aggtcagactgctccatagctagtt

SEQ ID NO: 64805 - DNA, 25 bp, Saccharomyces pastorianus
ggagcatactcctacttatatggca

SEQ ID NO: 64806 - DNA, 25 bp, Saccharomyces pastorianus
gtgccatctcaccatcaagtaattt

SEQ ID NO: 64807 - DNA, 25 bp, Saccharomyces pastorianus
aatggattcaacagcgtatgccaat

SEQ ID NO: 64808 - DNA, 25 bp, Saccharomyces pastorianus
ggtttgaagcagaacgctatcccgt

SEQ ID NO: 64809 - DNA, 25 bp, Saccharomyces pastorianus
aatggccaataaactggcgccgcta

SEQ ID NO: 64810 - DNA, 25 bp, Saccharomyces pastorianus
acgctatcccgttagattcacaatg

SEQ ID NO: 64811 - DNA, 25 bp, Saccharomyces pastorianus
gacgcaaacctattccaaatggcca

SEQ ID NO: 64812 - DNA, 25 bp, Saccharomyces pastorianus
gtcactcagcaatatactcagccgc

SEQ ID NO: 64813 - DNA, 25 bp, Saccharomyces pastorianus
gtggcgagtgcaggtctgaacaata

SEQ ID NO: 64814 - DNA, 25 bp, Saccharomyces pastorianus
caatgggttctttcttgtgccatct

SEQ ID NO: 64815 - DNA, 25 bp, Saccharomyces pastorianus
gtaagcagcttcatgcgcaaataag

SEQ ID NO: 64816 - DNA, 25 bp, Saccharomyces pastorianus
agcgtatgccaatagtgtcactcag

SEQ ID NO: 64817 - DNA, 25 bp, Saccharomyces pastorianus
cagacactaaataccttttcgcctc

SEQ ID NO: 64818 - DNA, 25 bp, Saccharomyces pastorianus
aaatggtgcaggtggttccgcgtca

SEQ ID NO: 64819 - DNA, 25 bp, Saccharomyces pastorianus
caagctttctaggtcatcttcatca

SEQ ID NO: 64820 - DNA, 25 bp, Saccharomyces pastorianus
acttctggcactagcaacactacat

SEQ ID NO: 64821 - DNA, 25 bp, Saccharomyces pastorianus
gggtcaccatagtaagcctctttta

SEQ ID NO: 64822 - DNA, 25 bp, Saccharomyces pastorianus
aagcaagggaggctcttcgttgtcc

SEQ ID NO: 64823 - DNA, 25 bp, Saccharomyces pastorianus
ggattgaccattgacacttctggca

SEQ ID NO: 64824 - DNA, 25 bp, Saccharomyces pastorianus
agttatcaagaaccgctgcccaagc

SEQ ID NO: 64825 - DNA, 25 bp, Saccharomyces pastorianus
agaatcgcccacttttctaaggctt

SEQ ID NO: 64826 - DNA, 25 bp, Saccharomyces pastorianus
gggtagatacctcatcgctaagcaa

SEQ ID NO: 64827 - DNA, 25 bp, Saccharomyces pastorianus
atctttgccttcacaactcgagaat

SEQ ID NO: 64828 - DNA, 25 bp, Saccharomyces pastorianus
atattgatcactgacattcccagag

SEQ ID NO: 64829 - DNA, 25 bp, Saccharomyces pastorianus
cattcccagagagaaattcgacagt

SEQ ID NO: 64830 - DNA, 25 bp, Saccharomyces pastorianus
aattcgacagtaaatggcccaccca

SEQ ID NO: 64831 - DNA, 25 bp, Saccharomyces pastorianus
gatcactgacattcccagagagaaa

SEQ ID NO: 64832 - DNA, 25 bp, Saccharomyces pastorianus
ggagcagtttcctaaattacagagt

SEQ ID NO: 64833 - DNA, 25 bp, Saccharomyces pastorianus
gcaatactacacaccattaccgttt

SEQ ID NO: 64834 - DNA, 25 bp, Saccharomyces pastorianus
tactacacaccattaccgtttttga

SEQ ID NO: 64835 - DNA, 25 bp, Saccharomyces pastorianus
cagtaaatggcccacccagttggaa

SEQ ID NO: 64836 - DNA, 25 bp, Saccharomyces pastorianus
gagaacacaaatattgatcactgac

SEQ ID NO: 64837 - DNA, 25 bp, Saccharomyces pastorianus
gtaatctgcaatactacacaccatt

SEQ ID NO: 64838 - DNA, 25 bp, Saccharomyces pastorianus
ttatttacggagcagtttcctaaat

SEQ ID NO: 64839 - DNA, 25 bp, Saccharomyces pastorianus
tttactaccgtcttcacaaaacact

SEQ ID NO: 64840 - DNA, 25 bp, Saccharomyces pastorianus
acggatttgccacaccaagtacaga

SEQ ID NO: 64841 - DNA, 25 bp, Saccharomyces pastorianus
tagcaccgtattgaggcccgttcaa

SEQ ID NO: 64842 - DNA, 25 bp, Saccharomyces pastorianus
ggtgcagttcaccatgtgttacgac

SEQ ID NO: 64843 - DNA, 25 bp, Saccharomyces pastorianus
gaaactgccctcaggtggaaaccat

SEQ ID NO: 64844 - DNA, 25 bp, Saccharomyces pastorianus
tgaagcagtgtgtggttaccggcct

SEQ ID NO: 64845 - DNA, 25 bp, Saccharomyces pastorianus
ttaccggcctggtggatgacctaga

SEQ ID NO: 64846 - DNA, 25 bp, Saccharomyces pastorianus
tgttacgacaccatcaactctgcaa

SEQ ID NO: 64847 - DNA, 25 bp, Saccharomyces pastorianus
attacatccaccacgcgttagatag

SEQ ID NO: 64848 - DNA, 25 bp, Saccharomyces pastorianus
atataacattcccttccacaatagc

SEQ ID NO: 64849 - DNA, 25 bp, Saccharomyces pastorianus
gaatctaaggtttcctcgcttaaga

SEQ ID NO: 64850 - DNA, 25 bp, Saccharomyces pastorianus
taggaacgatcttatcgccggtgcc

SEQ ID NO: 64851 - DNA, 25 bp, Saccharomyces pastorianus
aatccaaagtgtgggcgcagttgac

SEQ ID NO: 64852 - DNA, 25 bp, Saccharomyces pastorianus
gattagctccaggtggttcgttaat

SEQ ID NO: 64853 - DNA, 25 bp, Saccharomyces pastorianus
ggtccctgccttcgctattgatcat

SEQ ID NO: 64854 - DNA, 25 bp, Saccharomyces pastorianus
atcgccggtgccatcggtggtactg

SEQ ID NO: 64855 - DNA, 25 bp, Saccharomyces pastorianus
ggttactttggtgttatcttccagg

SEQ ID NO: 64856 - DNA, 25 bp, Saccharomyces pastorianus
actccatttgacgtggtgaagtcca

SEQ ID NO: 64857 - DNA, 25 bp, Saccharomyces pastorianus
gtccccaaagtgtgtagattagctc

SEQ ID NO: 64858 - DNA, 25 bp, Saccharomyces pastorianus
gaaacgctctctggaacggtggtta

SEQ ID NO: 64859 - DNA, 25 bp, Saccharomyces pastorianus
ggtacgatgctgaacactccatttg

SEQ ID NO: 64860 - DNA, 25 bp, Saccharomyces pastorianus
gtgagaaactccatgcctgaggcaa

SEQ ID NO: 64861 - DNA, 25 bp, Saccharomyces pastorianus
aaggagggcttcagtagactctaca

SEQ ID NO: 64862 - DNA, 25 bp, Saccharomyces pastorianus
atgtcatcagatccaaacgcgaagc

SEQ ID NO: 64863 - DNA, 25 bp, Saccharomyces pastorianus
gaagccattgcccttcatatatcag

SEQ ID NO: 64864 - DNA, 25 bp, Saccharomyces pastorianus
aaaaatgttccagtcgctattccac

SEQ ID NO: 64865 - DNA, 25 bp, Saccharomyces pastorianus
gcgcctaagagagccaccaagtttg

SEQ ID NO: 64866 - DNA, 25 bp, Saccharomyces pastorianus
agacatcaggtccagctaccttgga

SEQ ID NO: 64867 - DNA, 25 bp, Saccharomyces pastorianus
aaggttccagctggaggtgaccaca

SEQ ID NO: 64868 - DNA, 25 bp, Saccharomyces pastorianus
ggctgttatgtatccacttgacgtg

SEQ ID NO: 64869 - DNA, 25 bp, Saccharomyces pastorianus
gtaattgtgccctttgagttgatca

SEQ ID NO: 64870 - DNA, 25 bp, Saccharomyces pastorianus
gcagctggtgcctcagcaggtatga

SEQ ID NO: 64871 - DNA, 25 bp, Saccharomyces pastorianus
agaaaatctccatcgcagctggtgc

SEQ ID NO: 64872 - DNA, 25 bp, Saccharomyces pastorianus
gtgttcttgatcttgacggcctcgt

SEQ ID NO: 64873 - DNA, 25 bp, Saccharomyces pastorianus
ttgtccatggatccgacgtttcttg

SEQ ID NO: 64874 - DNA, 25 bp, Saccharomyces pastorianus
cgacttgtcgttcacttggatctga

SEQ ID NO: 64875 - DNA, 25 bp, Saccharomyces pastorianus
tccttggcgatctctgtgttcttga

SEQ ID NO: 64876 - DNA, 25 bp, Saccharomyces pastorianus
gtccagcgacataccacgtatcagt

SEQ ID NO: 64877 - DNA, 25 bp, Saccharomyces pastorianus
ggatctgaagctttatcacgtcccc

SEQ ID NO: 64878 - DNA, 25 bp, Saccharomyces pastorianus
cgacgttggcctgggacttgtccat

SEQ ID NO: 64879 - DNA, 25 bp, Saccharomyces pastorianus
ccacgtatcagttcggtcatgtagg

SEQ ID NO: 64880 - DNA, 25 bp, Saccharomyces pastorianus
gaagaggacgcgatggccgacccac

SEQ ID NO: 64881 - DNA, 25 bp, Saccharomyces pastorianus
ttgacgttctcaatgatgcccgact

SEQ ID NO: 64882 - DNA, 25 bp, Saccharomyces pastorianus
gggcaggctcaattccttggcgatc

SEQ ID NO: 64883 - DNA, 25 bp, Saccharomyces pastorianus
caacgtcttgagattctgggacact

SEQ ID NO: 64884 - DNA, 25 bp, Saccharomyces pastorianus
ttggcatccggttatcgaagacctg

SEQ ID NO: 64885 - DNA, 25 bp, Saccharomyces pastorianus
tgaacccaaggtcagcaacacagct

SEQ ID NO: 64886 - DNA, 25 bp, Saccharomyces pastorianus
gttgtcgatgtccaattctccacga

SEQ ID NO: 64887 - DNA, 25 bp, Saccharomyces pastorianus
tgccaccaccgatttgacttacagg

SEQ ID NO: 64888 - DNA, 25 bp, Saccharomyces pastorianus
aattcttgactgttggcggtaccgg

SEQ ID NO: 64889 - DNA, 25 bp, Saccharomyces pastorianus
gatgctcgtgtagcggaagctgcca

SEQ ID NO: 64890 - DNA, 25 bp, Saccharomyces pastorianus
gaacctcggacaagcctctatggat

SEQ ID NO: 64891 - DNA, 25 bp, Saccharomyces pastorianus
tggaacaccgactacactctgtcaa

SEQ ID NO: 64892 - DNA, 25 bp, Saccharomyces pastorianus
gaagaaacgctactgcttggcatcc

SEQ ID NO: 64893 - DNA, 25 bp, Saccharomyces pastorianus
gattgacatcgtttgactgttctca

SEQ ID NO: 64894 - DNA, 25 bp, Saccharomyces pastorianus
gttcttcaccagaaaaaggccttga

SEQ ID NO: 64895 - DNA, 25 bp, Saccharomyces pastorianus
gaacatatctctagtttgagaccta

SEQ ID NO: 64896 - DNA, 25 bp, Saccharomyces pastorianus
taagaagacgaacactctatcctcg

SEQ ID NO: 64897 - DNA, 25 bp, Saccharomyces pastorianus
gtctcgtgtagataacgttcttcac

SEQ ID NO: 64898 - DNA, 25 bp, Saccharomyces pastorianus
ccgctccttccacatatgaacatat

SEQ ID NO: 64899 - DNA, 25 bp, Saccharomyces pastorianus
accttcagcaatgttgttgtcccag

SEQ ID NO: 64900 - DNA, 25 bp, Saccharomyces pastorianus
gaaaaaggccttgaccttcagcaat

SEQ ID NO: 64901 - DNA, 25 bp, Saccharomyces pastorianus
aggccttgaccttcagcaatgttgt

SEQ ID NO: 64902 - DNA, 25 bp, Saccharomyces pastorianus
gagacctaaattcacgtctcgtgta

SEQ ID NO: 64903 - DNA, 25 bp, Saccharomyces pastorianus
gcaatgttgttgtcccagataagaa

SEQ ID NO: 64904 - DNA, 25 bp, Saccharomyces pastorianus
gaaagtctggaaatcgtccgctcct

SEQ ID NO: 64905 - DNA, 25 bp, Saccharomyces pastorianus
gataccttggaaccggtgaaggact

SEQ ID NO: 64906 - DNA, 25 bp, Saccharomyces pastorianus
acggtgacgcttttgaaagtgccga

SEQ ID NO: 64907 - DNA, 25 bp, Saccharomyces pastorianus
ttgcaggataccttggaaccggtga

SEQ ID NO: 64908 - DNA, 25 bp, Saccharomyces pastorianus
gcaggataccttggaaccggtgaag

SEQ ID NO: 64909 - DNA, 25 bp, Saccharomyces pastorianus
aggactacggtgacgcttttgaaag

SEQ ID NO: 64910 - DNA, 25 bp, Saccharomyces pastorianus
ggtgacgcttttgaaagtgccgaga

SEQ ID NO: 64911 - DNA, 25 bp, Saccharomyces pastorianus
tgacgcttttgaaagtgccgagaag

SEQ ID NO: 64912 - DNA, 25 bp, Saccharomyces pastorianus
gccattgcaggataccttggaaccg

SEQ ID NO: 64913 - DNA, 25 bp, Saccharomyces pastorianus
gtgccattgcaggataccttggaac

SEQ ID NO: 64914 - DNA, 25 bp, Saccharomyces pastorianus
cattgcaggataccttggaaccggt

SEQ ID NO: 64915 - DNA, 25 bp, Saccharomyces pastorianus
actacggtgacgcttttgaaagtgc

SEQ ID NO: 64916 - DNA, 25 bp, Saccharomyces pastorianus
gagctactttcagaaacaacttgcc

SEQ ID NO: 64917 - DNA, 25 bp, Saccharomyces pastorianus
tactttcagaaacaacttgccagcc

SEQ ID NO: 64918 - DNA, 25 bp, Saccharomyces pastorianus
cggtaactctggtgttgtcagagct

SEQ ID NO: 64919 - DNA, 25 bp, Saccharomyces pastorianus
cagagctactttcagaaacaacttg

SEQ ID NO: 64920 - DNA, 25 bp, Saccharomyces pastorianus
tcagagctactttcagaaacaactt

SEQ ID NO: 64921 - DNA, 25 bp, Saccharomyces pastorianus
cttgccagccaagactttcggtgct

SEQ ID NO: 64922 - DNA, 25 bp, Saccharomyces pastorianus
tgtcagagctactttcagaaacaac

SEQ ID NO: 64923 - DNA, 25 bp, Saccharomyces pastorianus
gctactttcagaaacaacttgccag

SEQ ID NO: 64924 - DNA, 25 bp, Saccharomyces pastorianus
agccaagactttcggtgcttctgtc

SEQ ID NO: 64925 - DNA, 25 bp, Saccharomyces pastorianus
tggggtaaggtcaccagaacccacg

SEQ ID NO: 64926 - DNA, 25 bp, Saccharomyces pastorianus
gtcagagctactttcagaaacaact

SEQ ID NO: 64927 - DNA, 25 bp, Saccharomyces pastorianus
gagcctcattccgttgatattgcag

SEQ ID NO: 64928 - DNA, 25 bp, Saccharomyces pastorianus
aattcaactccaagtacggccatgc

SEQ ID NO: 64929 - DNA, 25 bp, Saccharomyces pastorianus
ttgtctttagtgctttggctccaaa

SEQ ID NO: 64930 - DNA, 25 bp, Saccharomyces pastorianus
gaattcccgattttatatgcatcta

SEQ ID NO: 64931 - DNA, 25 bp, Saccharomyces pastorianus
ggatttggccaaccctgatggtaac

SEQ ID NO: 64932 - DNA, 25 bp, Saccharomyces pastorianus
gggaccaagctatggacaacctcca

SEQ ID NO: 64933 - DNA, 25 bp, Saccharomyces pastorianus
gaagggtgctgatcctgtcacaatc

SEQ ID NO: 64934 - DNA, 25 bp, Saccharomyces pastorianus
caagagtctactttttctccgaaga

SEQ ID NO: 64935 - DNA, 25 bp, Saccharomyces pastorianus
tttggctccaaaccagtgggaccaa

SEQ ID NO: 64936 - DNA, 25 bp, Saccharomyces pastorianus
tggtaacttacctgacggcgtcgag

SEQ ID NO: 64937 - DNA, 25 bp, Saccharomyces pastorianus
tcatagctgctgattttgctccaag

SEQ ID NO: 64938 - DNA, 25 bp, Saccharomyces pastorianus
aatgcacccagagataacgccgaca

SEQ ID NO: 64939 - DNA, 25 bp, Saccharomyces pastorianus
gaggctcccaaaggccaaggtgtta

SEQ ID NO: 64940 - DNA, 25 bp, Saccharomyces pastorianus
gtgagcagcacgaagatgtaccaat

SEQ ID NO: 64941 - DNA, 25 bp, Saccharomyces pastorianus
atccgtatccgcaccagttaagaag

SEQ ID NO: 64942 - DNA, 25 bp, Saccharomyces pastorianus
tctgatgccaatgctagcgccaatg

SEQ ID NO: 64943 - DNA, 25 bp, Saccharomyces pastorianus
aacgccggtgaaggaactgatgctc

SEQ ID NO: 64944 - DNA, 25 bp, Saccharomyces pastorianus
agaagaatgacaccacctctgatgc

SEQ ID NO: 64945 - DNA, 25 bp, Saccharomyces pastorianus
gaaggagctgccaacgaatccgtat

SEQ ID NO: 64946 - DNA, 25 bp, Saccharomyces pastorianus
gatgccgatatcgaccaagttgata

SEQ ID NO: 64947 - DNA, 25 bp, Saccharomyces pastorianus
gaagaacctgaaactatccacgaaa

SEQ ID NO: 64948 - DNA, 25 bp, Saccharomyces pastorianus
ctgactccgcagttcaagaagtgaa

SEQ ID NO: 64949 - DNA, 25 bp, Saccharomyces pastorianus
tcaggttcatacagtgccgatcttg

SEQ ID NO: 64950 - DNA, 25 bp, Saccharomyces pastorianus
ggtggcagcttctacatggttcaga

SEQ ID NO: 64951 - DNA, 25 bp, Saccharomyces pastorianus
gtttctccggatgtcaattttgatg

SEQ ID NO: 64952 - DNA, 25 bp, Saccharomyces pastorianus
tttgttgtaacccagatgcaccact

SEQ ID NO: 64953 - DNA, 25 bp, Saccharomyces pastorianus
gtgccgatcttgtttccatgaacac

SEQ ID NO: 64954 - DNA, 25 bp, Saccharomyces pastorianus
ttggcttccgaagtcttaagtgcat

SEQ ID NO: 64955 - DNA, 25 bp, Saccharomyces pastorianus
aaatcatacgattgccctgttgaga

SEQ ID NO: 64956 - DNA, 25 bp, Saccharomyces pastorianus
tgatattcaccacaaacgtcacctg

SEQ ID NO: 64957 - DNA, 25 bp, Saccharomyces pastorianus
atttgtaaccggttcgttgcatctc

SEQ ID NO: 64958 - DNA, 25 bp, Saccharomyces pastorianus
aatttacacgcatctgtttctccgg

SEQ ID NO: 64959 - DNA, 25 bp, Saccharomyces pastorianus
atgctcgtgtacatgtgactccgaa

SEQ ID NO: 64960 - DNA, 25 bp, Saccharomyces pastorianus
gggcgccaacatcagatcattggac

SEQ ID NO: 64961 - DNA, 25 bp, Saccharomyces pastorianus
atcattggaccaaacctcgacttct

SEQ ID NO: 64962 - DNA, 25 bp, Saccharomyces pastorianus
gtcttggctccatcgtcatctgcag

SEQ ID NO: 64963 - DNA, 25 bp, Saccharomyces pastorianus
atctgcagcagccagtatcggcgac

SEQ ID NO: 64964 - DNA, 25 bp, Saccharomyces pastorianus
acaagggcgccaacatcagatcatt

SEQ ID NO: 64965 - DNA, 25 bp, Saccharomyces pastorianus
cagtatcggcgacgacggctcgaac

SEQ ID NO: 64966 - DNA, 25 bp, Saccharomyces pastorianus
acctcgacttcttccaatggttgcg

SEQ ID NO: 64967 - DNA, 25 bp, Saccharomyces pastorianus
aaacctcgacttcttccaatggttg

SEQ ID NO: 64968 - DNA, 25 bp, Saccharomyces pastorianus
aagttcgtcaccgtcaccaaggagc

SEQ ID NO: 64969 - DNA, 25 bp, Saccharomyces pastorianus
atcgtcatctgcagcagccagtatc

SEQ ID NO: 64970 - DNA, 25 bp, Saccharomyces pastorianus
gacggctcgaacaacaagggcgcca

SEQ ID NO: 64971 - DNA, 25 bp, Saccharomyces pastorianus
aaggaccagccaatattcgaccacg

SEQ ID NO: 64972 - DNA, 25 bp, Saccharomyces pastorianus
gatcaaacagaccaccaagcaccag

SEQ ID NO: 64973 - DNA, 25 bp, Saccharomyces pastorianus
gaattccgtggagggtttctctgtc

SEQ ID NO: 64974 - DNA, 25 bp, Saccharomyces pastorianus
accagacaggtgcagctacaacaga

SEQ ID NO: 64975 - DNA, 25 bp, Saccharomyces pastorianus
ggtacattcggtctcttaaatactt

SEQ ID NO: 64976 - DNA, 25 bp, Saccharomyces pastorianus
cgcccacaccagagaattcattcaa

SEQ ID NO: 64977 - DNA, 25 bp, Saccharomyces pastorianus
ctgactcgggtcaagttcatccaag

SEQ ID NO: 64978 - DNA, 25 bp, Saccharomyces pastorianus
gaaaatccacgaactgactcgggtc

SEQ ID NO: 64979 - DNA, 25 bp, Saccharomyces pastorianus
gatcgccattaagaagaagctgcac

SEQ ID NO: 64980 - DNA, 25 bp, Saccharomyces pastorianus
gacgtggtaaactccaatacattca

SEQ ID NO: 64981 - DNA, 25 bp, Saccharomyces pastorianus
ctgtcccgatttgagtgatgcgaaa

SEQ ID NO: 64982 - DNA, 25 bp, Saccharomyces pastorianus
cttcggaagatacctttgagcactt

SEQ ID NO: 64983 - DNA, 25 bp, Saccharomyces pastorianus
aacgtgctacatcagtcagctgcat

SEQ ID NO: 64984 - DNA, 25 bp, Saccharomyces pastorianus
ggttgacgacccattattacacttt

SEQ ID NO: 64985 - DNA, 25 bp, Saccharomyces pastorianus
aaacatagtctggtcacacggtgat

SEQ ID NO: 64986 - DNA, 25 bp, Saccharomyces pastorianus
agagccttctttactttcaattcac

SEQ ID NO: 64987 - DNA, 25 bp, Saccharomyces pastorianus
tagaaggacgtgctctcctgcaggt

SEQ ID NO: 64988 - DNA, 25 bp, Saccharomyces pastorianus
tatcccgggaaactagactacaact

SEQ ID NO: 64989 - DNA, 25 bp, Saccharomyces pastorianus
ggttgacctcatcggtaacgtgcta

SEQ ID NO: 64990 - DNA, 25 bp, Saccharomyces pastorianus
aagctggagcaagcatatcccggga

SEQ ID NO: 64991 - DNA, 25 bp, Saccharomyces pastorianus
aagccagctctggtagcaacgaggg

SEQ ID NO: 64992 - DNA, 25 bp, Saccharomyces pastorianus
tatttgggccaacactaatgcagga

SEQ ID NO: 64993 - DNA, 25 bp, Saccharomyces pastorianus
cggacgctgatcacgaaaacactat

SEQ ID NO: 64994 - DNA, 25 bp, Saccharomyces pastorianus
acagcatcttcttcgcatactttgt

SEQ ID NO: 64995 - DNA, 25 bp, Saccharomyces pastorianus
ggaaaccccttcatacttcgaagat

SEQ ID NO: 64996 - DNA, 25 bp, Saccharomyces pastorianus
gaaaacactatacccacagcatctt

SEQ ID NO: 64997 - DNA, 25 bp, Saccharomyces pastorianus
gatcgcacttgcaaagagtttccat

SEQ ID NO: 64998 - DNA, 25 bp, Saccharomyces pastorianus
aaccggtggcgaatacggacgctga

SEQ ID NO: 64999 - DNA, 25 bp, Saccharomyces pastorianus
gagcgaatcctggaacccttagtag

SEQ ID NO: 65000 - DNA, 25 bp, Saccharomyces pastorianus
agaggatcctcgtaacgaccttcat

SEQ ID NO: 65001 - DNA, 25 bp, Saccharomyces pastorianus
tgatgatttccaggccaactctaat

SEQ ID NO: 65002 - DNA, 25 bp, Saccharomyces pastorianus
ggagcaattatcaaccggtggcgaa

SEQ ID NO: 65003 - DNA, 25 bp, Saccharomyces pastorianus
gagtttccatcggatttcaagagcg

SEQ ID NO: 65004 - DNA, 25 bp, Saccharomyces pastorianus
ggtacccaggctactattggttcca

SEQ ID NO: 65005 - DNA, 25 bp, Saccharomyces pastorianus
aatatacaaatccaatccgcagcca

SEQ ID NO: 65006 - DNA, 25 bp, Saccharomyces pastorianus
gctgatgccatcgtagaccctaaat

SEQ ID NO: 65007 - DNA, 25 bp, Saccharomyces pastorianus
aatccgcagccattggtgctgatgc

SEQ ID NO: 65008 - DNA, 25 bp, Saccharomyces pastorianus
tattggttccagatgccgtattgct

SEQ ID NO: 65009 - DNA, 25 bp, Saccharomyces pastorianus
ttgttcccaggtgtccaattaggtg

SEQ ID NO: 65010 - DNA, 25 bp, Saccharomyces pastorianus
ggccaagatcggctctaagtgtaaa

SEQ ID NO: 65011 - DNA, 25 bp, Saccharomyces pastorianus
gggtatcttcattttaccagacgaa

SEQ ID NO: 65012 - DNA, 25 bp, Saccharomyces pastorianus
aactgtattgttggacccatggcca

SEQ ID NO: 65013 - DNA, 25 bp, Saccharomyces pastorianus
caaaatgtcggttgtcggtacccag

SEQ ID NO: 65014 - DNA, 25 bp, Saccharomyces pastorianus
aaatgtcagatttcggcccacagta

SEQ ID NO: 65015 - DNA, 25 bp, Saccharomyces pastorianus
gttactacctagaatccacggcgac

SEQ ID NO: 65016 - DNA, 25 bp, Saccharomyces pastorianus
aaggcattgtcgagttccaaccaca

SEQ ID NO: 65017 - DNA, 25 bp, Saccharomyces pastorianus
gacttcgtactcttgccttgtgatt

SEQ ID NO: 65018 - DNA, 25 bp, Saccharomyces pastorianus
gaactccttggatagtaacatcgat

SEQ ID NO: 65019 - DNA, 25 bp, Saccharomyces pastorianus
ctcagagggacgttaccaagactaa

SEQ ID NO: 65020 - DNA, 25 bp, Saccharomyces pastorianus
tattagacatctactctcagaggga

SEQ ID NO: 65021 - DNA, 25 bp, Saccharomyces pastorianus
attggcaacagacctatgatcgaat

SEQ ID NO: 65022 - DNA, 25 bp, Saccharomyces pastorianus
gatcaatttcattccttccaagacc

SEQ ID NO: 65023 - DNA, 25 bp, Saccharomyces pastorianus
gatctcatttactgtggaactaccc

SEQ ID NO: 65024 - DNA, 25 bp, Saccharomyces pastorianus
ttccaagaccaattccacaggcgag

SEQ ID NO: 65025 - DNA, 25 bp, Saccharomyces pastorianus
gaaagtgggctagccgcgtttttgt

SEQ ID NO: 65026 - DNA, 25 bp, Saccharomyces pastorianus
atttaccctgtaccattgaagctga

SEQ ID NO: 65027 - DNA, 25 bp, Saccharomyces pastorianus
ttggaacacccgatgaagacgaaat

SEQ ID NO: 65028 - DNA, 25 bp, Saccharomyces pastorianus
taccaaaccttggaacacccgatga

SEQ ID NO: 65029 - DNA, 25 bp, Saccharomyces pastorianus
ggttgactaaccagctaaaatcctt

SEQ ID NO: 65030 - DNA, 25 bp, Saccharomyces pastorianus
gatgcatacgttgccattgaacaag

SEQ ID NO: 65031 - DNA, 25 bp, Saccharomyces pastorianus
aaagatgatggtacttccacagaaa

SEQ ID NO: 65032 - DNA, 25 bp, Saccharomyces pastorianus
ttggccttccaacagatgcatacgt

SEQ ID NO: 65033 - DNA, 25 bp, Saccharomyces pastorianus
caattatcgcatttgatgatctaat

SEQ ID NO: 65034 - DNA, 25 bp, Saccharomyces pastorianus
atcaagcagcgggtggattgtccat

SEQ ID NO: 65035 - DNA, 25 bp, Saccharomyces pastorianus
acaacaaggtgttggccttccaaca

SEQ ID NO: 65036 - DNA, 25 bp, Saccharomyces pastorianus
gtggattgtccatcaggttgactaa

SEQ ID NO: 65037 - DNA, 25 bp, Saccharomyces pastorianus
gggagtcgataatatttcactcttg

SEQ ID NO: 65038 - DNA, 25 bp, Saccharomyces pastorianus
aatggttaatgatacttcagggcaa

SEQ ID NO: 65039 - DNA, 25 bp, Saccharomyces pastorianus
atatttcttgattgatgactggtta

SEQ ID NO: 65040 - DNA, 25 bp, Saccharomyces pastorianus
gtactcgaaaggaagctttatcgta

SEQ ID NO: 65041 - DNA, 25 bp, Saccharomyces pastorianus
gaggtacgatgacactatttcattt

SEQ ID NO: 65042 - DNA, 25 bp, Saccharomyces pastorianus
tctttattggtcattgaggtacgat

SEQ ID NO: 65043 - DNA, 25 bp, Saccharomyces pastorianus
gactggttattgttgcaaggtatac

SEQ ID NO: 65044 - DNA, 25 bp, Saccharomyces pastorianus
gaaggtggaacagccaaagttgttt

SEQ ID NO: 65045 - DNA, 25 bp, Saccharomyces pastorianus
aacggagaacatacattcagcgaaa

SEQ ID NO: 65046 - DNA, 25 bp, Saccharomyces pastorianus
gaattggtcaattgtgtactcgaaa

SEQ ID NO: 65047 - DNA, 25 bp, Saccharomyces pastorianus
gacactatttcatttaacggagaac

SEQ ID NO: 65048 - DNA, 25 bp, Saccharomyces pastorianus
actcccggtgggtacaagaagctct

SEQ ID NO: 65049 - DNA, 25 bp, Saccharomyces pastorianus
gaaccaccgtatgctattccaattg

SEQ ID NO: 65050 - DNA, 25 bp, Saccharomyces pastorianus
taatgacaaccgtggtctgggtcct

SEQ ID NO: 65051 - DNA, 25 bp, Saccharomyces pastorianus
tctttggccaaactggtccgtgaaa

SEQ ID NO: 65052 - DNA, 25 bp, Saccharomyces pastorianus
aggttgcttcaataccgttttcaat

SEQ ID NO: 65053 - DNA, 25 bp, Saccharomyces pastorianus
cggtctttttcagtttggtattcat

SEQ ID NO: 65054 - DNA, 25 bp, Saccharomyces pastorianus
cagtttcctaaaatgctttccgcag

SEQ ID NO: 65055 - DNA, 25 bp, Saccharomyces pastorianus
atcagggattcaggacacttttaaa

SEQ ID NO: 65056 - DNA, 25 bp, Saccharomyces pastorianus
tctttccacgtgtttgcccatataa

SEQ ID NO: 65057 - DNA, 25 bp, Saccharomyces pastorianus
catataactgtttaactcccggtgg

SEQ ID NO: 65058 - DNA, 25 bp, Saccharomyces pastorianus
agtgaatatcaagctgtcctcctca

SEQ ID NO: 65059 - DNA, 25 bp, Saccharomyces pastorianus
aaagggccatctttcatgggttaga

SEQ ID NO: 65060 - DNA, 25 bp, Saccharomyces pastorianus
acactgggcaatgtttacatacttg

SEQ ID NO: 65061 - DNA, 25 bp, Saccharomyces pastorianus
tttcatccgtggtcagtatctgttt

SEQ ID NO: 65062 - DNA, 25 bp, Saccharomyces pastorianus
ggtcagtatctgttttcttgtggtg

SEQ ID NO: 65063 - DNA, 25 bp, Saccharomyces pastorianus
ggaacgatttgcattcagggtttat

SEQ ID NO: 65064 - DNA, 25 bp, Saccharomyces pastorianus
ttacatacttggaacgatttgcatt

SEQ ID NO: 65065 - DNA, 25 bp, Saccharomyces pastorianus
ggttagagacattttcatccgtggt

SEQ ID NO: 65066 - DNA, 25 bp, Saccharomyces pastorianus
gccttttaacgctaaagggccatct

SEQ ID NO: 65067 - DNA, 25 bp, Saccharomyces pastorianus
cagggtttattaattgtctggatat

SEQ ID NO: 65068 - DNA, 25 bp, Saccharomyces pastorianus
aatcccacagattcgaattttaaat

SEQ ID NO: 65069 - DNA, 25 bp, Saccharomyces pastorianus
gttgggatttaaacactgggcaatg

SEQ ID NO: 65070 - DNA, 25 bp, Saccharomyces pastorianus
gaagccgaaggtgacgttgatgact

SEQ ID NO: 65071 - DNA, 25 bp, Saccharomyces pastorianus
tcattcaaacacgagggcacacaac

SEQ ID NO: 65072 - DNA, 25 bp, Saccharomyces pastorianus
tattctcagctgttaaggataccga

SEQ ID NO: 65073 - DNA, 25 bp, Saccharomyces pastorianus
gaacttgacaagaatggcaacttta

SEQ ID NO: 65074 - DNA, 25 bp, Saccharomyces pastorianus
aaacgagcccatctccaatagtcta

SEQ ID NO: 65075 - DNA, 25 bp, Saccharomyces pastorianus
gactttgatactgccaatggtgaaa

SEQ ID NO: 65076 - DNA, 25 bp, Saccharomyces pastorianus
gcattacacagaactcatacacaga

SEQ ID NO: 65077 - DNA, 25 bp, Saccharomyces pastorianus
ccaatagtctattctcagctgttaa

SEQ ID NO: 65078 - DNA, 25 bp, Saccharomyces pastorianus
ggataccgaagatggctattcatat

SEQ ID NO: 65079 - DNA, 25 bp, Saccharomyces pastorianus
acagacaaaccaatcctcattcaaa

SEQ ID NO: 65080 - DNA, 25 bp, Saccharomyces pastorianus
acgagggcacacaacgccaacaaaa

SEQ ID NO: 65081 - DNA, 25 bp, Saccharomyces pastorianus
ggtaccatgttagccagaccttggc

SEQ ID NO: 65082 - DNA, 25 bp, Saccharomyces pastorianus
taagatttctatccggtgtctttgc

SEQ ID NO: 65083 - DNA, 25 bp, Saccharomyces pastorianus
cggttattggcgctccattgagtga

SEQ ID NO: 65084 - DNA, 25 bp, Saccharomyces pastorianus
tttctaccttttgggtctagcgacg

SEQ ID NO: 65085 - DNA, 25 bp, Saccharomyces pastorianus
taaacccgtctatttgttctccttg

SEQ ID NO: 65086 - DNA, 25 bp, Saccharomyces pastorianus
gcatcgatgctcttcactatgggtg

SEQ ID NO: 65087 - DNA, 25 bp, Saccharomyces pastorianus
aatggtatgctacgatgtcttccgc

SEQ ID NO: 65088 - DNA, 25 bp, Saccharomyces pastorianus
tgatgatccggataacccacacaac

SEQ ID NO: 65089 - DNA, 25 bp, Saccharomyces pastorianus
atgtcgatcaggtctctgtagccat

SEQ ID NO: 65090 - DNA, 25 bp, Saccharomyces pastorianus
acacaactggccctcttggaagaaa

SEQ ID NO: 65091 - DNA, 25 bp, Saccharomyces pastorianus
gatgggtagttctctttacgtctcc

SEQ ID NO: 65092 - DNA, 25 bp, Saccharomyces pastorianus
aataagcccattcaagttccctctt

SEQ ID NO: 65093 - DNA, 25 bp, Saccharomyces pastorianus
gtgcccatttcattccaaactcaaa

SEQ ID NO: 65094 - DNA, 25 bp, Saccharomyces pastorianus
ttgggtttagtcaaggtgccggcct

SEQ ID NO: 65095 - DNA, 25 bp, Saccharomyces pastorianus
gaacagcaacctgccttgaaatttt

SEQ ID NO: 65096 - DNA, 25 bp, Saccharomyces pastorianus
ggccaaggagttcagcacgtcagca

SEQ ID NO: 65097 - DNA, 25 bp, Saccharomyces pastorianus
tattaattcatcctggtgcccattt

SEQ ID NO: 65098 - DNA, 25 bp, Saccharomyces pastorianus
caaaaccttttgtgtcccaagtctg

SEQ ID NO: 65099 - DNA, 25 bp, Saccharomyces pastorianus
ggtacttagctacttgcatgactac

SEQ ID NO: 65100 - DNA, 25 bp, Saccharomyces pastorianus
gaacatggtccattcgacggtataa

SEQ ID NO: 65101 - DNA, 25 bp, Saccharomyces pastorianus
agagtctagagtgctggcgctatac

SEQ ID NO: 65102 - DNA, 25 bp, Saccharomyces pastorianus
gcgctatacgatgcatggcccaaaa

SEQ ID NO: 65103 - DNA, 25 bp, Saccharomyces pastorianus
cgagcgtaacattcttaaggactat

SEQ ID NO: 65104 - DNA, 25 bp, Saccharomyces pastorianus
agacctcgagcgtaacattcttaag

SEQ ID NO: 65105 - DNA, 25 bp, Saccharomyces pastorianus
tgatcacatgaagactaaacaacgt

SEQ ID NO: 65106 - DNA, 25 bp, Saccharomyces pastorianus
gtatcatttgaaggagtccgagaaa

SEQ ID NO: 65107 - DNA, 25 bp, Saccharomyces pastorianus
gacattaggtttgaccggtccacag

SEQ ID NO: 65108 - DNA, 25 bp, Saccharomyces pastorianus
gtaaagccactgatacctctgttat

SEQ ID NO: 65109 - DNA, 25 bp, Saccharomyces pastorianus
gcgttaccaatttttagacgaatat

SEQ ID NO: 65110 - DNA, 25 bp, Saccharomyces pastorianus
gaaatctagactacaatcgatgaaa

SEQ ID NO: 65111 - DNA, 25 bp, Saccharomyces pastorianus
agccactgatacctctgttataaga

SEQ ID NO: 65112 - DNA, 25 bp, Saccharomyces pastorianus
gatcaaatctttaccaggacattag

SEQ ID NO: 65113 - DNA, 25 bp, Saccharomyces pastorianus
tgaccggtccacaggtaaagccact

SEQ ID NO: 65114 - DNA, 25 bp, Saccharomyces pastorianus
atcaagcgacgatgagttaaaaacg

SEQ ID NO: 65115 - DNA, 25 bp, Saccharomyces pastorianus
aaaagctgagacgttgatggacgaa

SEQ ID NO: 65116 - DNA, 25 bp, Saccharomyces pastorianus
ggccgaggaacaagaatcaagcgac

SEQ ID NO: 65117 - DNA, 25 bp, Saccharomyces pastorianus
gaaataaccaagtggccgaggaaca

SEQ ID NO: 65118 - DNA, 25 bp, Saccharomyces pastorianus
aggattcgaaggataaaaagccaat

SEQ ID NO: 65119 - DNA, 25 bp, Saccharomyces pastorianus
agccggatttgaattctgatggaga

SEQ ID NO: 65120 - DNA, 25 bp, Saccharomyces pastorianus
gagtcattggaggaaatactggcca

SEQ ID NO: 65121 - DNA, 25 bp, Saccharomyces pastorianus
ggaggaaatactggccaaaagaaat

SEQ ID NO: 65122 - DNA, 25 bp, Saccharomyces pastorianus
aagccaatccacagaaaacggactg

SEQ ID NO: 65123 - DNA, 25 bp, Saccharomyces pastorianus
taaaaacgttgtctttcagctcttt

SEQ ID NO: 65124 - DNA, 25 bp, Saccharomyces pastorianus
atttgaagccggatttgaattctga

SEQ ID NO: 65125 - DNA, 25 bp, Saccharomyces pastorianus
gggagctcaacccaagagaactata

SEQ ID NO: 65126 - DNA, 25 bp, Saccharomyces pastorianus
ctcagaggttgcattggtacatttg

SEQ ID NO: 65127 - DNA, 25 bp, Saccharomyces pastorianus
aagaggacacgtttgttaacttgat

SEQ ID NO: 65128 - DNA, 25 bp, Saccharomyces pastorianus
tgaactgtatttcaagcacccgaaa

SEQ ID NO: 65129 - DNA, 25 bp, Saccharomyces pastorianus
tgggccatttcaaaaccattttcca

SEQ ID NO: 65130 - DNA, 25 bp, Saccharomyces pastorianus
gatattctttaattgctgctctaga

SEQ ID NO: 65131 - DNA, 25 bp, Saccharomyces pastorianus
aacatgcagtgcgacttttctacct

SEQ ID NO: 65132 - DNA, 25 bp, Saccharomyces pastorianus
gtagttgcaatattctgggccattt

SEQ ID NO: 65133 - DNA, 25 bp, Saccharomyces pastorianus
ttttctacctgacgtcatgcctgaa

SEQ ID NO: 65134 - DNA, 25 bp, Saccharomyces pastorianus
gtcatgcctgaacagcactggagta

SEQ ID NO: 65135 - DNA, 25 bp, Saccharomyces pastorianus
cgaaaatgccaatagcgtccggtat

SEQ ID NO: 65136 - DNA, 25 bp, Saccharomyces pastorianus
tagagccattccaaaccaacaggtt

SEQ ID NO: 65137 - DNA, 25 bp, Saccharomyces pastorianus
cttggccaccaagatcaacgaaaag

SEQ ID NO: 65138 - DNA, 25 bp, Saccharomyces pastorianus
tatcaagttgagaggtaacgacatt

SEQ ID NO: 65139 - DNA, 25 bp, Saccharomyces pastorianus
gtccaagctggaaagagccctgggt

SEQ ID NO: 65140 - DNA, 25 bp, Saccharomyces pastorianus
aagagccctgggtatcaagttgaga

SEQ ID NO: 65141 - DNA, 25 bp, Saccharomyces pastorianus
aaaccaacaggttttgtccaagctg

SEQ ID NO: 65142 - DNA, 25 bp, Saccharomyces pastorianus
gtggttaatgattacgaagccgcta

SEQ ID NO: 65143 - DNA, 25 bp, Saccharomyces pastorianus
gatcaacgaaaagccaaccgtggtt

SEQ ID NO: 65144 - DNA, 25 bp, Saccharomyces pastorianus
gccaaccgtggttaatgattacgaa

SEQ ID NO: 65145 - DNA, 25 bp, Saccharomyces pastorianus
atgtctcagaaggacttggccacca

SEQ ID NO: 65146 - DNA, 25 bp, Saccharomyces pastorianus
ttacgaagccgctagagccattcca

SEQ ID NO: 65147 - DNA, 25 bp, Saccharomyces pastorianus
gcattgggttctggatcggatacgt

SEQ ID NO: 65148 - DNA, 25 bp, Saccharomyces pastorianus
gatacgtgctgatcttcctggcata

SEQ ID NO: 65149 - DNA, 25 bp, Saccharomyces pastorianus
acgagatttccgactggcggttcca

SEQ ID NO: 65150 - DNA, 25 bp, Saccharomyces pastorianus
atccgcgtggtcactgtggtgccat

SEQ ID NO: 65151 - DNA, 25 bp, Saccharomyces pastorianus
aagcgcggattgtggtgtctgctac

SEQ ID NO: 65152 - DNA, 25 bp, Saccharomyces pastorianus
actgcatcgtgtgcggcatgtacca

SEQ ID NO: 65153 - DNA, 25 bp, Saccharomyces pastorianus
ctagagatggactgcttcccgaaat

SEQ ID NO: 65154 - DNA, 25 bp, Saccharomyces pastorianus
tgccatttgcgctgggatgctactg

SEQ ID NO: 65155 - DNA, 25 bp, Saccharomyces pastorianus
atatcgtgtactcctggtttggcgt

SEQ ID NO: 65156 - DNA, 25 bp, Saccharomyces pastorianus
attggcctcggcttactatggttgg

SEQ ID NO: 65157 - DNA, 25 bp, Saccharomyces pastorianus
ctgcacaacatccacgacgagattt

SEQ ID NO: 65158 - DNA, 25 bp, Saccharomyces pastorianus
caagccaccattgcgaacgtcaaag

SEQ ID NO: 65159 - DNA, 25 bp, Saccharomyces pastorianus
gacaccgccattttgttcgacaagt

SEQ ID NO: 65160 - DNA, 25 bp, Saccharomyces pastorianus
catcacttcgcaaaaccacggttat

SEQ ID NO: 65161 - DNA, 25 bp, Saccharomyces pastorianus
agtggatcctgagactctacccaag

SEQ ID NO: 65162 - DNA, 25 bp, Saccharomyces pastorianus
tacccagtttcacccggaagcaaag

SEQ ID NO: 65163 - DNA, 25 bp, Saccharomyces pastorianus
gaagcttatcagtccgattctcaaa

SEQ ID NO: 65164 - DNA, 25 bp, Saccharomyces pastorianus
tttcttgtccaatggcccaggcaat

SEQ ID NO: 65165 - DNA, 25 bp, Saccharomyces pastorianus
aatccaggatgttgcgtccgagttc

SEQ ID NO: 65166 - DNA, 25 bp, Saccharomyces pastorianus
gtatccccatctttggtatttgcct

SEQ ID NO: 65167 - DNA, 25 bp, Saccharomyces pastorianus
tagagctcataatatccctgccatg

SEQ ID NO: 65168 - DNA, 25 bp, Saccharomyces pastorianus
tttgcaaaggcctattttctctacc

SEQ ID NO: 65169 - DNA, 25 bp, Saccharomyces pastorianus
ctggtcggttatccggagtccatga

SEQ ID NO: 65170 - DNA, 25 bp, Saccharomyces pastorianus
actcagcccttaattggcactacgg

SEQ ID NO: 65171 - DNA, 25 bp, Saccharomyces pastorianus
tatccggagtccatgacggatcctt

SEQ ID NO: 65172 - DNA, 25 bp, Saccharomyces pastorianus
ttcgaagccatctccttcggcgcaa

SEQ ID NO: 65173 - DNA, 25 bp, Saccharomyces pastorianus
ggtcagatactagtcttcactcagc

SEQ ID NO: 65174 - DNA, 25 bp, Saccharomyces pastorianus
gaagccgttttcaccacttccctgg

SEQ ID NO: 65175 - DNA, 25 bp, Saccharomyces pastorianus
tagtcttcactcagcccttaattgg

SEQ ID NO: 65176 - DNA, 25 bp, Saccharomyces pastorianus
cttaattggcactacggtgtcccat

SEQ ID NO: 65177 - DNA, 25 bp, Saccharomyces pastorianus
tctccttcggcgcaaacaagtctgt

SEQ ID NO: 65178 - DNA, 25 bp, Saccharomyces pastorianus
cacttccctggtcggttatccggag

SEQ ID NO: 65179 - DNA, 25 bp, Saccharomyces pastorianus
ctgtcgctggtgaagccgttttcac

SEQ ID NO: 65180 - DNA, 25 bp, Saccharomyces pastorianus
aattcaggaagattggtcaactact

SEQ ID NO: 65181 - DNA, 25 bp, Saccharomyces pastorianus
ggaagattggtcaactactatgaaa

SEQ ID NO: 65182 - DNA, 25 bp, Saccharomyces pastorianus
gaagggaagttgacttgatcaattc

SEQ ID NO: 65183 - DNA, 25 bp, Saccharomyces pastorianus
tcaggaagattggtcaactactatg

SEQ ID NO: 65184 - DNA, 25 bp, Saccharomyces pastorianus
gattggtcaactactatgaaaactc

SEQ ID NO: 65185 - DNA, 25 bp, Saccharomyces pastorianus
ttgacttgatcaattcaggaagatt

SEQ ID NO: 65186 - DNA, 25 bp, Saccharomyces pastorianus
cgtcgatcgaaatgtgaaagagagc

SEQ ID NO: 65187 - DNA, 25 bp, Saccharomyces pastorianus
gaagttgacttgatcaattcaggaa

SEQ ID NO: 65188 - DNA, 25 bp, Saccharomyces pastorianus
tcggcgtcgatcgaaatgtgaaaga

SEQ ID NO: 65189 - DNA, 25 bp, Saccharomyces pastorianus
attggtcaactactatgaaaactca

SEQ ID NO: 65190 - DNA, 25 bp, Saccharomyces pastorianus
cggcgaagggaagttgacttgatca

SEQ ID NO: 65191 - DNA, 25 bp, Saccharomyces pastorianus
actggtccaatgtaaagccttcact

SEQ ID NO: 65192 - DNA, 25 bp, Saccharomyces pastorianus
gaacgcactcccaaaatggtttcgt

SEQ ID NO: 65193 - DNA, 25 bp, Saccharomyces pastorianus
gaacattcatctcactggtatccaa

SEQ ID NO: 65194 - DNA, 25 bp, Saccharomyces pastorianus
ttcactaaatcaaagctggccccga

SEQ ID NO: 65195 - DNA, 25 bp, Saccharomyces pastorianus
gctcattcgacggttttccaaggaa

SEQ ID NO: 65196 - DNA, 25 bp, Saccharomyces pastorianus
gaacaaaattctgctgtcgctcatt

SEQ ID NO: 65197 - DNA, 25 bp, Saccharomyces pastorianus
ggagctggccagtagattacattta

SEQ ID NO: 65198 - DNA, 25 bp, Saccharomyces pastorianus
aactgtctgtattatgtgctctcct

SEQ ID NO: 65199 - DNA, 25 bp, Saccharomyces pastorianus
gtgctctcctcatttgcttacaaaa

SEQ ID NO: 65200 - DNA, 25 bp, Saccharomyces pastorianus
tggtatccaatagccagcgcaataa

SEQ ID NO: 65201 - DNA, 25 bp, Saccharomyces pastorianus
gctggccccgaaagaattccgtgaa

SEQ ID NO: 65202 - DNA, 25 bp, Saccharomyces pastorianus
gctgatgctgacacagctaccactg

SEQ ID NO: 65203 - DNA, 25 bp, Saccharomyces pastorianus
ctagtcggtcaagccactggtaaga

SEQ ID NO: 65204 - DNA, 25 bp, Saccharomyces pastorianus
ggtttgctataccatgcttctctag

SEQ ID NO: 65205 - DNA, 25 bp, Saccharomyces pastorianus
gctagagcttacaacgctgatgctg

SEQ ID NO: 65206 - DNA, 25 bp, Saccharomyces pastorianus
ggtagaaaacagactatcccaatta

SEQ ID NO: 65207 - DNA, 25 bp, Saccharomyces pastorianus
ataccatgcttctctagtcggtcaa

SEQ ID NO: 65208 - DNA, 25 bp, Saccharomyces pastorianus
gagaaccactccaaagattgtccgt

SEQ ID NO: 65209 - DNA, 25 bp, Saccharomyces pastorianus
taaatctccagcttctaccattcaa

SEQ ID NO: 65210 - DNA, 25 bp, Saccharomyces pastorianus
tccgactctgactctgatgacgaag

SEQ ID NO: 65211 - DNA, 25 bp, Saccharomyces pastorianus
gattgtccgtgaagccaagaaggta

SEQ ID NO: 65212 - DNA, 25 bp, Saccharomyces pastorianus
tgccaaggctgattccgattccgac

SEQ ID NO: 65213 - DNA, 25 bp, Saccharomyces pastorianus
catcggtcgtcacaagttgaagttt

SEQ ID NO: 65214 - DNA, 25 bp, Saccharomyces pastorianus
atgccgttactttagacatctacag

SEQ ID NO: 65215 - DNA, 25 bp, Saccharomyces pastorianus
gatggtaaagtatcctcccaattag

SEQ ID NO: 65216 - DNA, 25 bp, Saccharomyces pastorianus
tgttttaactgaaacctctgctggt

SEQ ID NO: 65217 - DNA, 25 bp, Saccharomyces pastorianus
ggagttcaagattgctgctttttct

SEQ ID NO: 65218 - DNA, 25 bp, Saccharomyces pastorianus
ggttatgctcttttgaaagcctctg

SEQ ID NO: 65219 - DNA, 25 bp, Saccharomyces pastorianus
gaagaagctaactccattattgatg

SEQ ID NO: 65220 - DNA, 25 bp, Saccharomyces pastorianus
atacttgccagagttattgccaggt

SEQ ID NO: 65221 - DNA, 25 bp, Saccharomyces pastorianus
gctttttctaaattcaactctgcag

SEQ ID NO: 65222 - DNA, 25 bp, Saccharomyces pastorianus
ttcaacgttgtttccgatgccgtta

SEQ ID NO: 65223 - DNA, 25 bp, Saccharomyces pastorianus
gtcaaccttgattgtcagtgaaacc

SEQ ID NO: 65224 - DNA, 25 bp, Saccharomyces pastorianus
gagaatttttgcctcaaacgaagtt

SEQ ID NO: 65225 - DNA, 25 bp, Saccharomyces pastorianus
gtcattggtcgtcgtttaccaactg

SEQ ID NO: 65226 - DNA, 25 bp, Saccharomyces pastorianus
tctattttcccctttaaatcagtgg

SEQ ID NO: 65227 - DNA, 25 bp, Saccharomyces pastorianus
tcgtcgtttaccaactgaatccgtt

SEQ ID NO: 65228 - DNA, 25 bp, Saccharomyces pastorianus
gaatgagaatttttgcctcaaacga

SEQ ID NO: 65229 - DNA, 25 bp, Saccharomyces pastorianus
ggctcatttcaaagaataccaagtc

SEQ ID NO: 65230 - DNA, 25 bp, Saccharomyces pastorianus
aaatcagtggctcatttcaaagaat

SEQ ID NO: 65231 - DNA, 25 bp, Saccharomyces pastorianus
ggtcgtcgtttaccaactgaatccg

SEQ ID NO: 65232 - DNA, 25 bp, Saccharomyces pastorianus
ttcccctttaaatcagtggctcatt

SEQ ID NO: 65233 - DNA, 25 bp, Saccharomyces pastorianus
ataccaagtcattggtcgtcgttta

SEQ ID NO: 65234 - DNA, 25 bp, Saccharomyces pastorianus
ccaagtcattggtcgtcgtttacca

SEQ ID NO: 65235 - DNA, 25 bp, Saccharomyces pastorianus
gatgccatgccaactctgtttataa

SEQ ID NO: 65236 - DNA, 25 bp, Saccharomyces pastorianus
ccaagtgatactttttgctgcgagt

SEQ ID NO: 65237 - DNA, 25 bp, Saccharomyces pastorianus
ggtcaccaggttgttgatgttgcaa

SEQ ID NO: 65238 - DNA, 25 bp, Saccharomyces pastorianus
aagagcaatctctgctgtcggtcac

SEQ ID NO: 65239 - DNA, 25 bp, Saccharomyces pastorianus
cggtgagatatctacccaaaggtca

SEQ ID NO: 65240 - DNA, 25 bp, Saccharomyces pastorianus
gggtttctgttaccgataagagctt

SEQ ID NO: 65241 - DNA, 25 bp, Saccharomyces pastorianus
gagggctagccttggattacaattt

SEQ ID NO: 65242 - DNA, 25 bp, Saccharomyces pastorianus
gtagaacgcgttgttccatctttaa

SEQ ID NO: 65243 - DNA, 25 bp, Saccharomyces pastorianus
taccatttgcttacggatgccatgc

SEQ ID NO: 65244 - DNA, 25 bp, Saccharomyces pastorianus
cggagacaactacgtttaccagcct

SEQ ID NO: 65245 - DNA, 25 bp, Saccharomyces pastorianus
agaggacaccttgatcctgttttac

SEQ ID NO: 65246 - DNA, 25 bp, Saccharomyces pastorianus
gtctggaattgcaaacctcttgtca

SEQ ID NO: 65247 - DNA, 25 bp, Saccharomyces pastorianus
accaaatctctcaacctcatagtga

SEQ ID NO: 65248 - DNA, 25 bp, Saccharomyces pastorianus
aagggcttcctgatgcggcggtaat

SEQ ID NO: 65249 - DNA, 25 bp, Saccharomyces pastorianus
gatgattcattcttcatttcctatg

SEQ ID NO: 65250 - DNA, 25 bp, Saccharomyces pastorianus
ctcaccggttgctgaagcccaaaaa

SEQ ID NO: 65251 - DNA, 25 bp, Saccharomyces pastorianus
gcaaatatgagccttctcaccggtt

SEQ ID NO: 65252 - DNA, 25 bp, Saccharomyces pastorianus
gcgttgacccttttgtctggaattg

SEQ ID NO: 65253 - DNA, 25 bp, Saccharomyces pastorianus
ggcagtcctacttttaaaccaagca

SEQ ID NO: 65254 - DNA, 25 bp, Saccharomyces pastorianus
gtgagttcatcacgaggctcattaa

SEQ ID NO: 65255 - DNA, 25 bp, Saccharomyces pastorianus
agacagtctccaattggcagtccta

SEQ ID NO: 65256 - DNA, 25 bp, Saccharomyces pastorianus
acaccccattactattaccaataca

SEQ ID NO: 65257 - DNA, 25 bp, Saccharomyces pastorianus
gttggttaaagctgcctattccgat

SEQ ID NO: 65258 - DNA, 25 bp, Saccharomyces pastorianus
tatgtcacctctgcccagaaattga

SEQ ID NO: 65259 - DNA, 25 bp, Saccharomyces pastorianus
aggagacttctcaagctctaacttc

SEQ ID NO: 65260 - DNA, 25 bp, Saccharomyces pastorianus
agatccaacgagtacgtcgccaaca

SEQ ID NO: 65261 - DNA, 25 bp, Saccharomyces pastorianus
gtcgccaacatttgtgtttacgccg

SEQ ID NO: 65262 - DNA, 25 bp, Saccharomyces pastorianus
ctctaacttccgatggttggttcaa

SEQ ID NO: 65263 - DNA, 25 bp, Saccharomyces pastorianus
tgtcacgcccgaatactataaaaac

SEQ ID NO: 65264 - DNA, 25 bp, Saccharomyces pastorianus
attattgtcccaaacaatgctccgc

SEQ ID NO: 65265 - DNA, 25 bp, Saccharomyces pastorianus
aatgctccgctgacaaaattggcca

SEQ ID NO: 65266 - DNA, 25 bp, Saccharomyces pastorianus
gtcggtattgaattgctagcgggta

SEQ ID NO: 65267 - DNA, 25 bp, Saccharomyces pastorianus
tattccgatcttttgaagaccggca

SEQ ID NO: 65268 - DNA, 25 bp, Saccharomyces pastorianus
gaaatcgacattcatccacctagtg

SEQ ID NO: 65269 - DNA, 25 bp, Saccharomyces pastorianus
taccaaggaccgtgttatttgcttt

SEQ ID NO: 65270 - DNA, 25 bp, Saccharomyces pastorianus
gtgcaagtttgaacgtcaccggctt

SEQ ID NO: 65271 - DNA, 25 bp, Saccharomyces pastorianus
agtgcggatgacctttcttgtatca

SEQ ID NO: 65272 - DNA, 25 bp, Saccharomyces pastorianus
aaagcattcgaacgtcgttgcaggt

SEQ ID NO: 65273 - DNA, 25 bp, Saccharomyces pastorianus
gtcaccggcttcatagataccaagg

SEQ ID NO: 65274 - DNA, 25 bp, Saccharomyces pastorianus
ggtgtttgagctattatccttttat

SEQ ID NO: 65275 - DNA, 25 bp, Saccharomyces pastorianus
gtacacctcaggttctacgggtgaa

SEQ ID NO: 65276 - DNA, 25 bp, Saccharomyces pastorianus
aaacccactatcatggtcggtgtcg

SEQ ID NO: 65277 - DNA, 25 bp, Saccharomyces pastorianus
aagaactctgtgaagcattgccaag

SEQ ID NO: 65278 - DNA, 25 bp, Saccharomyces pastorianus
ggactacctataatgccaagctaaa

SEQ ID NO: 65279 - DNA, 25 bp, Saccharomyces pastorianus
gattacgcttacttggcatggctac

SEQ ID NO: 65280 - DNA, 25 bp, Saccharomyces pastorianus
atgtcaagagtcgtttacgcccacc

SEQ ID NO: 65281 - DNA, 25 bp, Saccharomyces pastorianus
tttgcgctaatgatcctaacgtact

SEQ ID NO: 65282 - DNA, 25 bp, Saccharomyces pastorianus
gctatgacttcatctgcttggcaat

SEQ ID NO: 65283 - DNA, 25 bp, Saccharomyces pastorianus
tgtttggccctcaagcattgcagtc

SEQ ID NO: 65284 - DNA, 25 bp, Saccharomyces pastorianus
tgcagtctgcgctctaataatacat

SEQ ID NO: 65285 - DNA, 25 bp, Saccharomyces pastorianus
acggatcattggttatcgctgggtt

SEQ ID NO: 65286 - DNA, 25 bp, Saccharomyces pastorianus
taggatctccaggttctgtttggcc

SEQ ID NO: 65287 - DNA, 25 bp, Saccharomyces pastorianus
gtgacaagttctttatggccgcttt

SEQ ID NO: 65288 - DNA, 25 bp, Saccharomyces pastorianus
gtgttgtcctacctgatccaattaa

SEQ ID NO: 65289 - DNA, 25 bp, Saccharomyces pastorianus
attatttgcccactctttactttgc

SEQ ID NO: 65290 - DNA, 25 bp, Saccharomyces pastorianus
ggcaagtttgggtcctactatctga

SEQ ID NO: 65291 - DNA, 25 bp, Saccharomyces pastorianus
tccgcccttagggaagatgctagtt

SEQ ID NO: 65292 - DNA, 25 bp, Saccharomyces pastorianus
tagttgggctctctggttatttggc

SEQ ID NO: 65293 - DNA, 25 bp, Saccharomyces pastorianus
gagtattaccacgatgttcatccgc

SEQ ID NO: 65294 - DNA, 25 bp, Saccharomyces pastorianus
aggactgtcggattttccaggctga

SEQ ID NO: 65295 - DNA, 25 bp, Saccharomyces pastorianus
catgcccattgtttttacgctactg

SEQ ID NO: 65296 - DNA, 25 bp, Saccharomyces pastorianus
gtctcttcttatttttgtctagcca

SEQ ID NO: 65297 - DNA, 25 bp, Saccharomyces pastorianus
attagtgtcccgcttggaacctata

SEQ ID NO: 65298 - DNA, 25 bp, Saccharomyces pastorianus
gtctagccaagttccataccatgag

SEQ ID NO: 65299 - DNA, 25 bp, Saccharomyces pastorianus
gcaatgttctcttcactatgcgtac

SEQ ID NO: 65300 - DNA, 25 bp, Saccharomyces pastorianus
ggaacctatagtcatgcccattgtt

SEQ ID NO: 65301 - DNA, 25 bp, Saccharomyces pastorianus
tacctccaagattcacgctcgtggg

SEQ ID NO: 65302 - DNA, 25 bp, Saccharomyces pastorianus
ggccaagttgcaagtgactacctag

SEQ ID NO: 65303 - DNA, 25 bp, Saccharomyces pastorianus
tagctgctaagttcgttggatccac

SEQ ID NO: 65304 - DNA, 25 bp, Saccharomyces pastorianus
cgtccacgctacaaagggcttgaaa

SEQ ID NO: 65305 - DNA, 25 bp, Saccharomyces pastorianus
acataaatacgcattcttcgagaca

SEQ ID NO: 65306 - DNA, 25 bp, Saccharomyces pastorianus
aaggtgttgattcatctggtgtcta

SEQ ID NO: 65307 - DNA, 25 bp, Saccharomyces pastorianus
aggtgggtatctctacctccaagat

SEQ ID NO: 65308 - DNA, 25 bp, Saccharomyces pastorianus
ggtgtctattggaacgcgtcaacta

SEQ ID NO: 65309 - DNA, 25 bp, Saccharomyces pastorianus
gaaaggtgacgttaccgtccacgct

SEQ ID NO: 65310 - DNA, 25 bp, Saccharomyces pastorianus
cgctcgtgggccagtcggtttagaa

SEQ ID NO: 65311 - DNA, 25 bp, Saccharomyces pastorianus
gagacataccgatgccatagtaacg

SEQ ID NO: 65312 - DNA, 25 bp, Saccharomyces pastorianus
ggataccttgttgacgggagctcga

SEQ ID NO: 65313 - DNA, 25 bp, Saccharomyces pastorianus
acaaatgatttcctggccaccgtaa

SEQ ID NO: 65314 - DNA, 25 bp, Saccharomyces pastorianus
gtaagctcctcgtattctcataggt

SEQ ID NO: 65315 - DNA, 25 bp, Saccharomyces pastorianus
accgaatgccatttctgtcgattta

SEQ ID NO: 65316 - DNA, 25 bp, Saccharomyces pastorianus
cattgacgccttgttgtctgttgga

SEQ ID NO: 65317 - DNA, 25 bp, Saccharomyces pastorianus
tatcattctgtggtgtctttgctac

SEQ ID NO: 65318 - DNA, 25 bp, Saccharomyces pastorianus
attgtctttaactattgcgctggaa

SEQ ID NO: 65319 - DNA, 25 bp, Saccharomyces pastorianus
ggattttacgagaacgcctcctatg

SEQ ID NO: 65320 - DNA, 25 bp, Saccharomyces pastorianus
gaactcttgactatgattccaccta

SEQ ID NO: 65321 - DNA, 25 bp, Saccharomyces pastorianus
gctactccaagtgttctaccaagat

SEQ ID NO: 65322 - DNA, 25 bp, Saccharomyces pastorianus
ggaacgttagcttactttgtctact

SEQ ID NO: 65323 - DNA, 25 bp, Saccharomyces pastorianus
aggctaataccagccgacgaaccga

SEQ ID NO: 65324 - DNA, 25 bp, Saccharomyces pastorianus
gctaatgattctataacgccccaag

SEQ ID NO: 65325 - DNA, 25 bp, Saccharomyces pastorianus
gaagcgttttacgattgtgcaaata

SEQ ID NO: 65326 - DNA, 25 bp, Saccharomyces pastorianus
atgcacgattatggttcgcttcata

SEQ ID NO: 65327 - DNA, 25 bp, Saccharomyces pastorianus
gtctttcagactatctacaggatgt

SEQ ID NO: 65328 - DNA, 25 bp, Saccharomyces pastorianus
taacgccccaagagcaacttgtgaa

SEQ ID NO: 65329 - DNA, 25 bp, Saccharomyces pastorianus
ggcaacactgcggaatacagtcttt

SEQ ID NO: 65330 - DNA, 25 bp, Saccharomyces pastorianus
gacccctctgtcaatatgcacgatt

SEQ ID NO: 65331 - DNA, 25 bp, Saccharomyces pastorianus
tcatcaacacgcaagaccgcaaagg

SEQ ID NO: 65332 - DNA, 25 bp, Saccharomyces pastorianus
gccactggactacgctttagagacc

SEQ ID NO: 65333 - DNA, 25 bp, Saccharomyces pastorianus
aaagaagactacatccatggacagg

SEQ ID NO: 65334 - DNA, 25 bp, Saccharomyces pastorianus
aaggaccatttggagaacttctcag

SEQ ID NO: 65335 - DNA, 25 bp, Saccharomyces pastorianus
atcgatggaggagttgtcaattttc

SEQ ID NO: 65336 - DNA, 25 bp, Saccharomyces pastorianus
aagcgagtgctcagttaaaaaggac

SEQ ID NO: 65337 - DNA, 25 bp, Saccharomyces pastorianus
gaacaccgtgcatgaaatgaacagc

SEQ ID NO: 65338 - DNA, 25 bp, Saccharomyces pastorianus
atgcagtccggcttgcacatgatgg

SEQ ID NO: 65339 - DNA, 25 bp, Saccharomyces pastorianus
gacattgagatgatgttcccctcgg

SEQ ID NO: 65340 - DNA, 25 bp, Saccharomyces pastorianus
gagatgggcttcaacgacagcaact

SEQ ID NO: 65341 - DNA, 25 bp, Saccharomyces pastorianus
gttcccctcggaattgaacaccgtg

SEQ ID NO: 65342 - DNA, 25 bp, Saccharomyces pastorianus
tgtcaattttcctcaaatctctggg

SEQ ID NO: 65343 - DNA, 25 bp, Saccharomyces pastorianus
gacagcaactgcttccgcaagatgg

SEQ ID NO: 65344 - DNA, 25 bp, Saccharomyces pastorianus
ggcttgcacatgatggtcgggataa

SEQ ID NO: 65345 - DNA, 25 bp, Saccharomyces pastorianus
gagacttactacacccagtgtgacg

SEQ ID NO: 65346 - DNA, 25 bp, Saccharomyces pastorianus
gggatttaccgtagcatccgtccta

SEQ ID NO: 65347 - DNA, 25 bp, Saccharomyces pastorianus
tttggcaaacatgtacctgaccgta

SEQ ID NO: 65348 - DNA, 25 bp, Saccharomyces pastorianus
agaaattccttgatgctgttagagt

SEQ ID NO: 65349 - DNA, 25 bp, Saccharomyces pastorianus
ttgtggcattctccatcatgtctgc

SEQ ID NO: 65350 - DNA, 25 bp, Saccharomyces pastorianus
atgtctgccctgtacatcaccaaga

SEQ ID NO: 65351 - DNA, 25 bp, Saccharomyces pastorianus
cgtcctacctgcattttacggtatg

SEQ ID NO: 65352 - DNA, 25 bp, Saccharomyces pastorianus
ggctttacatccgttgtggcattct

SEQ ID NO: 65353 - DNA, 25 bp, Saccharomyces pastorianus
tttccccaagacatcaatatccact

SEQ ID NO: 65354 - DNA, 25 bp, Saccharomyces pastorianus
aaacttcaattctctaaggtcagtg

SEQ ID NO: 65355 - DNA, 25 bp, Saccharomyces pastorianus
tgaccatgtacccaaattcaaccac

SEQ ID NO: 65356 - DNA, 25 bp, Saccharomyces pastorianus
gtatgtggtcaaactttgtgactct

SEQ ID NO: 65357 - DNA, 25 bp, Saccharomyces pastorianus
aatagagttcatttggttcttcaat

SEQ ID NO: 65358 - DNA, 25 bp, Saccharomyces pastorianus
aatcctactcagtgttataattcca

SEQ ID NO: 65359 - DNA, 25 bp, Saccharomyces pastorianus
aaaccaggatcgtactggcttccaa

SEQ ID NO: 65360 - DNA, 25 bp, Saccharomyces pastorianus
agaattaaatctccgagcctcttta

SEQ ID NO: 65361 - DNA, 25 bp, Saccharomyces pastorianus
ggtcatgacagcatcttcaaaccaa

SEQ ID NO: 65362 - DNA, 25 bp, Saccharomyces pastorianus
gggaaaaaatcctactcagtgttat

SEQ ID NO: 65363 - DNA, 25 bp, Saccharomyces pastorianus
gtcaattagtaacgcaatgggttgc

SEQ ID NO: 65364 - DNA, 25 bp, Saccharomyces pastorianus
tctccgagcctctttaaaccaggat

SEQ ID NO: 65365 - DNA, 25 bp, Saccharomyces pastorianus
ggttcttcaattatcgaatctaata

SEQ ID NO: 65366 - DNA, 25 bp, Saccharomyces pastorianus
aactttgggcgagggaggaccacat

SEQ ID NO: 65367 - DNA, 25 bp, Saccharomyces pastorianus
aaattggtcgatatggattccggca

SEQ ID NO: 65368 - DNA, 25 bp, Saccharomyces pastorianus
gtgcgattcattcagccgaggcagc

SEQ ID NO: 65369 - DNA, 25 bp, Saccharomyces pastorianus
tgtatcgaagtttagcttgccctcc

SEQ ID NO: 65370 - DNA, 25 bp, Saccharomyces pastorianus
aatgaattaccaacgcaggttcgag

SEQ ID NO: 65371 - DNA, 25 bp, Saccharomyces pastorianus
gtttagcttgccctccaaaggaatt

SEQ ID NO: 65372 - DNA, 25 bp, Saccharomyces pastorianus
tggattccggcaacaaccagccaaa

SEQ ID NO: 65373 - DNA, 25 bp, Saccharomyces pastorianus
gaggcagcaaattaggtattccaac

SEQ ID NO: 65374 - DNA, 25 bp, Saccharomyces pastorianus
aaagatgctcctattgaacctccaa

SEQ ID NO: 65375 - DNA, 25 bp, Saccharomyces pastorianus
aaacgaatctgggttagcttctaat

SEQ ID NO: 65376 - DNA, 25 bp, Saccharomyces pastorianus
gagtttggaattatcgctacggaaa

SEQ ID NO: 65377 - DNA, 25 bp, Saccharomyces pastorianus
aaacgacttgcccagcactgtggaa

SEQ ID NO: 65378 - DNA, 25 bp, Saccharomyces pastorianus
gaccaagttgtcctatcatactagt

SEQ ID NO: 65379 - DNA, 25 bp, Saccharomyces pastorianus
aaaacgcttggacgactgggctgaa

SEQ ID NO: 65380 - DNA, 25 bp, Saccharomyces pastorianus
acagaggtgtttttccatttgtctt

SEQ ID NO: 65381 - DNA, 25 bp, Saccharomyces pastorianus
gcgattacccagtcaatgcggtcaa

SEQ ID NO: 65382 - DNA, 25 bp, Saccharomyces pastorianus
ggctgaagacgtgcacagacgctta

SEQ ID NO: 65383 - DNA, 25 bp, Saccharomyces pastorianus
tgccactgcagcgattttggagcaa

SEQ ID NO: 65384 - DNA, 25 bp, Saccharomyces pastorianus
gcactattgcgcatttggctctata

SEQ ID NO: 65385 - DNA, 25 bp, Saccharomyces pastorianus
actacagaaaccgttgcagccgctg

SEQ ID NO: 65386 - DNA, 25 bp, Saccharomyces pastorianus
ttgcgcgacccaaatgctggagtca

SEQ ID NO: 65387 - DNA, 25 bp, Saccharomyces pastorianus
aatggcggccacagctttaattgca

SEQ ID NO: 65388 - DNA, 25 bp, Saccharomyces pastorianus
agggctgaagtctctgatgtcggaa

SEQ ID NO: 65389 - DNA, 25 bp, Saccharomyces pastorianus
cacccctgagccatgtactagaata

SEQ ID NO: 65390 - DNA, 25 bp, Saccharomyces pastorianus
aaagtcttgagcatatttggatcgc

SEQ ID NO: 65391 - DNA, 25 bp, Saccharomyces pastorianus
gaaagttacccaaaagtgttgtcat

SEQ ID NO: 65392 - DNA, 25 bp, Saccharomyces pastorianus
tagggacaccggaatactgtgctcc

SEQ ID NO: 65393 - DNA, 25 bp, Saccharomyces pastorianus
ggtccctgggtgttattacacacat

SEQ ID NO: 65394 - DNA, 25 bp, Saccharomyces pastorianus
gaatgcataccgtagtagggacacc

SEQ ID NO: 65395 - DNA, 25 bp, Saccharomyces pastorianus
aatattttgttatgcacccctgagc

SEQ ID NO: 65396 - DNA, 25 bp, Saccharomyces pastorianus
aaatgtgacctatggtccctgggtg

SEQ ID NO: 65397 - DNA, 25 bp, Saccharomyces pastorianus
tactgtgctcccgaagtgggattta

SEQ ID NO: 65398 - DNA, 25 bp, Saccharomyces pastorianus
tgtactagaatagtcttggccgatt

SEQ ID NO: 65399 - DNA, 25 bp, Saccharomyces pastorianus
gggtatttctccgttttatggtgat

SEQ ID NO: 65400 - DNA, 25 bp, Saccharomyces pastorianus
cgttgggcatacctaattaccttag

SEQ ID NO: 65401 - DNA, 25 bp, Saccharomyces pastorianus
gaccattgtctatatcagcacgttg

SEQ ID NO: 65402 - DNA, 25 bp, Saccharomyces pastorianus
aatttgatttcatctccgaggccat

SEQ ID NO: 65403 - DNA, 25 bp, Saccharomyces pastorianus
gcaggattgctttggtgattcatat

SEQ ID NO: 65404 - DNA, 25 bp, Saccharomyces pastorianus
ataaagatcatcgtccagagcagga

SEQ ID NO: 65405 - DNA, 25 bp, Saccharomyces pastorianus
ggcctcaactgttagctatttcgaa

SEQ ID NO: 65406 - DNA, 25 bp, Saccharomyces pastorianus
aagaacacccgtatattcccaatgg

SEQ ID NO: 65407 - DNA, 25 bp, Saccharomyces pastorianus
tagaattcggtgactgtgctctttt

SEQ ID NO: 65408 - DNA, 25 bp, Saccharomyces pastorianus
gactgtgctcttttggaatcatttc

SEQ ID NO: 65409 - DNA, 25 bp, Saccharomyces pastorianus
ccgaggccattttagcgactgatat

SEQ ID NO: 65410 - DNA, 25 bp, Saccharomyces pastorianus
tattatcagatcattggcctcaact

SEQ ID NO: 65411 - DNA, 25 bp, Saccharomyces pastorianus
attcgttgtcgttggtgctttggtc

SEQ ID NO: 65412 - DNA, 25 bp, Saccharomyces pastorianus
tgcttctttgaaggacgtcggccac

SEQ ID NO: 65413 - DNA, 25 bp, Saccharomyces pastorianus
atgttaccgcttggtctagttcttt

SEQ ID NO: 65414 - DNA, 25 bp, Saccharomyces pastorianus
taagaacttcgcttggagacccaga

SEQ ID NO: 65415 - DNA, 25 bp, Saccharomyces pastorianus
tcaacgttgctggtaacatggtcaa

SEQ ID NO: 65416 - DNA, 25 bp, Saccharomyces pastorianus
gagatttgatcttgcaccaacgtga

SEQ ID NO: 65417 - DNA, 25 bp, Saccharomyces pastorianus
gaccagtttctatcttgcctaattc

SEQ ID NO: 65418 - DNA, 25 bp, Saccharomyces pastorianus
gacatccaaccagaaaacgccagtg

SEQ ID NO: 65419 - DNA, 25 bp, Saccharomyces pastorianus
gggacccatccggtagatatgttac

SEQ ID NO: 65420 - DNA, 25 bp, Saccharomyces pastorianus
gtccccagctggtagattcgttgtc

SEQ ID NO: 65421 - DNA, 25 bp, Saccharomyces pastorianus
aacgacgatgtttctgcttctttga

SEQ ID NO: 65422 - DNA, 25 bp, Saccharomyces pastorianus
aaagaaagcagcttcaaaatacgat

SEQ ID NO: 65423 - DNA, 25 bp, Saccharomyces pastorianus
ctcattcataattgtttgggcttca

SEQ ID NO: 65424 - DNA, 25 bp, Saccharomyces pastorianus
gggttccgaaaacagttgcgacgca

SEQ ID NO: 65425 - DNA, 25 bp, Saccharomyces pastorianus
gacgtcttcaagtatttagtggata

SEQ ID NO: 65426 - DNA, 25 bp, Saccharomyces pastorianus
tgttctcattcataattgtttgggc

SEQ ID NO: 65427 - DNA, 25 bp, Saccharomyces pastorianus
attgtttgggcttcaatatcaaaga

SEQ ID NO: 65428 - DNA, 25 bp, Saccharomyces pastorianus
aagtcaataaagctgacgtcttcaa

SEQ ID NO: 65429 - DNA, 25 bp, Saccharomyces pastorianus
gtgaatttctcacacaagtcaataa

SEQ ID NO: 65430 - DNA, 25 bp, Saccharomyces pastorianus
agtggatatatcgaagggttccgaa

SEQ ID NO: 65431 - DNA, 25 bp, Saccharomyces pastorianus
ttccgaaaacagttgcgacgcatta

SEQ ID NO: 65432 - DNA, 25 bp, Saccharomyces pastorianus
aaagctgacgtcttcaagtatttag

SEQ ID NO: 65433 - DNA, 25 bp, Saccharomyces pastorianus
taaggacccagccatcgtttatcaa

SEQ ID NO: 65434 - DNA, 25 bp, Saccharomyces pastorianus
aaatctttatctcggtacgctaaca

SEQ ID NO: 65435 - DNA, 25 bp, Saccharomyces pastorianus
ctgagcaattactgcagtgcctgaa

SEQ ID NO: 65436 - DNA, 25 bp, Saccharomyces pastorianus
agaagcatccagacaggtttccagt

SEQ ID NO: 65437 - DNA, 25 bp, Saccharomyces pastorianus
gttcttacctgaagcgatccaacat

SEQ ID NO: 65438 - DNA, 25 bp, Saccharomyces pastorianus
caggtttccagtcttagggccacaa

SEQ ID NO: 65439 - DNA, 25 bp, Saccharomyces pastorianus
aatcagtgctaacagaaaccgcccc

SEQ ID NO: 65440 - DNA, 25 bp, Saccharomyces pastorianus
aagcagacgtcacctctttagatga

SEQ ID NO: 65441 - DNA, 25 bp, Saccharomyces pastorianus
aatttctatcgtttgcaagggcata

SEQ ID NO: 65442 - DNA, 25 bp, Saccharomyces pastorianus
agggccacaactatcgacgaagaag

SEQ ID NO: 65443 - DNA, 25 bp, Saccharomyces pastorianus
agtcaaatctaaaccacaccatcta

SEQ ID NO: 65444 - DNA, 25 bp, Saccharomyces pastorianus
atgccaatccgtaaagttgctcgat

SEQ ID NO: 65445 - DNA, 25 bp, Saccharomyces pastorianus
gagtcattcgcgcaactgagcaaat

SEQ ID NO: 65446 - DNA, 25 bp, Saccharomyces pastorianus
aattgcccgtgaatctgtccaacga

SEQ ID NO: 65447 - DNA, 25 bp, Saccharomyces pastorianus
acgagctgccgtttctgcaagaatt

SEQ ID NO: 65448 - DNA, 25 bp, Saccharomyces pastorianus
tcagagatctcacgcaattgcccgt

SEQ ID NO: 65449 - DNA, 25 bp, Saccharomyces pastorianus
gaggcgcgctgtccaagttacaaaa

SEQ ID NO: 65450 - DNA, 25 bp, Saccharomyces pastorianus
tgtctgccccacttgaagattttaa

SEQ ID NO: 65451 - DNA, 25 bp, Saccharomyces pastorianus
tagcacaaacctgtacgagcttgcc

SEQ ID NO: 65452 - DNA, 25 bp, Saccharomyces pastorianus
tgctggtaaccctctggcttgatga

SEQ ID NO: 65453 - DNA, 25 bp, Saccharomyces pastorianus
tgctcgatctacgaaacaacccgat

SEQ ID NO: 65454 - DNA, 25 bp, Saccharomyces pastorianus
gagctctttccatcaaaaacaccgg

SEQ ID NO: 65455 - DNA, 25 bp, Saccharomyces pastorianus
gggtcatggcatcaagctttttcat

SEQ ID NO: 65456 - DNA, 25 bp, Saccharomyces pastorianus
gaacattttgatttcttcaacgaaa

SEQ ID NO: 65457 - DNA, 25 bp, Saccharomyces pastorianus
ggtcaatttcaagggtcatggcatc

SEQ ID NO: 65458 - DNA, 25 bp, Saccharomyces pastorianus
gaaaaatgtcgtgggtagtcaagaa

SEQ ID NO: 65459 - DNA, 25 bp, Saccharomyces pastorianus
ggagaccgaacacaagtatcgtata

SEQ ID NO: 65460 - DNA, 25 bp, Saccharomyces pastorianus
gcatcaagctttttcattgggtgtt

SEQ ID NO: 65461 - DNA, 25 bp, Saccharomyces pastorianus
tgtttcttcgactaatgtgaaggga

SEQ ID NO: 65462 - DNA, 25 bp, Saccharomyces pastorianus
ttccaccaatcggaggagaccgaac

SEQ ID NO: 65463 - DNA, 25 bp, Saccharomyces pastorianus
agaattgttggaggaactttgtgct

SEQ ID NO: 65464 - DNA, 25 bp, Saccharomyces pastorianus
gagatttggcctttggtcaatttca

SEQ ID NO: 65465 - DNA, 25 bp, Saccharomyces pastorianus
gtatcgtataagagatttggccttt

SEQ ID NO: 65466 - DNA, 25 bp, Saccharomyces pastorianus
accatcactccgttcttagaagttt

SEQ ID NO: 65467 - DNA, 25 bp, Saccharomyces pastorianus
aaatttctggccacttattgcacat

SEQ ID NO: 65468 - DNA, 25 bp, Saccharomyces pastorianus
ttcaggccgccatatttgtttattc

SEQ ID NO: 65469 - DNA, 25 bp, Saccharomyces pastorianus
gtggctcactgatgtttttatacct

SEQ ID NO: 65470 - DNA, 25 bp, Saccharomyces pastorianus
aaacattcccggtaagtgcaccatc

SEQ ID NO: 65471 - DNA, 25 bp, Saccharomyces pastorianus
tgccgctcattgctgcctgaagatg

SEQ ID NO: 65472 - DNA, 25 bp, Saccharomyces pastorianus
gttggtttgttactctccataaatg

SEQ ID NO: 65473 - DNA, 25 bp, Saccharomyces pastorianus
tgagaaagctcccagaacccattga

SEQ ID NO: 65474 - DNA, 25 bp, Saccharomyces pastorianus
gtttgttgacttcactccatggata

SEQ ID NO: 65475 - DNA, 25 bp, Saccharomyces pastorianus
tttatacctgcagattgccgctcat

SEQ ID NO: 65476 - DNA, 25 bp, Saccharomyces pastorianus
tacggcgctaacgttgggtttgttg

SEQ ID NO: 65477 - DNA, 25 bp, Saccharomyces pastorianus
gaaaaacttcagcagcagccggaaa

SEQ ID NO: 65478 - DNA, 25 bp, Saccharomyces pastorianus
tcccattgcccatgcgattaaactt

SEQ ID NO: 65479 - DNA, 25 bp, Saccharomyces pastorianus
gattgtgccgtttttcatcatggaa

SEQ ID NO: 65480 - DNA, 25 bp, Saccharomyces pastorianus
aagcgatagtttaagcacgtctcaa

SEQ ID NO: 65481 - DNA, 25 bp, Saccharomyces pastorianus
gtccctttgagtttgattgtgccgt

SEQ ID NO: 65482 - DNA, 25 bp, Saccharomyces pastorianus
atatcttgctacttaccggagggac

SEQ ID NO: 65483 - DNA, 25 bp, Saccharomyces pastorianus
ctcttcgtcaccagttcataactat

SEQ ID NO: 65484 - DNA, 25 bp, Saccharomyces pastorianus
agacaaatcatccagtccctttgag

SEQ ID NO: 65485 - DNA, 25 bp, Saccharomyces pastorianus
gagggtttgacgtacttgaagctta

SEQ ID NO: 65486 - DNA, 25 bp, Saccharomyces pastorianus
gggcctcctgtgtttgttgacaaag

SEQ ID NO: 65487 - DNA, 25 bp, Saccharomyces pastorianus
taaaccagagctgttgtgcctaaca

SEQ ID NO: 65488 - DNA, 25 bp, Saccharomyces pastorianus
attgacagagatgcttgcctgccag

SEQ ID NO: 65489 - DNA, 25 bp, Saccharomyces pastorianus
ttctccccaggtctatagcaaaagc

SEQ ID NO: 65490 - DNA, 25 bp, Saccharomyces pastorianus
gccttggtatcagttctgttccaga

SEQ ID NO: 65491 - DNA, 25 bp, Saccharomyces pastorianus
aaccgactctcctgattttgtactt

SEQ ID NO: 65492 - DNA, 25 bp, Saccharomyces pastorianus
tatccctccagaagtcagtctgtta

SEQ ID NO: 65493 - DNA, 25 bp, Saccharomyces pastorianus
aaagttctaagcgatcattaccgat

SEQ ID NO: 65494 - DNA, 25 bp, Saccharomyces pastorianus
gataaggcctttcgtttatgcaaga

SEQ ID NO: 65495 - DNA, 25 bp, Saccharomyces pastorianus
tgcctgccagggagctctagttgaa

SEQ ID NO: 65496 - DNA, 25 bp, Saccharomyces pastorianus
aagagcgcaagacccacctttgtat

SEQ ID NO: 65497 - DNA, 25 bp, Saccharomyces pastorianus
agtacgaatttttctatccctccag

SEQ ID NO: 65498 - DNA, 25 bp, Saccharomyces pastorianus
gtatgaacttccgttggcatgtgaa

SEQ ID NO: 65499 - DNA, 25 bp, Saccharomyces pastorianus
aggtaatgctatcgtctttgcctcc

SEQ ID NO: 65500 - DNA, 25 bp, Saccharomyces pastorianus
ttagacagctactaccagtatccgc

SEQ ID NO: 65501 - DNA, 25 bp, Saccharomyces pastorianus
tatctttcaaacatcctgactcggc

SEQ ID NO: 65502 - DNA, 25 bp, Saccharomyces pastorianus
taataattcatttcccgcgccatat

SEQ ID NO: 65503 - DNA, 25 bp, Saccharomyces pastorianus
tatgcaggtgcaatacccgctgaac

SEQ ID NO: 65504 - DNA, 25 bp, Saccharomyces pastorianus
agtactgctgttaattacctgccct

SEQ ID NO: 65505 - DNA, 25 bp, Saccharomyces pastorianus
aacagcagtatttcggcgctacttc

SEQ ID NO: 65506 - DNA, 25 bp, Saccharomyces pastorianus
taaaagcccctctgacgacgacaat

SEQ ID NO: 65507 - DNA, 25 bp, Saccharomyces pastorianus
gtaattttccaacagcatcaccaac

SEQ ID NO: 65508 - DNA, 25 bp, Saccharomyces pastorianus
tgcctccgagatctgtaccaaatgt

SEQ ID NO: 65509 - DNA, 25 bp, Saccharomyces pastorianus
actctaacagactcggaccttttga

SEQ ID NO: 65510 - DNA, 25 bp, Saccharomyces pastorianus
gtgccagaagatgcaaccagtttca

SEQ ID NO: 65511 - DNA, 25 bp, Saccharomyces pastorianus
caatggtctaataaacgcctacgaa

SEQ ID NO: 65512 - DNA, 25 bp, Saccharomyces pastorianus
ataccccggtatttcgcatatgagg

SEQ ID NO: 65513 - DNA, 25 bp, Saccharomyces pastorianus
gtaaagagactactcgtccgacttt

SEQ ID NO: 65514 - DNA, 25 bp, Saccharomyces pastorianus
aagacatactatttcccacgagggc

SEQ ID NO: 65515 - DNA, 25 bp, Saccharomyces pastorianus
aactcttcgcctatcaacaaatcat

SEQ ID NO: 65516 - DNA, 25 bp, Saccharomyces pastorianus
atcaaccggcagtacaaactcttcg

SEQ ID NO: 65517 - DNA, 25 bp, Saccharomyces pastorianus
tacgacgatgagaaaaccggttcca

SEQ ID NO: 65518 - DNA, 25 bp, Saccharomyces pastorianus
accggttccaactcagataatgcag

SEQ ID NO: 65519 - DNA, 25 bp, Saccharomyces pastorianus
aatcttttcggcgtcgaatacgacg

SEQ ID NO: 65520 - DNA, 25 bp, Saccharomyces pastorianus
agcatgccaaatacccaagacgtta

SEQ ID NO: 65521 - DNA, 25 bp, Saccharomyces pastorianus
ggatcgcgtaccaagtgccggacat

SEQ ID NO: 65522 - DNA, 25 bp, Saccharomyces pastorianus
tgcacccaggtaacatccagatcga

SEQ ID NO: 65523 - DNA, 25 bp, Saccharomyces pastorianus
ctggatatgaccacgcagatcgatt

SEQ ID NO: 65524 - DNA, 25 bp, Saccharomyces pastorianus
aggacttcgacgtgtgctctatgaa

SEQ ID NO: 65525 - DNA, 25 bp, Saccharomyces pastorianus
aatagcttcgaggtgtcgttctctc

SEQ ID NO: 65526 - DNA, 25 bp, Saccharomyces pastorianus
gataagcgcatgtctggtggcacca

SEQ ID NO: 65527 - DNA, 25 bp, Saccharomyces pastorianus
ggagaattcacagctatcggccaat

SEQ ID NO: 65528 - DNA, 25 bp, Saccharomyces pastorianus
gattcatacatcagcgcgtacgtgg

SEQ ID NO: 65529 - DNA, 25 bp, Saccharomyces pastorianus
gtacgcgtacgggttcaaaatcata

SEQ ID NO: 65530 - DNA, 25 bp, Saccharomyces pastorianus
gactcgatcgagtacatcgcgcaga

SEQ ID NO: 65531 - DNA, 25 bp, Saccharomyces pastorianus
ttacgtggacatgattcccgggatc

SEQ ID NO: 65532 - DNA, 25 bp, Saccharomyces pastorianus
ttgcgtatgacgagggctttgctac

SEQ ID NO: 65533 - DNA, 25 bp, Saccharomyces pastorianus
tttgctacagatgatcccacgcttg

SEQ ID NO: 65534 - DNA, 25 bp, Saccharomyces pastorianus
ttaattcacagtttagaggcgcggt

SEQ ID NO: 65535 - DNA, 25 bp, Saccharomyces pastorianus
gatatgctacacttagaatctgttg

SEQ ID NO: 65536 - DNA, 25 bp, Saccharomyces pastorianus
ggctcaagataaagaccccaacact

SEQ ID NO: 65537 - DNA, 25 bp, Saccharomyces pastorianus
atacgttttgagtaggctatcggat

SEQ ID NO: 65538 - DNA, 25 bp, Saccharomyces pastorianus
tactgcattgcacgagtggatgctt

SEQ ID NO: 65539 - DNA, 25 bp, Saccharomyces pastorianus
tacattcactcccaactatacgttt

SEQ ID NO: 65540 - DNA, 25 bp, Saccharomyces pastorianus
ggagaaatctattcggtggcagaaa

SEQ ID NO: 65541 - DNA, 25 bp, Saccharomyces pastorianus
gacgaaccgctatcagagactgcta

SEQ ID NO: 65542 - DNA, 25 bp, Saccharomyces pastorianus
ccacgcttgctacagcagtttggag

SEQ ID NO: 65543 - DNA, 25 bp, Saccharomyces pastorianus
cattctggaagcacgttgggttcga

SEQ ID NO: 65544 - DNA, 25 bp, Saccharomyces pastorianus
tacaaagccgtgacgcttccaaatt

SEQ ID NO: 65545 - DNA, 25 bp, Saccharomyces pastorianus
aagcgtgtggacaaattcctacaaa

SEQ ID NO: 65546 - DNA, 25 bp, Saccharomyces pastorianus
gggttcgaactattgtccataggca

SEQ ID NO: 65547 - DNA, 25 bp, Saccharomyces pastorianus
gaaagctttactcagggagctctca

SEQ ID NO: 65548 - DNA, 25 bp, Saccharomyces pastorianus
cgatcctgaaagatggcttccaata

SEQ ID NO: 65549 - DNA, 25 bp, Saccharomyces pastorianus
ggacagatctacatacagaccaaag

SEQ ID NO: 65550 - DNA, 25 bp, Saccharomyces pastorianus
tccaaattgcccgatcctgaaagat

SEQ ID NO: 65551 - DNA, 25 bp, Saccharomyces pastorianus
tagtcaacagaattgtctcatccaa

SEQ ID NO: 65552 - DNA, 25 bp, Saccharomyces pastorianus
gggagctctcaagcttcaataaagt

SEQ ID NO: 65553 - DNA, 25 bp, Saccharomyces pastorianus
aagaagtctgaacaagcccttgata

SEQ ID NO: 65554 - DNA, 25 bp, Saccharomyces pastorianus
cctcgttgcaccaaaaatttctcca

SEQ ID NO: 65555 - DNA, 25 bp, Saccharomyces pastorianus
gttgcaccaaaaatttctccagaaa

SEQ ID NO: 65556 - DNA, 25 bp, Saccharomyces pastorianus
ctcgttgcaccaaaaatttctccag

SEQ ID NO: 65557 - DNA, 25 bp, Saccharomyces pastorianus
tcctcgttgcaccaaaaatttctcc

SEQ ID NO: 65558 - DNA, 25 bp, Saccharomyces pastorianus
tttcctcgttgcaccaaaaatttct

SEQ ID NO: 65559 - DNA, 25 bp, Saccharomyces pastorianus
cgttgcaccaaaaatttctccagaa

SEQ ID NO: 65560 - DNA, 25 bp, Saccharomyces pastorianus
tccttttcctcgttgcaccaaaaat

SEQ ID NO: 65561 - DNA, 25 bp, Saccharomyces pastorianus
ttgcaccaaaaatttctccagaaaa

SEQ ID NO: 65562 - DNA, 25 bp, Saccharomyces pastorianus
ttcctcgttgcaccaaaaatttctc

SEQ ID NO: 65563 - DNA, 25 bp, Saccharomyces pastorianus
tcgttgcaccaaaaatttctccaga

SEQ ID NO: 65564 - DNA, 25 bp, Saccharomyces pastorianus
tttcttcctctccttttcctcgttg

SEQ ID NO: 65565 - DNA, 25 bp, Saccharomyces pastorianus
caaactacagaaacaggaatgctaa

SEQ ID NO: 65566 - DNA, 25 bp, Saccharomyces pastorianus
gctagagtatgagttaacacaagaa

SEQ ID NO: 65567 - DNA, 25 bp, Saccharomyces pastorianus
tggtacccctgaagataatactaga

SEQ ID NO: 65568 - DNA, 25 bp, Saccharomyces pastorianus
cagccgagcattccgagagagtcta

SEQ ID NO: 65569 - DNA, 25 bp, Saccharomyces pastorianus
aacattaaattgattcagcgagagt

SEQ ID NO: 65570 - DNA, 25 bp, Saccharomyces pastorianus
gcgaatgaaaactctcaaattttgg

SEQ ID NO: 65571 - DNA, 25 bp, Saccharomyces pastorianus
gattcagcgagagtttgcgaatgaa

SEQ ID NO: 65572 - DNA, 25 bp, Saccharomyces pastorianus
gaagggtcagccgagcattccgaga

SEQ ID NO: 65573 - DNA, 25 bp, Saccharomyces pastorianus
gagcattccgagagagtctaggaaa

SEQ ID NO: 65574 - DNA, 25 bp, Saccharomyces pastorianus
gaaacaactataaaccaaactacag

SEQ ID NO: 65575 - DNA, 25 bp, Saccharomyces pastorianus
gggatgccaatttgctagagtatga

SEQ ID NO: 65576 - DNA, 25 bp, Saccharomyces pastorianus
tacacggtatccacatcatccagag

SEQ ID NO: 65577 - DNA, 25 bp, Saccharomyces pastorianus
tcactatattttgaagccgctcctc

SEQ ID NO: 65578 - DNA, 25 bp, Saccharomyces pastorianus
ggttgtggttcctgggacttctatc

SEQ ID NO: 65579 - DNA, 25 bp, Saccharomyces pastorianus
aagacagccttgattctgaactgga

SEQ ID NO: 65580 - DNA, 25 bp, Saccharomyces pastorianus
taaagcctacaagtcgggttccagc

SEQ ID NO: 65581 - DNA, 25 bp, Saccharomyces pastorianus
actttcactccccataatcaatatt

SEQ ID NO: 65582 - DNA, 25 bp, Saccharomyces pastorianus
gagataccaaagcaaccatcactat

SEQ ID NO: 65583 - DNA, 25 bp, Saccharomyces pastorianus
aaagacggagcctactctgaatgta

SEQ ID NO: 65584 - DNA, 25 bp, Saccharomyces pastorianus
taccgcaatcgacccaatacaaatt

SEQ ID NO: 65585 - DNA, 25 bp, Saccharomyces pastorianus
gggttccagcttcacttaaattcga

SEQ ID NO: 65586 - DNA, 25 bp, Saccharomyces pastorianus
gattttccaagctctaatgtccaag

SEQ ID NO: 65587 - DNA, 25 bp, Saccharomyces pastorianus
ggctaataacaaagcactccccaat

SEQ ID NO: 65588 - DNA, 25 bp, Saccharomyces pastorianus
tgccattgttggttcattccttggg

SEQ ID NO: 65589 - DNA, 25 bp, Saccharomyces pastorianus
taagaaggctatctcgccgggaaga

SEQ ID NO: 65590 - DNA, 25 bp, Saccharomyces pastorianus
tccccaataaaaatccgccagttca

SEQ ID NO: 65591 - DNA, 25 bp, Saccharomyces pastorianus
gggctgctgtaacaaccgttctgag

SEQ ID NO: 65592 - DNA, 25 bp, Saccharomyces pastorianus
gatatttcagaaagcgcgattccta

SEQ ID NO: 65593 - DNA, 25 bp, Saccharomyces pastorianus
acatctcccacgaaatcacatttga

SEQ ID NO: 65594 - DNA, 25 bp, Saccharomyces pastorianus
ccgccagttcacaataaagcacata

SEQ ID NO: 65595 - DNA, 25 bp, Saccharomyces pastorianus
gaacaagggcacattttatcaaggt

SEQ ID NO: 65596 - DNA, 25 bp, Saccharomyces pastorianus
gataatacttctctaagtacgccga

SEQ ID NO: 65597 - DNA, 25 bp, Saccharomyces pastorianus
aagcacaaagctacaacatctccca

SEQ ID NO: 65598 - DNA, 25 bp, Saccharomyces pastorianus
gcaacagctgggtggatatgcttcg

SEQ ID NO: 65599 - DNA, 25 bp, Saccharomyces pastorianus
gcctcctcctatgaataattacaat

SEQ ID NO: 65600 - DNA, 25 bp, Saccharomyces pastorianus
gtggatatgcttcgatgaacccatc

SEQ ID NO: 65601 - DNA, 25 bp, Saccharomyces pastorianus
tatgtctgcaaaatctccagtccca

SEQ ID NO: 65602 - DNA, 25 bp, Saccharomyces pastorianus
ggtcaaaatatgtctgcaaaatctc

SEQ ID NO: 65603 - DNA, 25 bp, Saccharomyces pastorianus
atcgcctcctcctatgaataattac

SEQ ID NO: 65604 - DNA, 25 bp, Saccharomyces pastorianus
atatgcttcgatgaacccatcgcct

SEQ ID NO: 65605 - DNA, 25 bp, Saccharomyces pastorianus
tgcaaaatctccagtcccacctatg

SEQ ID NO: 65606 - DNA, 25 bp, Saccharomyces pastorianus
atcatcagcaacctgctggaaataa

SEQ ID NO: 65607 - DNA, 25 bp, Saccharomyces pastorianus
aacaacatcatcagcaacctgctgg

SEQ ID NO: 65608 - DNA, 25 bp, Saccharomyces pastorianus
gcaacctcacgctcaacagcaattg

SEQ ID NO: 65609 - DNA, 25 bp, Saccharomyces pastorianus
caaatccctatcaaccaaaactacg

SEQ ID NO: 65610 - DNA, 25 bp, Saccharomyces pastorianus
taccgtgccatgaaccatcaacaaa

SEQ ID NO: 65611 - DNA, 25 bp, Saccharomyces pastorianus
atctctgctgaagatgcggttgcaa

SEQ ID NO: 65612 - DNA, 25 bp, Saccharomyces pastorianus
acagcagcaacaaccttatggccaa

SEQ ID NO: 65613 - DNA, 25 bp, Saccharomyces pastorianus
aactacggtcgctaccaaagttctg

SEQ ID NO: 65614 - DNA, 25 bp, Saccharomyces pastorianus
atggtcgttatcaaggtgctccacc

SEQ ID NO: 65615 - DNA, 25 bp, Saccharomyces pastorianus
aagactaacttaccaaactccaatg

SEQ ID NO: 65616 - DNA, 25 bp, Saccharomyces pastorianus
ctaccaaagttctgtgtctgcgcca

SEQ ID NO: 65617 - DNA, 25 bp, Saccharomyces pastorianus
acgaccaaggttatgcggcacaggc

SEQ ID NO: 65618 - DNA, 25 bp, Saccharomyces pastorianus
caacaaaatgtatatggcgctcccc

SEQ ID NO: 65619 - DNA, 25 bp, Saccharomyces pastorianus
ttaccaaaattacggcatgcctcct

SEQ ID NO: 65620 - DNA, 25 bp, Saccharomyces pastorianus
gacggtgtggcattagctactccaa

SEQ ID NO: 65621 - DNA, 25 bp, Saccharomyces pastorianus
tacatagaggtaactctccccatct

SEQ ID NO: 65622 - DNA, 25 bp, Saccharomyces pastorianus
gtttagaccattgattttgcctcat

SEQ ID NO: 65623 - DNA, 25 bp, Saccharomyces pastorianus
atccgcaggagggtcaatcgtttct

SEQ ID NO: 65624 - DNA, 25 bp, Saccharomyces pastorianus
gtacctgctatcttaatgaccccaa

SEQ ID NO: 65625 - DNA, 25 bp, Saccharomyces pastorianus
gaacttttgggcttcaattccagct

SEQ ID NO: 65626 - DNA, 25 bp, Saccharomyces pastorianus
aacagttcgtctatcgtaacccatg

SEQ ID NO: 65627 - DNA, 25 bp, Saccharomyces pastorianus
ctgtccacgttctttgtcgtttaga

SEQ ID NO: 65628 - DNA, 25 bp, Saccharomyces pastorianus
gaagtcggcactatttacattgatg

SEQ ID NO: 65629 - DNA, 25 bp, Saccharomyces pastorianus
attgatggtactcaactcccaacca

SEQ ID NO: 65630 - DNA, 25 bp, Saccharomyces pastorianus
atcgtttctccattagtacctgcta

SEQ ID NO: 65631 - DNA, 25 bp, Saccharomyces pastorianus
cagtctttgatctggcacaatccgt

SEQ ID NO: 65632 - DNA, 25 bp, Saccharomyces pastorianus
tgacgagcggctcaaaatttgtaaa

SEQ ID NO: 65633 - DNA, 25 bp, Saccharomyces pastorianus
gtacacttgattcacatgccataag

SEQ ID NO: 65634 - DNA, 25 bp, Saccharomyces pastorianus
aagcgatggtcgaatttataacaca

SEQ ID NO: 65635 - DNA, 25 bp, Saccharomyces pastorianus
gagactgaaattgaaccacccaatg

SEQ ID NO: 65636 - DNA, 25 bp, Saccharomyces pastorianus
acatttgcatgagtcataccctgag

SEQ ID NO: 65637 - DNA, 25 bp, Saccharomyces pastorianus
aaaccttggactccgtctacaagag

SEQ ID NO: 65638 - DNA, 25 bp, Saccharomyces pastorianus
gccataagattgacgagcggctcaa

SEQ ID NO: 65639 - DNA, 25 bp, Saccharomyces pastorianus
acccaatgaggtggtctagaatcta

SEQ ID NO: 65640 - DNA, 25 bp, Saccharomyces pastorianus
ggcacaatccgttacagaatgttta

SEQ ID NO: 65641 - DNA, 25 bp, Saccharomyces pastorianus
ggtctagaatctatagtacacttga

SEQ ID NO: 65642 - DNA, 25 bp, Saccharomyces pastorianus
tgggtcatggttctcttggctgaca

SEQ ID NO: 65643 - DNA, 25 bp, Saccharomyces pastorianus
gaaggtgatacacgtcctcaagact

SEQ ID NO: 65644 - DNA, 25 bp, Saccharomyces pastorianus
gataaaccaggtgatcaaccggcga

SEQ ID NO: 65645 - DNA, 25 bp, Saccharomyces pastorianus
atcttggaaaagttgctaggagcat

SEQ ID NO: 65646 - DNA, 25 bp, Saccharomyces pastorianus
gcgtttctttgggtcatggttctct

SEQ ID NO: 65647 - DNA, 25 bp, Saccharomyces pastorianus
gatacacgtcctcaagactatgaaa

SEQ ID NO: 65648 - DNA, 25 bp, Saccharomyces pastorianus
accaggtgatcaaccggcgaagtca

SEQ ID NO: 65649 - DNA, 25 bp, Saccharomyces pastorianus
tcaaccggcgaagtcagtggtcagg

SEQ ID NO: 65650 - DNA, 25 bp, Saccharomyces pastorianus
agcattagggcgtttctttgggtca

SEQ ID NO: 65651 - DNA, 25 bp, Saccharomyces pastorianus
gctaggagcattagggcgtttcttt

SEQ ID NO: 65652 - DNA, 25 bp, Saccharomyces pastorianus
gtcagggaaggtgatacacgtcctc

SEQ ID NO: 65653 - DNA, 25 bp, Saccharomyces pastorianus
tgcttcgtcaccttcattgatccta

SEQ ID NO: 65654 - DNA, 25 bp, Saccharomyces pastorianus
ttggcagtcagtaacggcgcgtcaa

SEQ ID NO: 65655 - DNA, 25 bp, Saccharomyces pastorianus
gatgaacgtatcttcacggaaacca

SEQ ID NO: 65656 - DNA, 25 bp, Saccharomyces pastorianus
ttgttacaacaatcagcggtcgctg

SEQ ID NO: 65657 - DNA, 25 bp, Saccharomyces pastorianus
atatgtaacgcggttcgtggcggct

SEQ ID NO: 65658 - DNA, 25 bp, Saccharomyces pastorianus
ttcgtggcggcttattacagagtat

SEQ ID NO: 65659 - DNA, 25 bp, Saccharomyces pastorianus
caagtccaacccatatttcaaagat

SEQ ID NO: 65660 - DNA, 25 bp, Saccharomyces pastorianus
gtttatatctgagcgccttgttaca

SEQ ID NO: 65661 - DNA, 25 bp, Saccharomyces pastorianus
ggcaattgccacatcagccggaggc

SEQ ID NO: 65662 - DNA, 25 bp, Saccharomyces pastorianus
gaatgatcgctacgtgtgcttcgtc

SEQ ID NO: 65663 - DNA, 25 bp, Saccharomyces pastorianus
ttgattttgctagcgattccttaaa

SEQ ID NO: 65664 - DNA, 25 bp, Saccharomyces pastorianus
ataactaccgatggtgcgacaagaa

SEQ ID NO: 65665 - DNA, 25 bp, Saccharomyces pastorianus
gatgtgcgcattcatatcctttgtc

SEQ ID NO: 65666 - DNA, 25 bp, Saccharomyces pastorianus
attgtggctgcgagaataactaccg

SEQ ID NO: 65667 - DNA, 25 bp, Saccharomyces pastorianus
attttacttctgctccaaccagaac

SEQ ID NO: 65668 - DNA, 25 bp, Saccharomyces pastorianus
aacccgcattgatcctattgtggct

SEQ ID NO: 65669 - DNA, 25 bp, Saccharomyces pastorianus
tagatcatgttaggagcggtgtcgt

SEQ ID NO: 65670 - DNA, 25 bp, Saccharomyces pastorianus
ggtaatgtaccaccacatctgacag

SEQ ID NO: 65671 - DNA, 25 bp, Saccharomyces pastorianus
atacattggtcgtatgacagtcgaa

SEQ ID NO: 65672 - DNA, 25 bp, Saccharomyces pastorianus
gtgcagcactattgtttcattcgga

SEQ ID NO: 65673 - DNA, 25 bp, Saccharomyces pastorianus
gcaaatgctcccttgtcagtaaatt

SEQ ID NO: 65674 - DNA, 25 bp, Saccharomyces pastorianus
tcctttgtcgatgagagtgcagcac

SEQ ID NO: 65675 - DNA, 25 bp, Saccharomyces pastorianus
gcatcgagcacaagccacagcataa

SEQ ID NO: 65676 - DNA, 25 bp, Saccharomyces pastorianus
gttattaactctttacagccgacta

SEQ ID NO: 65677 - DNA, 25 bp, Saccharomyces pastorianus
taacggtctgcagaacacacgcaat

SEQ ID NO: 65678 - DNA, 25 bp, Saccharomyces pastorianus
aaattcaagcagtgttgtccaacat

SEQ ID NO: 65679 - DNA, 25 bp, Saccharomyces pastorianus
acgcaatctattgagaggccctatg

SEQ ID NO: 65680 - DNA, 25 bp, Saccharomyces pastorianus
gaagtttgatgacctttacccacac

SEQ ID NO: 65681 - DNA, 25 bp, Saccharomyces pastorianus
aacctacaatggctgggaacactaa

SEQ ID NO: 65682 - DNA, 25 bp, Saccharomyces pastorianus
gagtgactccatctttatggcggga

SEQ ID NO: 65683 - DNA, 25 bp, Saccharomyces pastorianus
attgccccatcagcgcgttattaac

SEQ ID NO: 65684 - DNA, 25 bp, Saccharomyces pastorianus
gttttataacccattagacgaggca

SEQ ID NO: 65685 - DNA, 25 bp, Saccharomyces pastorianus
acgatgggcaatcgattactccctc

SEQ ID NO: 65686 - DNA, 25 bp, Saccharomyces pastorianus
gatccggaaaacatttcttccaatg

SEQ ID NO: 65687 - DNA, 25 bp, Saccharomyces pastorianus
gtactttcgatgacctggatgatga

SEQ ID NO: 65688 - DNA, 25 bp, Saccharomyces pastorianus
atattgaaggcgctaatccattaga

SEQ ID NO: 65689 - DNA, 25 bp, Saccharomyces pastorianus
atgattctttcccagtccactggag

SEQ ID NO: 65690 - DNA, 25 bp, Saccharomyces pastorianus
tatgcacctgacatgattctttccc

SEQ ID NO: 65691 - DNA, 25 bp, Saccharomyces pastorianus
acgtaggtttgaggatttatcttct

SEQ ID NO: 65692 - DNA, 25 bp, Saccharomyces pastorianus
tctaaacaacgccaaccgctaaacg

SEQ ID NO: 65693 - DNA, 25 bp, Saccharomyces pastorianus
tccagaagatcgtttgaattcggat

SEQ ID NO: 65694 - DNA, 25 bp, Saccharomyces pastorianus
gcgacacaagttttatgtccttgag

SEQ ID NO: 65695 - DNA, 25 bp, Saccharomyces pastorianus
gtccactggagtagaacgtaggttt

SEQ ID NO: 65696 - DNA, 25 bp, Saccharomyces pastorianus
aattcggatggtactttcgatgacc

SEQ ID NO: 65697 - DNA, 25 bp, Saccharomyces pastorianus
acagttttttcagcgcccaattatt

SEQ ID NO: 65698 - DNA, 25 bp, Saccharomyces pastorianus
ggaatgtcctcgatttttgtgctaa

SEQ ID NO: 65699 - DNA, 25 bp, Saccharomyces pastorianus
ggtatttcgcctgatttacatgata

SEQ ID NO: 65700 - DNA, 25 bp, Saccharomyces pastorianus
ggagtgatccagatgcccaggtttc

SEQ ID NO: 65701 - DNA, 25 bp, Saccharomyces pastorianus
gtgtccatggaggtatttcgcctga

SEQ ID NO: 65702 - DNA, 25 bp, Saccharomyces pastorianus
ttagcagccattatccaagacaaga

SEQ ID NO: 65703 - DNA, 25 bp, Saccharomyces pastorianus
gttgcaaggccgactgatatacctg

SEQ ID NO: 65704 - DNA, 25 bp, Saccharomyces pastorianus
atgcccaggtttccgattggtcgga

SEQ ID NO: 65705 - DNA, 25 bp, Saccharomyces pastorianus
gacggttatgagttttttgccagga

SEQ ID NO: 65706 - DNA, 25 bp, Saccharomyces pastorianus
gatcgtggtgtttcgtatacctttt

SEQ ID NO: 65707 - DNA, 25 bp, Saccharomyces pastorianus
gtctttaacactttgcccttagcag

SEQ ID NO: 65708 - DNA, 25 bp, Saccharomyces pastorianus
agcaatgataacatgccgttccccg

SEQ ID NO: 65709 - DNA, 25 bp, Saccharomyces pastorianus
tgtttcagtgaccaaagctctttct

SEQ ID NO: 65710 - DNA, 25 bp, Saccharomyces pastorianus
taacaactccttcagatgagctcaa

SEQ ID NO: 65711 - DNA, 25 bp, Saccharomyces pastorianus
gcatccgccgcaaaaaacaacaaca

SEQ ID NO: 65712 - DNA, 25 bp, Saccharomyces pastorianus
gaagaagcccgtctaaatcaaacaa

SEQ ID NO: 65713 - DNA, 25 bp, Saccharomyces pastorianus
acaatcacagcactttagcatccgc

SEQ ID NO: 65714 - DNA, 25 bp, Saccharomyces pastorianus
gcactttagcatccgccgcaaaaaa

SEQ ID NO: 65715 - DNA, 25 bp, Saccharomyces pastorianus
tcaaacaacaacttcgcagtaccga

SEQ ID NO: 65716 - DNA, 25 bp, Saccharomyces pastorianus
gaaaatataacgagcttgtatctag

SEQ ID NO: 65717 - DNA, 25 bp, Saccharomyces pastorianus
tctagatttcgatgtttcagtgacc

SEQ ID NO: 65718 - DNA, 25 bp, Saccharomyces pastorianus
gttccccgggcagaatgctcataaa

SEQ ID NO: 65719 - DNA, 25 bp, Saccharomyces pastorianus
aacttttgggatccgttgctcatga

SEQ ID NO: 65720 - DNA, 25 bp, Saccharomyces pastorianus
ttatgccgaagagacatctgtttca

SEQ ID NO: 65721 - DNA, 25 bp, Saccharomyces pastorianus
tttcagatctcgtccaggcaacaaa

SEQ ID NO: 65722 - DNA, 25 bp, Saccharomyces pastorianus
ggatgtagcccaaaggacagttagt

SEQ ID NO: 65723 - DNA, 25 bp, Saccharomyces pastorianus
gaaagggcatttgggctaaacattt

SEQ ID NO: 65724 - DNA, 25 bp, Saccharomyces pastorianus
gtattccagaggtgctacccaatga

SEQ ID NO: 65725 - DNA, 25 bp, Saccharomyces pastorianus
gaggctgcatcctgcaatttactga

SEQ ID NO: 65726 - DNA, 25 bp, Saccharomyces pastorianus
ggcgatatatatttgcatgctagtt

SEQ ID NO: 65727 - DNA, 25 bp, Saccharomyces pastorianus
acaccgatatttcttctacttcttc

SEQ ID NO: 65728 - DNA, 25 bp, Saccharomyces pastorianus
ctttggacacatcttcttttcacga

SEQ ID NO: 65729 - DNA, 25 bp, Saccharomyces pastorianus
attgatatagctcccaaatggccga

SEQ ID NO: 65730 - DNA, 25 bp, Saccharomyces pastorianus
gaacgcggagtacacgtttatgttg

SEQ ID NO: 65731 - DNA, 25 bp, Saccharomyces pastorianus
caccggacgtccaatcgcgcttgaa

SEQ ID NO: 65732 - DNA, 25 bp, Saccharomyces pastorianus
ggaactacgaagtcgccataaaggg

SEQ ID NO: 65733 - DNA, 25 bp, Saccharomyces pastorianus
aaccaagttgaacgcggagtacacg

SEQ ID NO: 65734 - DNA, 25 bp, Saccharomyces pastorianus
aatggtcatggcacccactctacaa

SEQ ID NO: 65735 - DNA, 25 bp, Saccharomyces pastorianus
aactcgagctgctaaacaagttgca

SEQ ID NO: 65736 - DNA, 25 bp, Saccharomyces pastorianus
gagcaaagcaactggaactacgaag

SEQ ID NO: 65737 - DNA, 25 bp, Saccharomyces pastorianus
gctgctaaacaagttgcatctgcaa

SEQ ID NO: 65738 - DNA, 25 bp, Saccharomyces pastorianus
gggaatgaacatgcccggcgtgccc

SEQ ID NO: 65739 - DNA, 25 bp, Saccharomyces pastorianus
aatcgcgcttgaaccccgtacaact

SEQ ID NO: 65740 - DNA, 25 bp, Saccharomyces pastorianus
gttgcatctgcaaaccaagttgaac

SEQ ID NO: 65741 - DNA, 25 bp, Saccharomyces pastorianus
ccatgttcacgcaatatctccaaag

SEQ ID NO: 65742 - DNA, 25 bp, Saccharomyces pastorianus
gatcagctatcctcaaatcaacggg

SEQ ID NO: 65743 - DNA, 25 bp, Saccharomyces pastorianus
gcatagtgtctattcgttaccaatg

SEQ ID NO: 65744 - DNA, 25 bp, Saccharomyces pastorianus
gactattccccaagttagtggtgct

SEQ ID NO: 65745 - DNA, 25 bp, Saccharomyces pastorianus
gggttcatcattactttacacggtt

SEQ ID NO: 65746 - DNA, 25 bp, Saccharomyces pastorianus
gtatccagtgagaaatccatccagc

SEQ ID NO: 65747 - DNA, 25 bp, Saccharomyces pastorianus
acaatcccaattttctgtctccgtg

SEQ ID NO: 65748 - DNA, 25 bp, Saccharomyces pastorianus
gtagcagactctgatcaaaccccgt

SEQ ID NO: 65749 - DNA, 25 bp, Saccharomyces pastorianus
agtcgtccacggattttgcaaccaa

SEQ ID NO: 65750 - DNA, 25 bp, Saccharomyces pastorianus
taaccccatcactaccgataagttg

SEQ ID NO: 65751 - DNA, 25 bp, Saccharomyces pastorianus
ggccaagagtccatcaacaacatat

SEQ ID NO: 65752 - DNA, 25 bp, Saccharomyces pastorianus
ggttctgctggaacttcagacacta

SEQ ID NO: 65753 - DNA, 25 bp, Saccharomyces pastorianus
tcgagtagctgtgcttgacgcccat

SEQ ID NO: 65754 - DNA, 25 bp, Saccharomyces pastorianus
accattggttgtcggttttgtgaat

SEQ ID NO: 65755 - DNA, 25 bp, Saccharomyces pastorianus
aagaggtatgatccccagtcgaaac

SEQ ID NO: 65756 - DNA, 25 bp, Saccharomyces pastorianus
atggcaatggaggttctgctggaac

SEQ ID NO: 65757 - DNA, 25 bp, Saccharomyces pastorianus
cataagcaggaacgctcgagtagct

SEQ ID NO: 65758 - DNA, 25 bp, Saccharomyces pastorianus
tcagacactatttcgtttctaaggg

SEQ ID NO: 65759 - DNA, 25 bp, Saccharomyces pastorianus
aaggctgaagccgaatcgttaatga

SEQ ID NO: 65760 - DNA, 25 bp, Saccharomyces pastorianus
aacggtgtccgttttgcaggtagca

SEQ ID NO: 65761 - DNA, 25 bp, Saccharomyces pastorianus
aaatttgagcttttggatggcaatg

SEQ ID NO: 65762 - DNA, 25 bp, Saccharomyces pastorianus
ttgacgcccatgtggacggaccatt

SEQ ID NO: 65763 - DNA, 25 bp, Saccharomyces pastorianus
cacagacttattcggcgtcatcaac

SEQ ID NO: 65764 - DNA, 25 bp, Saccharomyces pastorianus
taaaaggccgtctactgctcgcaag

SEQ ID NO: 65765 - DNA, 25 bp, Saccharomyces pastorianus
gaatccgtaccgttgacagcaggaa

SEQ ID NO: 65766 - DNA, 25 bp, Saccharomyces pastorianus
gttttccaaagtagcgatccattat

SEQ ID NO: 65767 - DNA, 25 bp, Saccharomyces pastorianus
tatttaagaggagacccagccgccc

SEQ ID NO: 65768 - DNA, 25 bp, Saccharomyces pastorianus
aatggagcgctgattctttctctga

SEQ ID NO: 65769 - DNA, 25 bp, Saccharomyces pastorianus
aaggacatcactgtgtctgccgaat

SEQ ID NO: 65770 - DNA, 25 bp, Saccharomyces pastorianus
agccgcccattaaagcacttagcaa

SEQ ID NO: 65771 - DNA, 25 bp, Saccharomyces pastorianus
ggtttcttcaacatcaacttcacag

SEQ ID NO: 65772 - DNA, 25 bp, Saccharomyces pastorianus
ggagtaggctactgttgcattcatt

SEQ ID NO: 65773 - DNA, 25 bp, Saccharomyces pastorianus
gccgaatttgactatggtttcttca

SEQ ID NO: 65774 - DNA, 25 bp, Saccharomyces pastorianus
agtatatcaatctgccgtaggtaaa

SEQ ID NO: 65775 - DNA, 25 bp, Saccharomyces pastorianus
atatgtctcgagtatttgattcaaa

SEQ ID NO: 65776 - DNA, 25 bp, Saccharomyces pastorianus
gtgtactatatatatctccactact

SEQ ID NO: 65777 - DNA, 25 bp, Saccharomyces pastorianus
gattcaaagatcctcaaatcgggac

SEQ ID NO: 65778 - DNA, 25 bp, Saccharomyces pastorianus
gcgctggataagatttgtatcgcat

SEQ ID NO: 65779 - DNA, 25 bp, Saccharomyces pastorianus
aagccttcaaacatgcagtatatca

SEQ ID NO: 65780 - DNA, 25 bp, Saccharomyces pastorianus
aatcgggacgtatcaaagccttcaa

SEQ ID NO: 65781 - DNA, 25 bp, Saccharomyces pastorianus
tatcgcatgcaaaaggtggtggtac

SEQ ID NO: 65782 - DNA, 25 bp, Saccharomyces pastorianus
gccgtaggtaaaggcaaagctaact

SEQ ID NO: 65783 - DNA, 25 bp, Saccharomyces pastorianus
gtacgaaaattgcagaccataatat

SEQ ID NO: 65784 - DNA, 25 bp, Saccharomyces pastorianus
tctggagtagatgtgcgctggataa

SEQ ID NO: 65785 - DNA, 25 bp, Saccharomyces pastorianus
gagctaactcaagtacgtccatcgc

SEQ ID NO: 65786 - DNA, 25 bp, Saccharomyces pastorianus
acatgcacatatcgctacactttgg

SEQ ID NO: 65787 - DNA, 25 bp, Saccharomyces pastorianus
gagagtgaccatatcgccagtgaat

SEQ ID NO: 65788 - DNA, 25 bp, Saccharomyces pastorianus
ataggaacctctttaacgtgctgta

SEQ ID NO: 65789 - DNA, 25 bp, Saccharomyces pastorianus
agtttcacaacatcatcgcttctaa

SEQ ID NO: 65790 - DNA, 25 bp, Saccharomyces pastorianus
taaaacgttggtgcctccccttgat

SEQ ID NO: 65791 - DNA, 25 bp, Saccharomyces pastorianus
gagcgtgtaccatacctggttgtta

SEQ ID NO: 65792 - DNA, 25 bp, Saccharomyces pastorianus
aaatcctatgactgcccgatattct

SEQ ID NO: 65793 - DNA, 25 bp, Saccharomyces pastorianus
gtgtatcgcccgaagagttctttga

SEQ ID NO: 65794 - DNA, 25 bp, Saccharomyces pastorianus
ccgatattctattcccgtgtcaaaa

SEQ ID NO: 65795 - DNA, 25 bp, Saccharomyces pastorianus
ctccccttgataggctgttcaattt

SEQ ID NO: 65796 - DNA, 25 bp, Saccharomyces pastorianus
gattctctgacacatttgacgcttg

SEQ ID NO: 65797 - DNA, 25 bp, Saccharomyces pastorianus
gtgtgttggcaacattccagtcatg

SEQ ID NO: 65798 - DNA, 25 bp, Saccharomyces pastorianus
gaaagccacctagatttgatgaagt

SEQ ID NO: 65799 - DNA, 25 bp, Saccharomyces pastorianus
aaatgttcgaagcactgaccgattt

SEQ ID NO: 65800 - DNA, 25 bp, Saccharomyces pastorianus
gatagatttgcagacacctcataat

SEQ ID NO: 65801 - DNA, 25 bp, Saccharomyces pastorianus
tggatagtaatttccccactcaaat

SEQ ID NO: 65802 - DNA, 25 bp, Saccharomyces pastorianus
attgttgaagagcttgcccgagtta

SEQ ID NO: 65803 - DNA, 25 bp, Saccharomyces pastorianus
aagaacacggatctacagcaacgaa

SEQ ID NO: 65804 - DNA, 25 bp, Saccharomyces pastorianus
gatcctgacattctatcgggttttg

SEQ ID NO: 65805 - DNA, 25 bp, Saccharomyces pastorianus
aaatttgctagtgatgcctccgtca

SEQ ID NO: 65806 - DNA, 25 bp, Saccharomyces pastorianus
cgcttgaaatccacgttaacaccag

SEQ ID NO: 65807 - DNA, 25 bp, Saccharomyces pastorianus
ataacggaaagttcattgcgggtat

SEQ ID NO: 65808 - DNA, 25 bp, Saccharomyces pastorianus
gcgaggcaaatgatgccagccccat

SEQ ID NO: 65809 - DNA, 25 bp, Saccharomyces pastorianus
ggcccatcggaacagctatcaattt

SEQ ID NO: 65810 - DNA, 25 bp, Saccharomyces pastorianus
caaaggtaccgaatatttgacacca

SEQ ID NO: 65811 - DNA, 25 bp, Saccharomyces pastorianus
aaccgttatgggacacgatcttcaa

SEQ ID NO: 65812 - DNA, 25 bp, Saccharomyces pastorianus
aaatttcaaaatccaggcccatcgg

SEQ ID NO: 65813 - DNA, 25 bp, Saccharomyces pastorianus
atgccagccccatcgaaaatatact

SEQ ID NO: 65814 - DNA, 25 bp, Saccharomyces pastorianus
ttcagatttatttcacattaccaaa

SEQ ID NO: 65815 - DNA, 25 bp, Saccharomyces pastorianus
gatgctagaaactatactttcgttc

SEQ ID NO: 65816 - DNA, 25 bp, Saccharomyces pastorianus
caaaggtagcgaaagctgtttcaat

SEQ ID NO: 65817 - DNA, 25 bp, Saccharomyces pastorianus
tctaccgaagtgtgaaaccgttatg

SEQ ID NO: 65818 - DNA, 25 bp, Saccharomyces pastorianus
aagacttgtatcgtgtgctggaaac

SEQ ID NO: 65819 - DNA, 25 bp, Saccharomyces pastorianus
aagccgacgctgatgctctgatgaa

SEQ ID NO: 65820 - DNA, 25 bp, Saccharomyces pastorianus
gcatcattagactgtttggcaccga

SEQ ID NO: 65821 - DNA, 25 bp, Saccharomyces pastorianus
gaagcgctcgtagccagtaccgaag

SEQ ID NO: 65822 - DNA, 25 bp, Saccharomyces pastorianus
ggagcagcctttgtgcatcgaaacc

SEQ ID NO: 65823 - DNA, 25 bp, Saccharomyces pastorianus
tgatgaaactcgtatcctttggtga

SEQ ID NO: 65824 - DNA, 25 bp, Saccharomyces pastorianus
agttcaacagaacctcgctaatgag

SEQ ID NO: 65825 - DNA, 25 bp, Saccharomyces pastorianus
gttacactttggctgcatctttgat

SEQ ID NO: 65826 - DNA, 25 bp, Saccharomyces pastorianus
gtgagctcttaaagttccactacaa

SEQ ID NO: 65827 - DNA, 25 bp, Saccharomyces pastorianus
caaccttgcattggtattggaccta

SEQ ID NO: 65828 - DNA, 25 bp, Saccharomyces pastorianus
tagcgatttgttctttttgagtcag

SEQ ID NO: 65829 - DNA, 25 bp, Saccharomyces pastorianus
aagaatcatgctccgggtgcagatt

SEQ ID NO: 65830 - DNA, 25 bp, Saccharomyces pastorianus
agcgaaagtgtctccaatgatgtga

SEQ ID NO: 65831 - DNA, 25 bp, Saccharomyces pastorianus
ggcaattcctcccaaatacttgatg

SEQ ID NO: 65832 - DNA, 25 bp, Saccharomyces pastorianus
gccatgttaaactctgcctattcta

SEQ ID NO: 65833 - DNA, 25 bp, Saccharomyces pastorianus
agtgtttcctcatctgactatgacc

SEQ ID NO: 65834 - DNA, 25 bp, Saccharomyces pastorianus
atctatgaagatctcgtcgactccc

SEQ ID NO: 65835 - DNA, 25 bp, Saccharomyces pastorianus
gattgcgcgtctacaggattctaaa

SEQ ID NO: 65836 - DNA, 25 bp, Saccharomyces pastorianus
aagccattcagatcacgcggatgca

SEQ ID NO: 65837 - DNA, 25 bp, Saccharomyces pastorianus
atatcaggcggatggcaattcctcc

SEQ ID NO: 65838 - DNA, 25 bp, Saccharomyces pastorianus
tactttgagatcaccattcgccatg

SEQ ID NO: 65839 - DNA, 25 bp, Saccharomyces pastorianus
cgtcgactccctcttaattgaatat

SEQ ID NO: 65840 - DNA, 25 bp, Saccharomyces pastorianus
aatgtaaccggctcagtatcgtcag

SEQ ID NO: 65841 - DNA, 25 bp, Saccharomyces pastorianus
cgactattttgcttcccatgatgta

SEQ ID NO: 65842 - DNA, 25 bp, Saccharomyces pastorianus
gaagacgccacctctcaaattttat

SEQ ID NO: 65843 - DNA, 25 bp, Saccharomyces pastorianus
gagaacgtttcctacaacatcgcat

SEQ ID NO: 65844 - DNA, 25 bp, Saccharomyces pastorianus
aaattctggctactcctctaatgga

SEQ ID NO: 65845 - DNA, 25 bp, Saccharomyces pastorianus
ttgctaatatctccgacaacaccac

SEQ ID NO: 65846 - DNA, 25 bp, Saccharomyces pastorianus
tttccagaccattccaactgcagag

SEQ ID NO: 65847 - DNA, 25 bp, Saccharomyces pastorianus
cagattgacatcctcagactctaac

SEQ ID NO: 65848 - DNA, 25 bp, Saccharomyces pastorianus
tttatctgactatacatccgcatcc

SEQ ID NO: 65849 - DNA, 25 bp, Saccharomyces pastorianus
accacatcatctccacgaattattg

SEQ ID NO: 65850 - DNA, 25 bp, Saccharomyces pastorianus
aacatcgcatcgtcatcggcatcat

SEQ ID NO: 65851 - DNA, 25 bp, Saccharomyces pastorianus
gattcagatggtaatcgccaacgca

SEQ ID NO: 65852 - DNA, 25 bp, Saccharomyces pastorianus
gaagaccataatgttctcgataaga

SEQ ID NO: 65853 - DNA, 25 bp, Saccharomyces pastorianus
ggtgatgacgagtatgccattcata

SEQ ID NO: 65854 - DNA, 25 bp, Saccharomyces pastorianus
cattcaggaagtgagctcatcggaa

SEQ ID NO: 65855 - DNA, 25 bp, Saccharomyces pastorianus
aatacagtcttccaataccgattcc

SEQ ID NO: 65856 - DNA, 25 bp, Saccharomyces pastorianus
tccaataccgattccatcattcagg

SEQ ID NO: 65857 - DNA, 25 bp, Saccharomyces pastorianus
aaccgccaggcgttcatctaaaaga

SEQ ID NO: 65858 - DNA, 25 bp, Saccharomyces pastorianus
atctcgtcatggtaaaaccgccagg

SEQ ID NO: 65859 - DNA, 25 bp, Saccharomyces pastorianus
gccaacgcatatctccaatggtgga

SEQ ID NO: 65860 - DNA, 25 bp, Saccharomyces pastorianus
atatcacaacagcttctccagctat

SEQ ID NO: 65861 - DNA, 25 bp, Saccharomyces pastorianus
aagggcatatgcgacatctcgtcat

SEQ ID NO: 65862 - DNA, 25 bp, Saccharomyces pastorianus
aaatggctcctcgaagggtatcatg

SEQ ID NO: 65863 - DNA, 25 bp, Saccharomyces pastorianus
gtaatccccatcttaagtagcagta

SEQ ID NO: 65864 - DNA, 25 bp, Saccharomyces pastorianus
gttatgtgatcgtagcccaaggaat

SEQ ID NO: 65865 - DNA, 25 bp, Saccharomyces pastorianus
acaaccaactatccgcatggctgga

SEQ ID NO: 65866 - DNA, 25 bp, Saccharomyces pastorianus
atggctggagtcaatcccacactga

SEQ ID NO: 65867 - DNA, 25 bp, Saccharomyces pastorianus
agataagcccatcaagaccgcggca

SEQ ID NO: 65868 - DNA, 25 bp, Saccharomyces pastorianus
gaaattccttgggacactgcactgc

SEQ ID NO: 65869 - DNA, 25 bp, Saccharomyces pastorianus
ttgcaagcaacgctacttttgccac

SEQ ID NO: 65870 - DNA, 25 bp, Saccharomyces pastorianus
gaccgcggcatgttccgattattat

SEQ ID NO: 65871 - DNA, 25 bp, Saccharomyces pastorianus
actgcactgcttgatttgtacctca

SEQ ID NO: 65872 - DNA, 25 bp, Saccharomyces pastorianus
gggtatcatgtctttgtcggtaaac

SEQ ID NO: 65873 - DNA, 25 bp, Saccharomyces pastorianus
aatttgccagccaagactttcggtg

SEQ ID NO: 65874 - DNA, 25 bp, Saccharomyces pastorianus
cccacggtaactctggtgttgttag

SEQ ID NO: 65875 - DNA, 25 bp, Saccharomyces pastorianus
ttagagctaccttcagaaacaattt

SEQ ID NO: 65876 - DNA, 25 bp, Saccharomyces pastorianus
cggtaactctggtgttgttagagct

SEQ ID NO: 65877 - DNA, 25 bp, Saccharomyces pastorianus
gttagagctaccttcagaaacaatt

SEQ ID NO: 65878 - DNA, 25 bp, Saccharomyces pastorianus
gaaacaatttgccagccaagacttt

SEQ ID NO: 65879 - DNA, 25 bp, Saccharomyces pastorianus
tgtggggtaaggtcaccagaaccca

SEQ ID NO: 65880 - DNA, 25 bp, Saccharomyces pastorianus
tagagctaccttcagaaacaatttg

SEQ ID NO: 65881 - DNA, 25 bp, Saccharomyces pastorianus
agaacccacggtaactctggtgttg

SEQ ID NO: 65882 - DNA, 25 bp, Saccharomyces pastorianus
tgttagagctaccttcagaaacaat

SEQ ID NO: 65883 - DNA, 25 bp, Saccharomyces pastorianus
gccagccaagactttcggtgcttct

SEQ ID NO: 65884 - DNA, 25 bp, Saccharomyces pastorianus
gaaaacgatgttaaagaggatactt

SEQ ID NO: 65885 - DNA, 25 bp, Saccharomyces pastorianus
tagtcttttctattctcaaaatgta

SEQ ID NO: 65886 - DNA, 25 bp, Saccharomyces pastorianus
gcgcccaaaaatgtgaatatgccaa

SEQ ID NO: 65887 - DNA, 25 bp, Saccharomyces pastorianus
attagtcttttctattctcaaaatg

SEQ ID NO: 65888 - DNA, 25 bp, Saccharomyces pastorianus
atatattagtcttttctattctcaa

SEQ ID NO: 65889 - DNA, 25 bp, Saccharomyces pastorianus
gcccaaaaatgtgaatatgccaaat

SEQ ID NO: 65890 - DNA, 25 bp, Saccharomyces pastorianus
tataataggttctattaccttttat

SEQ ID NO: 65891 - DNA, 25 bp, Saccharomyces pastorianus
atatgccaaatataataggttctat

SEQ ID NO: 65892 - DNA, 25 bp, Saccharomyces pastorianus
gaggatacttatacaattaacaaat

SEQ ID NO: 65893 - DNA, 25 bp, Saccharomyces pastorianus
attgcgcccaaaaatgtgaatatgc

SEQ ID NO: 65894 - DNA, 25 bp, Saccharomyces pastorianus
gtcttttctattctcaaaatgtaat

SEQ ID NO: 65895 - DNA, 25 bp, Saccharomyces pastorianus
gacgatactcatatcaacccgagaa

SEQ ID NO: 65896 - DNA, 25 bp, Saccharomyces pastorianus
acaggttaatctttccttagagaga

SEQ ID NO: 65897 - DNA, 25 bp, Saccharomyces pastorianus
ctgtcagaactgagagggcctccat

SEQ ID NO: 65898 - DNA, 25 bp, Saccharomyces pastorianus
gagaacttcatcgacgaccacgtca

SEQ ID NO: 65899 - DNA, 25 bp, Saccharomyces pastorianus
tcaatccctacaaacaatcgctcaa

SEQ ID NO: 65900 - DNA, 25 bp, Saccharomyces pastorianus
aaggtaccggagtcagctgttgcac

SEQ ID NO: 65901 - DNA, 25 bp, Saccharomyces pastorianus
gacgaccacgtcaaatgtaccaaca

SEQ ID NO: 65902 - DNA, 25 bp, Saccharomyces pastorianus
gagagatcgctaaatgaccaggtta

SEQ ID NO: 65903 - DNA, 25 bp, Saccharomyces pastorianus
atatcatgcgatacagtcactgagg

SEQ ID NO: 65904 - DNA, 25 bp, Saccharomyces pastorianus
gagggcctccataatggtgtctgag

SEQ ID NO: 65905 - DNA, 25 bp, Saccharomyces pastorianus
tttagacacgacaaaggcgggcaat

SEQ ID NO: 65906 - DNA, 25 bp, Saccharomyces pastorianus
gataccatatcaaacgactacaaga

SEQ ID NO: 65907 - DNA, 25 bp, Saccharomyces pastorianus
acatcctaggatccacgttgggaga

SEQ ID NO: 65908 - DNA, 25 bp, Saccharomyces pastorianus
ctacctcagcttttgatttcccaaa

SEQ ID NO: 65909 - DNA, 25 bp, Saccharomyces pastorianus
tatacgcagcgaacggatgaacaaa

SEQ ID NO: 65910 - DNA, 25 bp, Saccharomyces pastorianus
gacccgtcgagcacatttcaatata

SEQ ID NO: 65911 - DNA, 25 bp, Saccharomyces pastorianus
gagcacatttcaatatacgcagcga

SEQ ID NO: 65912 - DNA, 25 bp, Saccharomyces pastorianus
aacaattctacctcagcttttgatt

SEQ ID NO: 65913 - DNA, 25 bp, Saccharomyces pastorianus
tttggtccttacatcctaggatcca

SEQ ID NO: 65914 - DNA, 25 bp, Saccharomyces pastorianus
gggattacgagcgacccgtcgagca

SEQ ID NO: 65915 - DNA, 25 bp, Saccharomyces pastorianus
aacaagtagccgttaagcttatcaa

SEQ ID NO: 65916 - DNA, 25 bp, Saccharomyces pastorianus
agccgttaagcttatcaaacgtgat

SEQ ID NO: 65917 - DNA, 25 bp, Saccharomyces pastorianus
gaataatgttgaagaaggcgagttt

SEQ ID NO: 65918 - DNA, 25 bp, Saccharomyces pastorianus
aatgttgaagaaggcgagtttataa

SEQ ID NO: 65919 - DNA, 25 bp, Saccharomyces pastorianus
gtcactgacaataaaacacctgaga

SEQ ID NO: 65920 - DNA, 25 bp, Saccharomyces pastorianus
tggtcactgacaataaaacacctga

SEQ ID NO: 65921 - DNA, 25 bp, Saccharomyces pastorianus
tgacaataaaacacctgagatgaac

SEQ ID NO: 65922 - DNA, 25 bp, Saccharomyces pastorianus
cactgacaataaaacacctgagatg

SEQ ID NO: 65923 - DNA, 25 bp, Saccharomyces pastorianus
gaaggcgagtttataatcgatttgt

SEQ ID NO: 65924 - DNA, 25 bp, Saccharomyces pastorianus
aacacctgagatgaacgtgacgaat

SEQ ID NO: 65925 - DNA, 25 bp, Saccharomyces pastorianus
cgatttgtatagtttacctgaagga

SEQ ID NO: 65926 - DNA, 25 bp, Saccharomyces pastorianus
gaagaaggcgagtttataatcgatt

SEQ ID NO: 65927 - DNA, 25 bp, Saccharomyces pastorianus
ggcgagtttataatcgatttgtata

SEQ ID NO: 65928 - DNA, 25 bp, Saccharomyces pastorianus
taaaccgctccctgactatttgata

SEQ ID NO: 65929 - DNA, 25 bp, Saccharomyces pastorianus
gattctggatttatacggtcctggt

SEQ ID NO: 65930 - DNA, 25 bp, Saccharomyces pastorianus
tcgcaatctccaaactcatctagta

SEQ ID NO: 65931 - DNA, 25 bp, Saccharomyces pastorianus
agtctcaccgggatgattctcatgg

SEQ ID NO: 65932 - DNA, 25 bp, Saccharomyces pastorianus
tcatcttcaggtgcttctgctaata

SEQ ID NO: 65933 - DNA, 25 bp, Saccharomyces pastorianus
atgccgtctaatgggcttttcggaa

SEQ ID NO: 65934 - DNA, 25 bp, Saccharomyces pastorianus
acaatctatcgtggatgctgccgtt

SEQ ID NO: 65935 - DNA, 25 bp, Saccharomyces pastorianus
gaagtcggtccatcatggtccaaga

SEQ ID NO: 65936 - DNA, 25 bp, Saccharomyces pastorianus
gaacaaaatttatctcaacgcccct

SEQ ID NO: 65937 - DNA, 25 bp, Saccharomyces pastorianus
gaataatagcggctcaggccccagc

SEQ ID NO: 65938 - DNA, 25 bp, Saccharomyces pastorianus
tgaagagtggtaaaccgctccctga

SEQ ID NO: 65939 - DNA, 25 bp, Saccharomyces pastorianus
ttaattttcccatctaacctagccg

SEQ ID NO: 65940 - DNA, 25 bp, Saccharomyces pastorianus
acacaggcctatattgccgggttga

SEQ ID NO: 65941 - DNA, 25 bp, Saccharomyces pastorianus
atcactgaactgtctcaactacgga

SEQ ID NO: 65942 - DNA, 25 bp, Saccharomyces pastorianus
aacgctggtcaagcttttcaagcag

SEQ ID NO: 65943 - DNA, 25 bp, Saccharomyces pastorianus
aagaggccacgaggctttcatcatc

SEQ ID NO: 65944 - DNA, 25 bp, Saccharomyces pastorianus
gctgcagtcgattttccttgatatt

SEQ ID NO: 65945 - DNA, 25 bp, Saccharomyces pastorianus
tcagaaaggccaacctgctgacttt

SEQ ID NO: 65946 - DNA, 25 bp, Saccharomyces pastorianus
aactacggattcgagctgctgcagt

SEQ ID NO: 65947 - DNA, 25 bp, Saccharomyces pastorianus
ctgactttcctgttgacatcactga

SEQ ID NO: 65948 - DNA, 25 bp, Saccharomyces pastorianus
aacctagccgatattctcgtgcgaa

SEQ ID NO: 65949 - DNA, 25 bp, Saccharomyces pastorianus
catcctttacctcgatctgaaaaca

SEQ ID NO: 65950 - DNA, 25 bp, Saccharomyces pastorianus
agtcaatgactttaagccccgcaaa

SEQ ID NO: 65951 - DNA, 25 bp, Saccharomyces pastorianus
acatcagacagtcctggcggttggt

SEQ ID NO: 65952 - DNA, 25 bp, Saccharomyces pastorianus
tcgtccttttcttctcaaacacgtt

SEQ ID NO: 65953 - DNA, 25 bp, Saccharomyces pastorianus
gaaatcaacgctgcattaggccaat

SEQ ID NO: 65954 - DNA, 25 bp, Saccharomyces pastorianus
aataatgatgcttccatcctggaat

SEQ ID NO: 65955 - DNA, 25 bp, Saccharomyces pastorianus
ttaatccttttgttggccactataa

SEQ ID NO: 65956 - DNA, 25 bp, Saccharomyces pastorianus
aactgcgtggtagcaacccgaatct

SEQ ID NO: 65957 - DNA, 25 bp, Saccharomyces pastorianus
agctttctacaatagcgtcgtcctt

SEQ ID NO: 65958 - DNA, 25 bp, Saccharomyces pastorianus
ggcggttggttaattctacctgtct

SEQ ID NO: 65959 - DNA, 25 bp, Saccharomyces pastorianus
taatgggctatctgttaaactgcgt

SEQ ID NO: 65960 - DNA, 25 bp, Saccharomyces pastorianus
cctggaattgccctacatgatgaat

SEQ ID NO: 65961 - DNA, 25 bp, Saccharomyces pastorianus
gacgccggtttcctcatttttgaag

SEQ ID NO: 65962 - DNA, 25 bp, Saccharomyces pastorianus
tagtaattcctgcttgacgccggtt

SEQ ID NO: 65963 - DNA, 25 bp, Saccharomyces pastorianus
gtttcaagatcatgtcggctaccgt

SEQ ID NO: 65964 - DNA, 25 bp, Saccharomyces pastorianus
atttttgaagacgtccagcccacaa

SEQ ID NO: 65965 - DNA, 25 bp, Saccharomyces pastorianus
tggacattctccaacgtaataagcg

SEQ ID NO: 65966 - DNA, 25 bp, Saccharomyces pastorianus
ccacaacttgtcactttaccagatt

SEQ ID NO: 65967 - DNA, 25 bp, Saccharomyces pastorianus
tcaggtcagcatttttccaagtgtc

SEQ ID NO: 65968 - DNA, 25 bp, Saccharomyces pastorianus
ggctaccgtgctaccgatatgtggt

SEQ ID NO: 65969 - DNA, 25 bp, Saccharomyces pastorianus
tacacatcgccaaagttttacggtt

SEQ ID NO: 65970 - DNA, 25 bp, Saccharomyces pastorianus
atatgtggtagtgccgtgacatccc

SEQ ID NO: 65971 - DNA, 25 bp, Saccharomyces pastorianus
gtgacatcccatctacgtagtaatt

SEQ ID NO: 65972 - DNA, 25 bp, Saccharomyces pastorianus
atagcgctattcaatgcactggcaa

SEQ ID NO: 65973 - DNA, 25 bp, Saccharomyces pastorianus
ttctttccagattacgcacgcgtta

SEQ ID NO: 65974 - DNA, 25 bp, Saccharomyces pastorianus
aatgtcataatcaggttcgtcaaga

SEQ ID NO: 65975 - DNA, 25 bp, Saccharomyces pastorianus
gcagatttgcatcccgggaatgtca

SEQ ID NO: 65976 - DNA, 25 bp, Saccharomyces pastorianus
aaggtcagcgatccctttgttgacg

SEQ ID NO: 65977 - DNA, 25 bp, Saccharomyces pastorianus
agaactccagaaacggccattgata

SEQ ID NO: 65978 - DNA, 25 bp, Saccharomyces pastorianus
ttttaacgaattacacgccccagat

SEQ ID NO: 65979 - DNA, 25 bp, Saccharomyces pastorianus
acgccccagatttgctttatcgata

SEQ ID NO: 65980 - DNA, 25 bp, Saccharomyces pastorianus
accatttcttcccttatcaaacaga

SEQ ID NO: 65981 - DNA, 25 bp, Saccharomyces pastorianus
tatcttctgaacatgattctttcca

SEQ ID NO: 65982 - DNA, 25 bp, Saccharomyces pastorianus
acgggacaaacattatatcttctga

SEQ ID NO: 65983 - DNA, 25 bp, Saccharomyces pastorianus
taagcaccagcgacaagtactcagt

SEQ ID NO: 65984 - DNA, 25 bp, Saccharomyces pastorianus
gcaagtatgagcaatgtctggacct

SEQ ID NO: 65985 - DNA, 25 bp, Saccharomyces pastorianus
tggattctgccaccgtttctactac

SEQ ID NO: 65986 - DNA, 25 bp, Saccharomyces pastorianus
ggtaaccaagcccatctctttagat

SEQ ID NO: 65987 - DNA, 25 bp, Saccharomyces pastorianus
aagccccatggcgtgaaggaccaat

SEQ ID NO: 65988 - DNA, 25 bp, Saccharomyces pastorianus
gacaaagtggatcctctgacccaga

SEQ ID NO: 65989 - DNA, 25 bp, Saccharomyces pastorianus
gcagcagttgcaacactatttccaa

SEQ ID NO: 65990 - DNA, 25 bp, Saccharomyces pastorianus
tggacctcagcagctacttgttggg

SEQ ID NO: 65991 - DNA, 25 bp, Saccharomyces pastorianus
gtatgacgtctccaataagcaccag

SEQ ID NO: 65992 - DNA, 25 bp, Saccharomyces pastorianus
gaaaagggccctgtacggacagata

SEQ ID NO: 65993 - DNA, 25 bp, Saccharomyces pastorianus
gaaaaccacagtaggaagccccatg

SEQ ID NO: 65994 - DNA, 25 bp, Saccharomyces pastorianus
tagcttctctaggtaacgttatcag

SEQ ID NO: 65995 - DNA, 25 bp, Saccharomyces pastorianus
gaatcctctcaaatggctgctttgg

SEQ ID NO: 65996 - DNA, 25 bp, Saccharomyces pastorianus
cccatctggcttacacactattgaa

SEQ ID NO: 65997 - DNA, 25 bp, Saccharomyces pastorianus
gaagaggctgttccattagcagaag

SEQ ID NO: 65998 - DNA, 25 bp, Saccharomyces pastorianus
gaatacatttacaccttgcgtggta

SEQ ID NO: 65999 - DNA, 25 bp, Saccharomyces pastorianus
gtctattatcgaacacacttttggt

SEQ ID NO: 66000 - DNA, 25 bp, Saccharomyces pastorianus
tgaagaatactctacctttgcctct

SEQ ID NO: 66001 - DNA, 25 bp, Saccharomyces pastorianus
gaagaagcctactcaatcgaagata

SEQ ID NO: 66002 - DNA, 25 bp, Saccharomyces pastorianus
ggtttcgattccatcaaggccaaat

SEQ ID NO: 66003 - DNA, 25 bp, Saccharomyces pastorianus
ctacctttgcctctgatgctgaaaa

SEQ ID NO: 66004 - DNA, 25 bp, Saccharomyces pastorianus
gctccagaagatgccgaaccagaat

SEQ ID NO: 66005 - DNA, 25 bp, Saccharomyces pastorianus
ttaaactcaggcgttcaacccgaca

SEQ ID NO: 66006 - DNA, 25 bp, Saccharomyces pastorianus
tgatttcatttcaaggacgccttcc

SEQ ID NO: 66007 - DNA, 25 bp, Saccharomyces pastorianus
tatcccggtaatgcttcggtttcta

SEQ ID NO: 66008 - DNA, 25 bp, Saccharomyces pastorianus
gcggccaattcgtcaaatcctagta

SEQ ID NO: 66009 - DNA, 25 bp, Saccharomyces pastorianus
gaaatgttgctgagcttgccaccag

SEQ ID NO: 66010 - DNA, 25 bp, Saccharomyces pastorianus
gcaaatcggctcatctactagtatc

SEQ ID NO: 66011 - DNA, 25 bp, Saccharomyces pastorianus
tagtatccctaacctgaaagcccgt

SEQ ID NO: 66012 - DNA, 25 bp, Saccharomyces pastorianus
gaagtattaactatgcccgaaggta

SEQ ID NO: 66013 - DNA, 25 bp, Saccharomyces pastorianus
gtgtccgtaaatcaaccaaggtcat

SEQ ID NO: 66014 - DNA, 25 bp, Saccharomyces pastorianus
agagtactaccacttcgacaacttc

SEQ ID NO: 66015 - DNA, 25 bp, Saccharomyces pastorianus
aagtggtgtcggtctcaattgaagt

SEQ ID NO: 66016 - DNA, 25 bp, Saccharomyces pastorianus
gaaattgctggatctggcccacaga

SEQ ID NO: 66017 - DNA, 25 bp, Saccharomyces pastorianus
accccgaccttgcagatttgtagat

SEQ ID NO: 66018 - DNA, 25 bp, Saccharomyces pastorianus
gtgccggtgctgttccaatgaatgc

SEQ ID NO: 66019 - DNA, 25 bp, Saccharomyces pastorianus
ccaaggcccctttagtagcaacaat

SEQ ID NO: 66020 - DNA, 25 bp, Saccharomyces pastorianus
tcaacgtggcgtctaatttgcatgt

SEQ ID NO: 66021 - DNA, 25 bp, Saccharomyces pastorianus
gacaacagcggtgcgttcaacgtgg

SEQ ID NO: 66022 - DNA, 25 bp, Saccharomyces pastorianus
actagcagtgcttctcttaacaaca

SEQ ID NO: 66023 - DNA, 25 bp, Saccharomyces pastorianus
caggacccatttaccacttttgatt

SEQ ID NO: 66024 - DNA, 25 bp, Saccharomyces pastorianus
aattcagcaggacttgcctctaacg

SEQ ID NO: 66025 - DNA, 25 bp, Saccharomyces pastorianus
aacgcgttgccgaatatgggttctt

SEQ ID NO: 66026 - DNA, 25 bp, Saccharomyces pastorianus
tgtcacaccaattgcgccagaaaac

SEQ ID NO: 66027 - DNA, 25 bp, Saccharomyces pastorianus
tagggtttttctgaaccgccagaga

SEQ ID NO: 66028 - DNA, 25 bp, Saccharomyces pastorianus
gccagagagccagatttcctcatag

SEQ ID NO: 66029 - DNA, 25 bp, Saccharomyces pastorianus
gatcgaaggtcacaacccgtagtct

SEQ ID NO: 66030 - DNA, 25 bp, Saccharomyces pastorianus
atgttaacgaactacttgggccaag

SEQ ID NO: 66031 - DNA, 25 bp, Saccharomyces pastorianus
attttctaggacactgacccagttt

SEQ ID NO: 66032 - DNA, 25 bp, Saccharomyces pastorianus
gatagtcttttcactgctccttcaa

SEQ ID NO: 66033 - DNA, 25 bp, Saccharomyces pastorianus
aatgggcctgccagacgggttaacg

SEQ ID NO: 66034 - DNA, 25 bp, Saccharomyces pastorianus
gacaactgtccattgaacgccgctg

SEQ ID NO: 66035 - DNA, 25 bp, Saccharomyces pastorianus
tagggacttcctttggagctgctat

SEQ ID NO: 66036 - DNA, 25 bp, Saccharomyces pastorianus
ttcaccgccttgcatacagatgacg

SEQ ID NO: 66037 - DNA, 25 bp, Saccharomyces pastorianus
tgccgctctatcgaatccgtgggat

SEQ ID NO: 66038 - DNA, 25 bp, Saccharomyces pastorianus
gcctgtaccttctagcaagatcgaa

SEQ ID NO: 66039 - DNA, 25 bp, Saccharomyces pastorianus
gccttctttatcgtcgctattgcaa

SEQ ID NO: 66040 - DNA, 25 bp, Saccharomyces pastorianus
acgttttatcactggctgtctacaa

SEQ ID NO: 66041 - DNA, 25 bp, Saccharomyces pastorianus
agacctacatggactacgtgatcgt

SEQ ID NO: 66042 - DNA, 25 bp, Saccharomyces pastorianus
tggttcatactacgtgtctctgggt

SEQ ID NO: 66043 - DNA, 25 bp, Saccharomyces pastorianus
aaggacttcccgaacttgattgtgt

SEQ ID NO: 66044 - DNA, 25 bp, Saccharomyces pastorianus
atcatactggcccttgtgtgctacc

SEQ ID NO: 66045 - DNA, 25 bp, Saccharomyces pastorianus
ttcaagccattctacggattcggtg

SEQ ID NO: 66046 - DNA, 25 bp, Saccharomyces pastorianus
ttgtggccgcagtccatgagacgtg

SEQ ID NO: 66047 - DNA, 25 bp, Saccharomyces pastorianus
gcacagttggatgccgacgagtact

SEQ ID NO: 66048 - DNA, 25 bp, Saccharomyces pastorianus
gagtcagccagaggtgtatccgcct

SEQ ID NO: 66049 - DNA, 25 bp, Saccharomyces pastorianus
gttggctaagagattgtctgaaaga

SEQ ID NO: 66050 - DNA, 25 bp, Saccharomyces pastorianus
ctcaaagagaagctgctgccgaata

SEQ ID NO: 66051 - DNA, 25 bp, Saccharomyces pastorianus
actcctcaaagattgcaaagaaaga

SEQ ID NO: 66052 - DNA, 25 bp, Saccharomyces pastorianus
acgctcaattgttggctaagagatt

SEQ ID NO: 66053 - DNA, 25 bp, Saccharomyces pastorianus
gaatacgctcaattgttggctaaga

SEQ ID NO: 66054 - DNA, 25 bp, Saccharomyces pastorianus
agacttacaccaaggctccaaagat

SEQ ID NO: 66055 - DNA, 25 bp, Saccharomyces pastorianus
ccaaggctccaaagatccaaagatt

SEQ ID NO: 66056 - DNA, 25 bp, Saccharomyces pastorianus
gaaagagacaccaaagagctttgaa

SEQ ID NO: 66057 - DNA, 25 bp, Saccharomyces pastorianus
gaagctgctgccgaatacgctcaat

SEQ ID NO: 66058 - DNA, 25 bp, Saccharomyces pastorianus
gaaaagacttacaccaaggctccaa

SEQ ID NO: 66059 - DNA, 25 bp, Saccharomyces pastorianus
tgctgccgaatacgctcaattgttg

SEQ ID NO: 66060 - DNA, 25 bp, Saccharomyces pastorianus
caagacggcgtcaaaatctcgaaat

SEQ ID NO: 66061 - DNA, 25 bp, Saccharomyces pastorianus
tagaggtcccactgactttcaatgt

SEQ ID NO: 66062 - DNA, 25 bp, Saccharomyces pastorianus
tggcctgcccgatttccaaataatc

SEQ ID NO: 66063 - DNA, 25 bp, Saccharomyces pastorianus
gtaccggagtttcattcttgcgatt

SEQ ID NO: 66064 - DNA, 25 bp, Saccharomyces pastorianus
agaagaaaaatcctggcctgcccga

SEQ ID NO: 66065 - DNA, 25 bp, Saccharomyces pastorianus
tgggatgccaactcttatgtcgaag

SEQ ID NO: 66066 - DNA, 25 bp, Saccharomyces pastorianus
atggtatacacctagctctcaaagt

SEQ ID NO: 66067 - DNA, 25 bp, Saccharomyces pastorianus
gaataccttgccttcaaaatcttta

SEQ ID NO: 66068 - DNA, 25 bp, Saccharomyces pastorianus
gacagttaagcccaattccaaaaag

SEQ ID NO: 66069 - DNA, 25 bp, Saccharomyces pastorianus
aggacgatctcgattgggatgccaa

SEQ ID NO: 66070 - DNA, 25 bp, Saccharomyces pastorianus
gataaatctcagcatttccctactt

SEQ ID NO: 66071 - DNA, 25 bp, Saccharomyces pastorianus
agcatccatggacactcatcaattg

SEQ ID NO: 66072 - DNA, 25 bp, Saccharomyces pastorianus
gaatattgcttctactgtcgttaac

SEQ ID NO: 66073 - DNA, 25 bp, Saccharomyces pastorianus
atcgctaacgaaacaggcttaactg

SEQ ID NO: 66074 - DNA, 25 bp, Saccharomyces pastorianus
ggcctaaatttgactggtgcagaca

SEQ ID NO: 66075 - DNA, 25 bp, Saccharomyces pastorianus
ggagttatgggatccatctcaatat

SEQ ID NO: 66076 - DNA, 25 bp, Saccharomyces pastorianus
aggctagatggtagtgtcgacccaa

SEQ ID NO: 66077 - DNA, 25 bp, Saccharomyces pastorianus
tttgatcctgatagtgttgcttctc

SEQ ID NO: 66078 - DNA, 25 bp, Saccharomyces pastorianus
gaatcccatgaacgatctgcaagca

SEQ ID NO: 66079 - DNA, 25 bp, Saccharomyces pastorianus
gattgtctactgttaactaccaaag

SEQ ID NO: 66080 - DNA, 25 bp, Saccharomyces pastorianus
ataatgattcacaaccagccaaggg

SEQ ID NO: 66081 - DNA, 25 bp, Saccharomyces pastorianus
gtatatgccttctgtaacgtacatg

SEQ ID NO: 66082 - DNA, 25 bp, Saccharomyces pastorianus
aagcatgttgactttgcgccaacct

SEQ ID NO: 66083 - DNA, 25 bp, Saccharomyces pastorianus
aaatgccgctagaaaggctgaatct

SEQ ID NO: 66084 - DNA, 25 bp, Saccharomyces pastorianus
aatgccgctagaaaggctgaatctt

SEQ ID NO: 66085 - DNA, 25 bp, Saccharomyces pastorianus
agcatgttgactttgcgccaacctc

SEQ ID NO: 66086 - DNA, 25 bp, Saccharomyces pastorianus
aaagcatgttgactttgcgccaacc

SEQ ID NO: 66087 - DNA, 25 bp, Saccharomyces pastorianus
atgccgctagaaaggctgaatcttc

SEQ ID NO: 66088 - DNA, 25 bp, Saccharomyces pastorianus
gttgactttgcgccaacctctccat

SEQ ID NO: 66089 - DNA, 25 bp, Saccharomyces pastorianus
agaaatgccgctagaaaggctgaat

SEQ ID NO: 66090 - DNA, 25 bp, Saccharomyces pastorianus
gcatgttgactttgcgccaacctct

SEQ ID NO: 66091 - DNA, 25 bp, Saccharomyces pastorianus
tgccgctagaaaggctgaatcttct

SEQ ID NO: 66092 - DNA, 25 bp, Saccharomyces pastorianus
gaaatgccgctagaaaggctgaatc

SEQ ID NO: 66093 - DNA, 25 bp, Saccharomyces pastorianus
agaaagcacggtgccgttcatttgt

SEQ ID NO: 66094 - DNA, 25 bp, Saccharomyces pastorianus
taacgtcaccaagtcttccgttggt

SEQ ID NO: 66095 - DNA, 25 bp, Saccharomyces pastorianus
gtgttgtttataacgtcaccaagtc

SEQ ID NO: 66096 - DNA, 25 bp, Saccharomyces pastorianus
gtttataacgtcaccaagtcttccg

SEQ ID NO: 66097 - DNA, 25 bp, Saccharomyces pastorianus
aagcacggtgccgttcatttgtcca

SEQ ID NO: 66098 - DNA, 25 bp, Saccharomyces pastorianus
tataacgtcaccaagtcttccgttg

SEQ ID NO: 66099 - DNA, 25 bp, Saccharomyces pastorianus
cggtgccgttcatttgtccacctac

SEQ ID NO: 66100 - DNA, 25 bp, Saccharomyces pastorianus
acggtgccgttcatttgtccaccta

SEQ ID NO: 66101 - DNA, 25 bp, Saccharomyces pastorianus
gttgtttataacgtcaccaagtctt

SEQ ID NO: 66102 - DNA, 25 bp, Saccharomyces pastorianus
tcagaaagcacggtgccgttcattt

SEQ ID NO: 66103 - DNA, 25 bp, Saccharomyces pastorianus
agcacggtgccgttcatttgtccac

SEQ ID NO: 66104 - DNA, 25 bp, Saccharomyces pastorianus
agagacaaccagctcaaccaagaga

SEQ ID NO: 66105 - DNA, 25 bp, Saccharomyces pastorianus
tttctactgaaggtaacgttcctca

SEQ ID NO: 66106 - DNA, 25 bp, Saccharomyces pastorianus
tatccaaaagggtatgccacacaag

SEQ ID NO: 66107 - DNA, 25 bp, Saccharomyces pastorianus
tactgaaggtaacgttcctcaaact

SEQ ID NO: 66108 - DNA, 25 bp, Saccharomyces pastorianus
tctacaaggttggtgacattgtcga

SEQ ID NO: 66109 - DNA, 25 bp, Saccharomyces pastorianus
tccaaaagggtatgccacacaagtt

SEQ ID NO: 66110 - DNA, 25 bp, Saccharomyces pastorianus
gccaatggttctatccaaaagggta

SEQ ID NO: 66111 - DNA, 25 bp, Saccharomyces pastorianus
agacaaccagctcaaccaagagaat

SEQ ID NO: 66112 - DNA, 25 bp, Saccharomyces pastorianus
tgaagagacaaccagctcaaccaag

SEQ ID NO: 66113 - DNA, 25 bp, Saccharomyces pastorianus
gtccaattgaagagacaaccagctc

SEQ ID NO: 66114 - DNA, 25 bp, Saccharomyces pastorianus
ggttctatccaaaagggtatgccac

SEQ ID NO: 66115 - DNA, 25 bp, Saccharomyces pastorianus
atgacaaaggtatccccatcgttct

SEQ ID NO: 66116 - DNA, 25 bp, Saccharomyces pastorianus
ggcggtactccatgtagtacagatg

SEQ ID NO: 66117 - DNA, 25 bp, Saccharomyces pastorianus
gaagccacaaattcaacctgtacga

SEQ ID NO: 66118 - DNA, 25 bp, Saccharomyces pastorianus
aaagctcggtagattcacgaatcct

SEQ ID NO: 66119 - DNA, 25 bp, Saccharomyces pastorianus
aagcaggaccaaatgaggccatcaa

SEQ ID NO: 66120 - DNA, 25 bp, Saccharomyces pastorianus
aatggcctgactttgaactctttat

SEQ ID NO: 66121 - DNA, 25 bp, Saccharomyces pastorianus
aaaactagtgcccatttccactatt

SEQ ID NO: 66122 - DNA, 25 bp, Saccharomyces pastorianus
atgtgaccgtggcataaagctcggt

SEQ ID NO: 66123 - DNA, 25 bp, Saccharomyces pastorianus
attaatggttccactgaagccacaa

SEQ ID NO: 66124 - DNA, 25 bp, Saccharomyces pastorianus
atcgttctcgcaaaatgcacccaaa

SEQ ID NO: 66125 - DNA, 25 bp, Saccharomyces pastorianus
gaaagttagcgaagattcccatttt

SEQ ID NO: 66126 - DNA, 25 bp, Saccharomyces pastorianus
ggttctgaccttacatcgttagcaa

SEQ ID NO: 66127 - DNA, 25 bp, Saccharomyces pastorianus
agtgtatcgccggaatccctacaag

SEQ ID NO: 66128 - DNA, 25 bp, Saccharomyces pastorianus
gagcttctcattcaatggtcttcgt

SEQ ID NO: 66129 - DNA, 25 bp, Saccharomyces pastorianus
gccaccaatttaccttgggctattg

SEQ ID NO: 66130 - DNA, 25 bp, Saccharomyces pastorianus
aaatgcgactgctcaggctgaagat

SEQ ID NO: 66131 - DNA, 25 bp, Saccharomyces pastorianus
catggccaaaaaactgtcaccttct

SEQ ID NO: 66132 - DNA, 25 bp, Saccharomyces pastorianus
tatatattccccttccagattacga

SEQ ID NO: 66133 - DNA, 25 bp, Saccharomyces pastorianus
tggtcttcgttatcaaatgcgactg

SEQ ID NO: 66134 - DNA, 25 bp, Saccharomyces pastorianus
gatcgattcgatgttgactgctcgt

SEQ ID NO: 66135 - DNA, 25 bp, Saccharomyces pastorianus
agagtacttgttttgggagccacca

SEQ ID NO: 66136 - DNA, 25 bp, Saccharomyces pastorianus
tgttgactgctcgttctgataatga

SEQ ID NO: 66137 - DNA, 25 bp, Saccharomyces pastorianus
ttgacgtctataatctcacccattg

SEQ ID NO: 66138 - DNA, 25 bp, Saccharomyces pastorianus
gatattgttttcttatgctctctca

SEQ ID NO: 66139 - DNA, 25 bp, Saccharomyces pastorianus
gcctccacatctattgacgtctata

SEQ ID NO: 66140 - DNA, 25 bp, Saccharomyces pastorianus
atctggtttatttaattctcgaagg

SEQ ID NO: 66141 - DNA, 25 bp, Saccharomyces pastorianus
tatgctctctcatagacaccagatc

SEQ ID NO: 66142 - DNA, 25 bp, Saccharomyces pastorianus
ataatctcacccattgcaaggcttt

SEQ ID NO: 66143 - DNA, 25 bp, Saccharomyces pastorianus
aaactcagaaggctttcatgcaaga

SEQ ID NO: 66144 - DNA, 25 bp, Saccharomyces pastorianus
tccctctgcatctctggataaatcg

SEQ ID NO: 66145 - DNA, 25 bp, Saccharomyces pastorianus
gatcaagttgatcgccttcagatat

SEQ ID NO: 66146 - DNA, 25 bp, Saccharomyces pastorianus
agatgatgaaagctggcctccacat

SEQ ID NO: 66147 - DNA, 25 bp, Saccharomyces pastorianus
gacaccagatccgaaactaaactca

SEQ ID NO: 66148 - DNA, 25 bp, Saccharomyces pastorianus
gcagaatacgcatccatcgagaatg

SEQ ID NO: 66149 - DNA, 25 bp, Saccharomyces pastorianus
ggaacccctgtaatgtgaaatttga

SEQ ID NO: 66150 - DNA, 25 bp, Saccharomyces pastorianus
tgatgttgaagccaagaaccacatt

SEQ ID NO: 66151 - DNA, 25 bp, Saccharomyces pastorianus
agggtgatattctctttgacagtga

SEQ ID NO: 66152 - DNA, 25 bp, Saccharomyces pastorianus
gttgtgaagcacactggctctcatt

SEQ ID NO: 66153 - DNA, 25 bp, Saccharomyces pastorianus
gaaccacattcaaaccattacatct

SEQ ID NO: 66154 - DNA, 25 bp, Saccharomyces pastorianus
cgtagaaagcgcatcaattatcatt

SEQ ID NO: 66155 - DNA, 25 bp, Saccharomyces pastorianus
gttcaactgcctgaaatcttggtaa

SEQ ID NO: 66156 - DNA, 25 bp, Saccharomyces pastorianus
agtgctctaaagtatccttattggc

SEQ ID NO: 66157 - DNA, 25 bp, Saccharomyces pastorianus
gaatgacatataccaggaacccctg

SEQ ID NO: 66158 - DNA, 25 bp, Saccharomyces pastorianus
attcacgcggccactacgtttgcta

SEQ ID NO: 66159 - DNA, 25 bp, Saccharomyces pastorianus
tctactgtttggctttacggaaaag

SEQ ID NO: 66160 - DNA, 25 bp, Saccharomyces pastorianus
aaggccgtcctagttagggatatgc

SEQ ID NO: 66161 - DNA, 25 bp, Saccharomyces pastorianus
ggaggtgctctatttttaggttcta

SEQ ID NO: 66162 - DNA, 25 bp, Saccharomyces pastorianus
tggctgtctttattttcgggctaat

SEQ ID NO: 66163 - DNA, 25 bp, Saccharomyces pastorianus
agaaaccaactgatgctgctaggaa

SEQ ID NO: 66164 - DNA, 25 bp, Saccharomyces pastorianus
gtatgctataggaatgctctcgttg

SEQ ID NO: 66165 - DNA, 25 bp, Saccharomyces pastorianus
tatgtaaaggcgtcctccaagacct

SEQ ID NO: 66166 - DNA, 25 bp, Saccharomyces pastorianus
ataagctgaggttcttgttaggtca

SEQ ID NO: 66167 - DNA, 25 bp, Saccharomyces pastorianus
gcaattacggctacatggctgtctt

SEQ ID NO: 66168 - DNA, 25 bp, Saccharomyces pastorianus
gaaggtactcctaaccatatgtaaa

SEQ ID NO: 66169 - DNA, 25 bp, Saccharomyces pastorianus
gaacaggacgatttgctttgcgata

SEQ ID NO: 66170 - DNA, 25 bp, Saccharomyces pastorianus
tacaagatgcatacctactccttct

SEQ ID NO: 66171 - DNA, 25 bp, Saccharomyces pastorianus
gctctgaaatccctgaaacactacg

SEQ ID NO: 66172 - DNA, 25 bp, Saccharomyces pastorianus
caaaggttcctcgtggcacttggat

SEQ ID NO: 66173 - DNA, 25 bp, Saccharomyces pastorianus
tccaccggtcctttgtttttgagtg

SEQ ID NO: 66174 - DNA, 25 bp, Saccharomyces pastorianus
aaccacattctgtcgtgtgtcgtca

SEQ ID NO: 66175 - DNA, 25 bp, Saccharomyces pastorianus
aaatactggttcattccttacataa

SEQ ID NO: 66176 - DNA, 25 bp, Saccharomyces pastorianus
acataaccattatgggctccaccgg

SEQ ID NO: 66177 - DNA, 25 bp, Saccharomyces pastorianus
accataagaatcctgcaacctgctt

SEQ ID NO: 66178 - DNA, 25 bp, Saccharomyces pastorianus
gtttgtctttggctttttcatccta

SEQ ID NO: 66179 - DNA, 25 bp, Saccharomyces pastorianus
gaattggaagttcggctctttcaaa

SEQ ID NO: 66180 - DNA, 25 bp, Saccharomyces pastorianus
tctttcaaagccagggtcgctgcaa

SEQ ID NO: 66181 - DNA, 25 bp, Saccharomyces pastorianus
gacatcgcatattctgcgtccagta

SEQ ID NO: 66182 - DNA, 25 bp, Saccharomyces pastorianus
aagggcctatcgaaattgcgccttc

SEQ ID NO: 66183 - DNA, 25 bp, Saccharomyces pastorianus
gaacaaggccagaccgcattgtcaa

SEQ ID NO: 66184 - DNA, 25 bp, Saccharomyces pastorianus
gaataccaggtactgcacaagccct

SEQ ID NO: 66185 - DNA, 25 bp, Saccharomyces pastorianus
aataattacttctctcactccagat

SEQ ID NO: 66186 - DNA, 25 bp, Saccharomyces pastorianus
cagtacaaactatttcgctccacaa

SEQ ID NO: 66187 - DNA, 25 bp, Saccharomyces pastorianus
aattgtcaagctggctcatcgtgtc

SEQ ID NO: 66188 - DNA, 25 bp, Saccharomyces pastorianus
atgctcatattcttccaaacgggtt

SEQ ID NO: 66189 - DNA, 25 bp, Saccharomyces pastorianus
gagccctgaggccttacattcggat

SEQ ID NO: 66190 - DNA, 25 bp, Saccharomyces pastorianus
atatcacctccaatgtctgctaata

SEQ ID NO: 66191 - DNA, 25 bp, Saccharomyces pastorianus
ttcttcttcgtcatacgtcaactac

SEQ ID NO: 66192 - DNA, 25 bp, Saccharomyces pastorianus
gggttggatcttctcaaaaacttga

SEQ ID NO: 66193 - DNA, 25 bp, Saccharomyces pastorianus
ctcttttggagctgacgtctaattt

SEQ ID NO: 66194 - DNA, 25 bp, Saccharomyces pastorianus
aaattatttccatgttatactgcca

SEQ ID NO: 66195 - DNA, 25 bp, Saccharomyces pastorianus
gttatactgccatctttattgaaaa

SEQ ID NO: 66196 - DNA, 25 bp, Saccharomyces pastorianus
gcaaacggcaatgataacgacggtt

SEQ ID NO: 66197 - DNA, 25 bp, Saccharomyces pastorianus
gattggctgcttgctcttttggagc

SEQ ID NO: 66198 - DNA, 25 bp, Saccharomyces pastorianus
gagcagtgacctcacaacgaaggat

SEQ ID NO: 66199 - DNA, 25 bp, Saccharomyces pastorianus
taacgacggttacaactggagaaat

SEQ ID NO: 66200 - DNA, 25 bp, Saccharomyces pastorianus
agaacttcaggttcgaatacatgaa

SEQ ID NO: 66201 - DNA, 25 bp, Saccharomyces pastorianus
tgttgaattcgagtggtgcggccac

SEQ ID NO: 66202 - DNA, 25 bp, Saccharomyces pastorianus
acggactctatctcacatctattag

SEQ ID NO: 66203 - DNA, 25 bp, Saccharomyces pastorianus
ttcacgacgttccagcgcagtctgc

SEQ ID NO: 66204 - DNA, 25 bp, Saccharomyces pastorianus
agcgcagtctgcagcagcagcaatc

SEQ ID NO: 66205 - DNA, 25 bp, Saccharomyces pastorianus
ttgagtttcccgtgagctcgagcaa

SEQ ID NO: 66206 - DNA, 25 bp, Saccharomyces pastorianus
atatctttgcctttgagtttcccgt

SEQ ID NO: 66207 - DNA, 25 bp, Saccharomyces pastorianus
tcccgtgagctcgagcaatgttgat

SEQ ID NO: 66208 - DNA, 25 bp, Saccharomyces pastorianus
ggcagaggttcgtcttcaccacgca

SEQ ID NO: 66209 - DNA, 25 bp, Saccharomyces pastorianus
aagctgaacccgatgaagacgacga

SEQ ID NO: 66210 - DNA, 25 bp, Saccharomyces pastorianus
aagacgacgaagagggcactgactt

SEQ ID NO: 66211 - DNA, 25 bp, Saccharomyces pastorianus
gaaatccgactctcgtcccatatct

SEQ ID NO: 66212 - DNA, 25 bp, Saccharomyces pastorianus
cactgacttggccattgaggacgga

SEQ ID NO: 66213 - DNA, 25 bp, Saccharomyces pastorianus
gcacacgcgaagctgaacccgatga

SEQ ID NO: 66214 - DNA, 25 bp, Saccharomyces pastorianus
gacatcttgcaagcatctgctgtca

SEQ ID NO: 66215 - DNA, 25 bp, Saccharomyces pastorianus
gcacgtttgccccaggtgctggaaa

SEQ ID NO: 66216 - DNA, 25 bp, Saccharomyces pastorianus
atagagcgattcttgcgccaatctt

SEQ ID NO: 66217 - DNA, 25 bp, Saccharomyces pastorianus
gaagtgtgcccagaaatcaacgact

SEQ ID NO: 66218 - DNA, 25 bp, Saccharomyces pastorianus
cgaagttgcaaatcttggtcgaaca

SEQ ID NO: 66219 - DNA, 25 bp, Saccharomyces pastorianus
aagtccaaactacgctatttcatgt

SEQ ID NO: 66220 - DNA, 25 bp, Saccharomyces pastorianus
aacagcagcttaccagccattgaat

SEQ ID NO: 66221 - DNA, 25 bp, Saccharomyces pastorianus
agttccagcgagctttgcgacatct

SEQ ID NO: 66222 - DNA, 25 bp, Saccharomyces pastorianus
gccaatcttacctgttatggtccaa

SEQ ID NO: 66223 - DNA, 25 bp, Saccharomyces pastorianus
aactcacgttactgttttcaccgat

SEQ ID NO: 66224 - DNA, 25 bp, Saccharomyces pastorianus
aacaaccatttgtcagcgttttatt

SEQ ID NO: 66225 - DNA, 25 bp, Saccharomyces pastorianus
acattgttactgtcgttcgtgtttg

SEQ ID NO: 66226 - DNA, 25 bp, Saccharomyces pastorianus
tattactagggctgctggtccattc

SEQ ID NO: 66227 - DNA, 25 bp, Saccharomyces pastorianus
ggagggttttactacatgatgtcta

SEQ ID NO: 66228 - DNA, 25 bp, Saccharomyces pastorianus
tgtcgttcgtgtttggatctggtcc

SEQ ID NO: 66229 - DNA, 25 bp, Saccharomyces pastorianus
ggtgtcatgttcttacaaatttcat

SEQ ID NO: 66230 - DNA, 25 bp, Saccharomyces pastorianus
gggtattgttttggctataggttct

SEQ ID NO: 66231 - DNA, 25 bp, Saccharomyces pastorianus
gggtgccgtcttctctgtcgatatc

SEQ ID NO: 66232 - DNA, 25 bp, Saccharomyces pastorianus
atgatgtctacgtctgaaacctttg

SEQ ID NO: 66233 - DNA, 25 bp, Saccharomyces pastorianus
tccattctggtcttcgattccgtcg

SEQ ID NO: 66234 - DNA, 25 bp, Saccharomyces pastorianus
gtctgaaacctttgaccgattgatg

SEQ ID NO: 66235 - DNA, 25 bp, Saccharomyces pastorianus
ttcgattccgtcgtggcagttagcg

SEQ ID NO: 66236 - DNA, 25 bp, Saccharomyces pastorianus
ttcaaatcctttgttctctccgaaa

SEQ ID NO: 66237 - DNA, 25 bp, Saccharomyces pastorianus
gaataaccaattcaaatcctttgtt

SEQ ID NO: 66238 - DNA, 25 bp, Saccharomyces pastorianus
attcaaatcctttgttctctccgaa

SEQ ID NO: 66239 - DNA, 25 bp, Saccharomyces pastorianus
tcgttatccacccattgttttttct

SEQ ID NO: 66240 - DNA, 25 bp, Saccharomyces pastorianus
ttaccgttaaccataattattgact

SEQ ID NO: 66241 - DNA, 25 bp, Saccharomyces pastorianus
tcaaatcctttgttctctccgaaat

SEQ ID NO: 66242 - DNA, 25 bp, Saccharomyces pastorianus
accgttaaccataattattgactca

SEQ ID NO: 66243 - DNA, 25 bp, Saccharomyces pastorianus
caaatcctttgttctctccgaaatg

SEQ ID NO: 66244 - DNA, 25 bp, Saccharomyces pastorianus
caattcaaatcctttgttctctccg

SEQ ID NO: 66245 - DNA, 25 bp, Saccharomyces pastorianus
ttgactcatcaatgaataaccaatt

SEQ ID NO: 66246 - DNA, 25 bp, Saccharomyces pastorianus
aattcaaatcctttgttctctccga

SEQ ID NO: 66247 - DNA, 25 bp, Saccharomyces pastorianus
taagtgtgattcacccaaacctcgc

SEQ ID NO: 66248 - DNA, 25 bp, Saccharomyces pastorianus
aagggattacacatttcgttatcaa

SEQ ID NO: 66249 - DNA, 25 bp, Saccharomyces pastorianus
gacggtggctactttattgacggaa

SEQ ID NO: 66250 - DNA, 25 bp, Saccharomyces pastorianus
gtaccggtattagaactaccatctg

SEQ ID NO: 66251 - DNA, 25 bp, Saccharomyces pastorianus
ggatgtgatccaaccggtaagaaaa

SEQ ID NO: 66252 - DNA, 25 bp, Saccharomyces pastorianus
aaacctcgctattcgaaactccagc

SEQ ID NO: 66253 - DNA, 25 bp, Saccharomyces pastorianus
aaactccagccatcaagattccgtt

SEQ ID NO: 66254 - DNA, 25 bp, Saccharomyces pastorianus
gttcttacaaagacggtggctactt

SEQ ID NO: 66255 - DNA, 25 bp, Saccharomyces pastorianus
gcataccgaatggttcaatgtaccg

SEQ ID NO: 66256 - DNA, 25 bp, Saccharomyces pastorianus
acagtggactcgaggcttttagaat

SEQ ID NO: 66257 - DNA, 25 bp, Saccharomyces pastorianus
ctaccatctgtgttaacgaccatcg

SEQ ID NO: 66258 - DNA, 25 bp, Saccharomyces pastorianus
gtattcccgtgaacacgttttccag

SEQ ID NO: 66259 - DNA, 25 bp, Saccharomyces pastorianus
gaagctgatcttcgacatcatgggt

SEQ ID NO: 66260 - DNA, 25 bp, Saccharomyces pastorianus
agggatctacgccaagtcttacaac

SEQ ID NO: 66261 - DNA, 25 bp, Saccharomyces pastorianus
agaacaagatactccaccgtgacct

SEQ ID NO: 66262 - DNA, 25 bp, Saccharomyces pastorianus
aggagccactggacgggaaccttat

SEQ ID NO: 66263 - DNA, 25 bp, Saccharomyces pastorianus
accgagtcactatggctggcagtca

SEQ ID NO: 66264 - DNA, 25 bp, Saccharomyces pastorianus
gtgacctgaagcctcaaaacctatt

SEQ ID NO: 66265 - DNA, 25 bp, Saccharomyces pastorianus
gacatatggtcgtgtggctgcatcc

SEQ ID NO: 66266 - DNA, 25 bp, Saccharomyces pastorianus
actgttcccaggtaccaatgacgag

SEQ ID NO: 66267 - DNA, 25 bp, Saccharomyces pastorianus
ttttccagcgaggttgtcacactat

SEQ ID NO: 66268 - DNA, 25 bp, Saccharomyces pastorianus
aaggactagcgttctgccacgagaa

SEQ ID NO: 66269 - DNA, 25 bp, Saccharomyces pastorianus
gtgcatacccagtgagagctactcc

SEQ ID NO: 66270 - DNA, 25 bp, Saccharomyces pastorianus
agtaccctgttgcaaactatcgcag

SEQ ID NO: 66271 - DNA, 25 bp, Saccharomyces pastorianus
atatgcgcccaactgatgactcaat

SEQ ID NO: 66272 - DNA, 25 bp, Saccharomyces pastorianus
aaggcttttaccaagttctgcgaga

SEQ ID NO: 66273 - DNA, 25 bp, Saccharomyces pastorianus
aacgcacccgtgaaggatatgccta

SEQ ID NO: 66274 - DNA, 25 bp, Saccharomyces pastorianus
cttcaacctgctggactacaagtgc

SEQ ID NO: 66275 - DNA, 25 bp, Saccharomyces pastorianus
aaagaaaaatccctacgcacgcaag

SEQ ID NO: 66276 - DNA, 25 bp, Saccharomyces pastorianus
gaggacattccgtttctggacaagc

SEQ ID NO: 66277 - DNA, 25 bp, Saccharomyces pastorianus
agttgttcactttgtccgatctaaa

SEQ ID NO: 66278 - DNA, 25 bp, Saccharomyces pastorianus
taaaaactgctgtgacgtggcccac

SEQ ID NO: 66279 - DNA, 25 bp, Saccharomyces pastorianus
tccctagaggtttacgagtcgctgt

SEQ ID NO: 66280 - DNA, 25 bp, Saccharomyces pastorianus
taaaggaaatccagccgggctcact

SEQ ID NO: 66281 - DNA, 25 bp, Saccharomyces pastorianus
aacccggctgaatggttctcagaag

SEQ ID NO: 66282 - DNA, 25 bp, Saccharomyces pastorianus
gtgtccctccattaagtgaactcat

SEQ ID NO: 66283 - DNA, 25 bp, Saccharomyces pastorianus
gtcgatataacgaacccggctgaat

SEQ ID NO: 66284 - DNA, 25 bp, Saccharomyces pastorianus
agtgaactcatacatctttcctgtc

SEQ ID NO: 66285 - DNA, 25 bp, Saccharomyces pastorianus
gccagagcaatgatgtcagcacttt

SEQ ID NO: 66286 - DNA, 25 bp, Saccharomyces pastorianus
tggatcgtggatactatgcaggacc

SEQ ID NO: 66287 - DNA, 25 bp, Saccharomyces pastorianus
gatggcgctcacaatgtcgatataa

SEQ ID NO: 66288 - DNA, 25 bp, Saccharomyces pastorianus
aactccatctggaaggcgattttga

SEQ ID NO: 66289 - DNA, 25 bp, Saccharomyces pastorianus
ggctcacttcgggtaccgtagagat

SEQ ID NO: 66290 - DNA, 25 bp, Saccharomyces pastorianus
gcaaacttttgaccacacgtatgaa

SEQ ID NO: 66291 - DNA, 25 bp, Saccharomyces pastorianus
gcgttttccccaacagtcaagtgaa

SEQ ID NO: 66292 - DNA, 25 bp, Saccharomyces pastorianus
ggcgtttgctgagatgttcattcac

SEQ ID NO: 66293 - DNA, 25 bp, Saccharomyces pastorianus
gattcttccggctcatttgaaacga

SEQ ID NO: 66294 - DNA, 25 bp, Saccharomyces pastorianus
tgcgattccatggtccgacttggga

SEQ ID NO: 66295 - DNA, 25 bp, Saccharomyces pastorianus
gaagttcagctactatgcgggcgat

SEQ ID NO: 66296 - DNA, 25 bp, Saccharomyces pastorianus
gggcaagctgttcccaagaaacacc

SEQ ID NO: 66297 - DNA, 25 bp, Saccharomyces pastorianus
gaaggctcaactgatgcgattccat

SEQ ID NO: 66298 - DNA, 25 bp, Saccharomyces pastorianus
aagctggaccattacggacgtagga

SEQ ID NO: 66299 - DNA, 25 bp, Saccharomyces pastorianus
acctggatccgtatagttctagtgt

SEQ ID NO: 66300 - DNA, 25 bp, Saccharomyces pastorianus
actgtcttgtttccattgttcacca

SEQ ID NO: 66301 - DNA, 25 bp, Saccharomyces pastorianus
tcgcgggtatttgacgttggcatct

SEQ ID NO: 66302 - DNA, 25 bp, Saccharomyces pastorianus
attagagtccttccttgtatgttga

SEQ ID NO: 66303 - DNA, 25 bp, Saccharomyces pastorianus
agagcaaagccatctgaccgcaatt

SEQ ID NO: 66304 - DNA, 25 bp, Saccharomyces pastorianus
tgcaggaaatcatgccttcttatat

SEQ ID NO: 66305 - DNA, 25 bp, Saccharomyces pastorianus
gccaatctgtcgcatcactttgaaa

SEQ ID NO: 66306 - DNA, 25 bp, Saccharomyces pastorianus
gaaccagatatctccttcattaggc

SEQ ID NO: 66307 - DNA, 25 bp, Saccharomyces pastorianus
tagtctctactttcaagagcctcaa

SEQ ID NO: 66308 - DNA, 25 bp, Saccharomyces pastorianus
cattgccaggtttactctttcgata

SEQ ID NO: 66309 - DNA, 25 bp, Saccharomyces pastorianus
caggacgttgtcattgtggatactc

SEQ ID NO: 66310 - DNA, 25 bp, Saccharomyces pastorianus
gatactcgtgagttcaatgcttcat

SEQ ID NO: 66311 - DNA, 25 bp, Saccharomyces pastorianus
atgggccgaacattgcagtgagtat

SEQ ID NO: 66312 - DNA, 25 bp, Saccharomyces pastorianus
gaaacatgtatctgttcacttcaat

SEQ ID NO: 66313 - DNA, 25 bp, Saccharomyces pastorianus
ttgaacatctccatgatcgggttga

SEQ ID NO: 66314 - DNA, 25 bp, Saccharomyces pastorianus
aaacgggcaaggctttcttctcgca

SEQ ID NO: 66315 - DNA, 25 bp, Saccharomyces pastorianus
tatcggagtcgttcaagcaggccac

SEQ ID NO: 66316 - DNA, 25 bp, Saccharomyces pastorianus
ttggtgggttctcgcgacttgaaaa

SEQ ID NO: 66317 - DNA, 25 bp, Saccharomyces pastorianus
ccccatgctggctttgaaggcggaa

SEQ ID NO: 66318 - DNA, 25 bp, Saccharomyces pastorianus
gaacagcaattggtttcctctcata

SEQ ID NO: 66319 - DNA, 25 bp, Saccharomyces pastorianus
gtccccggcttcattaaagtcttgg

SEQ ID NO: 66320 - DNA, 25 bp, Saccharomyces pastorianus
tcggtgatgtcactttaggccccat

SEQ ID NO: 66321 - DNA, 25 bp, Saccharomyces pastorianus
gtccccttctggagcatttgaacat

SEQ ID NO: 66322 - DNA, 25 bp, Saccharomyces pastorianus
cgaacgtgctgtattgtcaacctca

SEQ ID NO: 66323 - DNA, 25 bp, Saccharomyces pastorianus
attcaatctatactctctgcgggtt

SEQ ID NO: 66324 - DNA, 25 bp, Saccharomyces pastorianus
gaggatatggacagcacgtttcagc

SEQ ID NO: 66325 - DNA, 25 bp, Saccharomyces pastorianus
atgtttcaattcgatcctgacgtag

SEQ ID NO: 66326 - DNA, 25 bp, Saccharomyces pastorianus
gtttcaattcgatcctgacgtagac

SEQ ID NO: 66327 - DNA, 25 bp, Saccharomyces pastorianus
atcctgacgtagacactaaatgggc

SEQ ID NO: 66328 - DNA, 25 bp, Saccharomyces pastorianus
gacgtagacactaaatgggcagaac

SEQ ID NO: 66329 - DNA, 25 bp, Saccharomyces pastorianus
gaacaggaggatatggacagcacgt

SEQ ID NO: 66330 - DNA, 25 bp, Saccharomyces pastorianus
aattcgatcctgacgtagacactaa

SEQ ID NO: 66331 - DNA, 25 bp, Saccharomyces pastorianus
ttcgatcctgacgtagacactaaat

SEQ ID NO: 66332 - DNA, 25 bp, Saccharomyces pastorianus
ggatatggacagcacgtttcagcgc

SEQ ID NO: 66333 - DNA, 25 bp, Saccharomyces pastorianus
tcaattcgatcctgacgtagacact

SEQ ID NO: 66334 - DNA, 25 bp, Saccharomyces pastorianus
tagacactaaatgggcagaacagga

SEQ ID NO: 66335 - DNA, 25 bp, Saccharomyces pastorianus
aataccagactacctcaaccagtta

SEQ ID NO: 66336 - DNA, 25 bp, Saccharomyces pastorianus
gtggtgcttaagtgctcaatcgagt

SEQ ID NO: 66337 - DNA, 25 bp, Saccharomyces pastorianus
tggtggcgagacaacgaatcaactt

SEQ ID NO: 66338 - DNA, 25 bp, Saccharomyces pastorianus
agtcaaatcctctatcggcaatacc

SEQ ID NO: 66339 - DNA, 25 bp, Saccharomyces pastorianus
agccatccacaccatagtacgataa

SEQ ID NO: 66340 - DNA, 25 bp, Saccharomyces pastorianus
gaagacaggctaccttcaaccatga

SEQ ID NO: 66341 - DNA, 25 bp, Saccharomyces pastorianus
tgactcccagagatgaggacgcttt

SEQ ID NO: 66342 - DNA, 25 bp, Saccharomyces pastorianus
gctgccgataatgaggaccgaaaat

SEQ ID NO: 66343 - DNA, 25 bp, Saccharomyces pastorianus
atcgttaagcctacagatgtcctgg

SEQ ID NO: 66344 - DNA, 25 bp, Saccharomyces pastorianus
gaataaccgctttacctacagtgga

SEQ ID NO: 66345 - DNA, 25 bp, Saccharomyces pastorianus
aatcttcacttttaagccatccaca

SEQ ID NO: 66346 - DNA, 25 bp, Saccharomyces pastorianus
ttgcgtttagaagctttgggtacct

SEQ ID NO: 66347 - DNA, 25 bp, Saccharomyces pastorianus
ttgatattgtgcctgtgtttgctcc

SEQ ID NO: 66348 - DNA, 25 bp, Saccharomyces pastorianus
ctccttggcctgcacttcaaaaata

SEQ ID NO: 66349 - DNA, 25 bp, Saccharomyces pastorianus
agatgagcatgaacgccttttgcgt

SEQ ID NO: 66350 - DNA, 25 bp, Saccharomyces pastorianus
aaacggactggccaaaagaacatga

SEQ ID NO: 66351 - DNA, 25 bp, Saccharomyces pastorianus
aaggagcaagacctggttcttctgc

SEQ ID NO: 66352 - DNA, 25 bp, Saccharomyces pastorianus
ctggttcttctgctgtgcgttgata

SEQ ID NO: 66353 - DNA, 25 bp, Saccharomyces pastorianus
atggccgaactaaaaccatctctcg

SEQ ID NO: 66354 - DNA, 25 bp, Saccharomyces pastorianus
aatccaccaagaacagtggcggctc

SEQ ID NO: 66355 - DNA, 25 bp, Saccharomyces pastorianus
gtggcggctcacaaaagggcaagaa

SEQ ID NO: 66356 - DNA, 25 bp, Saccharomyces pastorianus
aacgattgctggtcaaaaatccacc

SEQ ID NO: 66357 - DNA, 25 bp, Saccharomyces pastorianus
ataactggttcatttcaagcgaagg

SEQ ID NO: 66358 - DNA, 25 bp, Saccharomyces pastorianus
agccggcatattatgtatgtcttca

SEQ ID NO: 66359 - DNA, 25 bp, Saccharomyces pastorianus
agcagagacggatcaaatcttttct

SEQ ID NO: 66360 - DNA, 25 bp, Saccharomyces pastorianus
gaacaccttgatgcaagccggcata

SEQ ID NO: 66361 - DNA, 25 bp, Saccharomyces pastorianus
tccccgtggtggtgttttgctaaga

SEQ ID NO: 66362 - DNA, 25 bp, Saccharomyces pastorianus
agttctgataattccgttttgccgg

SEQ ID NO: 66363 - DNA, 25 bp, Saccharomyces pastorianus
gaagaggattcgtactccctatttt

SEQ ID NO: 66364 - DNA, 25 bp, Saccharomyces pastorianus
tcgtaatgggcttcgggtttttatg

SEQ ID NO: 66365 - DNA, 25 bp, Saccharomyces pastorianus
taccacctgctcaactcgtaatggg

SEQ ID NO: 66366 - DNA, 25 bp, Saccharomyces pastorianus
gaaaaagatcagaaccctctaccac

SEQ ID NO: 66367 - DNA, 25 bp, Saccharomyces pastorianus
tggtctaagaagatagcctcctccc

SEQ ID NO: 66368 - DNA, 25 bp, Saccharomyces pastorianus
gatactgaacagacaagcgccgatt

SEQ ID NO: 66369 - DNA, 25 bp, Saccharomyces pastorianus
agagcttcaaagctgaccctgaaat

SEQ ID NO: 66370 - DNA, 25 bp, Saccharomyces pastorianus
atgacaaatcaatgcctcgacttcc

SEQ ID NO: 66371 - DNA, 25 bp, Saccharomyces pastorianus
aaacaactttgatttagcctgcgta

SEQ ID NO: 66372 - DNA, 25 bp, Saccharomyces pastorianus
ggatttcaaatcatacctcatagct

SEQ ID NO: 66373 - DNA, 25 bp, Saccharomyces pastorianus
atggaagctaccctattagtctgga

SEQ ID NO: 66374 - DNA, 25 bp, Saccharomyces pastorianus
aaagatgcggtgtgactctacttcc

SEQ ID NO: 66375 - DNA, 25 bp, Saccharomyces pastorianus
tacttccgatactcactacgcaagt

SEQ ID NO: 66376 - DNA, 25 bp, Saccharomyces pastorianus
tagcctgcgtattgtctttagcaaa

SEQ ID NO: 66377 - DNA, 25 bp, Saccharomyces pastorianus
atggctggttcacaagaggtctact

SEQ ID NO: 66378 - DNA, 25 bp, Saccharomyces pastorianus
ggtcccatcacttttatcatttcaa

SEQ ID NO: 66379 - DNA, 25 bp, Saccharomyces pastorianus
gaaacaggtgtttctgcttcagttt

SEQ ID NO: 66380 - DNA, 25 bp, Saccharomyces pastorianus
gctccgtattcaacttctttggtgt

SEQ ID NO: 66381 - DNA, 25 bp, Saccharomyces pastorianus
tatcagcctctttccctgaattaga

SEQ ID NO: 66382 - DNA, 25 bp, Saccharomyces pastorianus
ttcttctcttttcttgcggaacaaa

SEQ ID NO: 66383 - DNA, 25 bp, Saccharomyces pastorianus
aactttgctgccattaacgttgaag

SEQ ID NO: 66384 - DNA, 25 bp, Saccharomyces pastorianus
gaaactcattcttattggccttggt

SEQ ID NO: 66385 - DNA, 25 bp, Saccharomyces pastorianus
ttcagttttcaggacagcgcatcgt

SEQ ID NO: 66386 - DNA, 25 bp, Saccharomyces pastorianus
ctccttttttccctagcagaagttg

SEQ ID NO: 66387 - DNA, 25 bp, Saccharomyces pastorianus
ggccttggttgttactatgatcatc

SEQ ID NO: 66388 - DNA, 25 bp, Saccharomyces pastorianus
tagttagtgccatcgttctgatctt

SEQ ID NO: 66389 - DNA, 25 bp, Saccharomyces pastorianus
cagatgaagtttgtcctcctttttt

SEQ ID NO: 66390 - DNA, 25 bp, Saccharomyces pastorianus
aaattggccagtgctttctcgaaag

SEQ ID NO: 66391 - DNA, 25 bp, Saccharomyces pastorianus
gaaagtggcacaattttccgtccaa

SEQ ID NO: 66392 - DNA, 25 bp, Saccharomyces pastorianus
taccggagtcggcttctttggatga

SEQ ID NO: 66393 - DNA, 25 bp, Saccharomyces pastorianus
tgcattcggttttatcatctttcaa

SEQ ID NO: 66394 - DNA, 25 bp, Saccharomyces pastorianus
atgtttctccttttctgtggtgata

SEQ ID NO: 66395 - DNA, 25 bp, Saccharomyces pastorianus
ttgacgataattttgggccattcta

SEQ ID NO: 66396 - DNA, 25 bp, Saccharomyces pastorianus
gcccttagtatctttgcattcggtt

SEQ ID NO: 66397 - DNA, 25 bp, Saccharomyces pastorianus
gaagactctacctgcgttatagaat

SEQ ID NO: 66398 - DNA, 25 bp, Saccharomyces pastorianus
aacagggcctgttctatcgtatgag

SEQ ID NO: 66399 - DNA, 25 bp, Saccharomyces pastorianus
gctacgtggtattgcttcttcaaga

SEQ ID NO: 66400 - DNA, 25 bp, Saccharomyces pastorianus
gtctgtgcactttttgtagctacgt

SEQ ID NO: 66401 - DNA, 25 bp, Saccharomyces pastorianus
attacctgggtgcacaatcttttga

SEQ ID NO: 66402 - DNA, 25 bp, Saccharomyces pastorianus
aagcgttcgacgatcttcgcgatag

SEQ ID NO: 66403 - DNA, 25 bp, Saccharomyces pastorianus
aaggaagccctgatgaactcatttg

SEQ ID NO: 66404 - DNA, 25 bp, Saccharomyces pastorianus
agagcactcggaacacgcgttttta

SEQ ID NO: 66405 - DNA, 25 bp, Saccharomyces pastorianus
aatatctcaattcctcattttccct

SEQ ID NO: 66406 - DNA, 25 bp, Saccharomyces pastorianus
tttgttgccgcgttacgagagcact

SEQ ID NO: 66407 - DNA, 25 bp, Saccharomyces pastorianus
ctgggagatcttttggcttttgaac

SEQ ID NO: 66408 - DNA, 25 bp, Saccharomyces pastorianus
tgattcttctttccaacaagtctcc

SEQ ID NO: 66409 - DNA, 25 bp, Saccharomyces pastorianus
aggacacggctcctgtctttatgaa

SEQ ID NO: 66410 - DNA, 25 bp, Saccharomyces pastorianus
attttgatgctctcagtggcacaga

SEQ ID NO: 66411 - DNA, 25 bp, Saccharomyces pastorianus
cattttccctccctatcagaataaa

SEQ ID NO: 66412 - DNA, 25 bp, Saccharomyces pastorianus
aggcaatgtttctgcacacactact

SEQ ID NO: 66413 - DNA, 25 bp, Saccharomyces pastorianus
caaaagctgtcggaggttgcgccta

SEQ ID NO: 66414 - DNA, 25 bp, Saccharomyces pastorianus
ggagtgcgttaagtgacccatacct

SEQ ID NO: 66415 - DNA, 25 bp, Saccharomyces pastorianus
accattgcatgggttagccgcgcaa

SEQ ID NO: 66416 - DNA, 25 bp, Saccharomyces pastorianus
tgggatcgcgttttaggcctaccaa

SEQ ID NO: 66417 - DNA, 25 bp, Saccharomyces pastorianus
tcagctactcatccggcataatggg

SEQ ID NO: 66418 - DNA, 25 bp, Saccharomyces pastorianus
taagaatccgttccccaatgtagac

SEQ ID NO: 66419 - DNA, 25 bp, Saccharomyces pastorianus
ttgaatttgcgcaagccaggcccga

SEQ ID NO: 66420 - DNA, 25 bp, Saccharomyces pastorianus
gaactcaagccgtgtaattcctgga

SEQ ID NO: 66421 - DNA, 25 bp, Saccharomyces pastorianus
aatgtagactctgcttccggaattt

SEQ ID NO: 66422 - DNA, 25 bp, Saccharomyces pastorianus
tataggacctttgacccaacttgtt

SEQ ID NO: 66423 - DNA, 25 bp, Saccharomyces pastorianus
gtatccttctgggagttggccaaca

SEQ ID NO: 66424 - DNA, 25 bp, Saccharomyces pastorianus
gagagatgaaacttctggcccaaga

SEQ ID NO: 66425 - DNA, 25 bp, Saccharomyces pastorianus
ggagcgcgcacggattcgatgacaa

SEQ ID NO: 66426 - DNA, 25 bp, Saccharomyces pastorianus
ttcccggctaccaagttagtgtaca

SEQ ID NO: 66427 - DNA, 25 bp, Saccharomyces pastorianus
gtacaatctctctccaagtttcaat

SEQ ID NO: 66428 - DNA, 25 bp, Saccharomyces pastorianus
tatttgcaccatactcagacttgat

SEQ ID NO: 66429 - DNA, 25 bp, Saccharomyces pastorianus
agttatttttgattgggacgctcca

SEQ ID NO: 66430 - DNA, 25 bp, Saccharomyces pastorianus
gatgtactaacacaccagctttggt

SEQ ID NO: 66431 - DNA, 25 bp, Saccharomyces pastorianus
tggagaccaaaacccctgatctaga

SEQ ID NO: 66432 - DNA, 25 bp, Saccharomyces pastorianus
tttacggtgcagttagtttcccttg

SEQ ID NO: 66433 - DNA, 25 bp, Saccharomyces pastorianus
gatctagagcaagcacgttcgtttt

SEQ ID NO: 66434 - DNA, 25 bp, Saccharomyces pastorianus
gatcgtttgctaaattcttcggatt

SEQ ID NO: 66435 - DNA, 25 bp, Saccharomyces pastorianus
gagacaactacagtggctataccat

SEQ ID NO: 66436 - DNA, 25 bp, Saccharomyces pastorianus
ttcgatttcgacagtttgttgccgt

SEQ ID NO: 66437 - DNA, 25 bp, Saccharomyces pastorianus
tcggattacacgcaagcatctgttt

SEQ ID NO: 66438 - DNA, 25 bp, Saccharomyces pastorianus
ggacatggtacctcattcttgttac

SEQ ID NO: 66439 - DNA, 25 bp, Saccharomyces pastorianus
aaggtgttttcattgacgattctca

SEQ ID NO: 66440 - DNA, 25 bp, Saccharomyces pastorianus
tgagtgtggctccatcttgaccaca

SEQ ID NO: 66441 - DNA, 25 bp, Saccharomyces pastorianus
cagagcagatatttatgtcggtgtt

SEQ ID NO: 66442 - DNA, 25 bp, Saccharomyces pastorianus
ggattctgaattatccgctatgggt

SEQ ID NO: 66443 - DNA, 25 bp, Saccharomyces pastorianus
catctgtttgtcgtgagtgtggctc

SEQ ID NO: 66444 - DNA, 25 bp, Saccharomyces pastorianus
tccgttccaccggtcctgttaatag

SEQ ID NO: 66445 - DNA, 25 bp, Saccharomyces pastorianus
aatctcggttcattaatcctcctaa

SEQ ID NO: 66446 - DNA, 25 bp, Saccharomyces pastorianus
gtccaacgatggtgtttcttctgca

SEQ ID NO: 66447 - DNA, 25 bp, Saccharomyces pastorianus
attgcaaagcccatgtccaacgatg

SEQ ID NO: 66448 - DNA, 25 bp, Saccharomyces pastorianus
gattaaaccacctagccaaaccaga

SEQ ID NO: 66449 - DNA, 25 bp, Saccharomyces pastorianus
aacaagtttccattgcaaagcccat

SEQ ID NO: 66450 - DNA, 25 bp, Saccharomyces pastorianus
attagaggaagctgtccggccacat

SEQ ID NO: 66451 - DNA, 25 bp, Saccharomyces pastorianus
aaatcggcatttcccttattagagg

SEQ ID NO: 66452 - DNA, 25 bp, Saccharomyces pastorianus
gaacggcagatttccgcactctgga

SEQ ID NO: 66453 - DNA, 25 bp, Saccharomyces pastorianus
tgaaaccgccaatagcagctacctt

SEQ ID NO: 66454 - DNA, 25 bp, Saccharomyces pastorianus
tccggccacatattggttcctttaa

SEQ ID NO: 66455 - DNA, 25 bp, Saccharomyces pastorianus
gcactctggaacgtgaatctcggtt

SEQ ID NO: 66456 - DNA, 25 bp, Saccharomyces pastorianus
gttgtacttcgataaatgcctgggt

SEQ ID NO: 66457 - DNA, 25 bp, Saccharomyces pastorianus
aactgcctgctgatgtgacggtgga

SEQ ID NO: 66458 - DNA, 25 bp, Saccharomyces pastorianus
tacctatcaaagtttatgggcccat

SEQ ID NO: 66459 - DNA, 25 bp, Saccharomyces pastorianus
ggttgcaatatgacgagatcctcaa

SEQ ID NO: 66460 - DNA, 25 bp, Saccharomyces pastorianus
tagagtcgccgggatcgcaatcgca

SEQ ID NO: 66461 - DNA, 25 bp, Saccharomyces pastorianus
aacgacaaagatcccaaccgcagtg

SEQ ID NO: 66462 - DNA, 25 bp, Saccharomyces pastorianus
aaccgcagtgacgatgctctatacg

SEQ ID NO: 66463 - DNA, 25 bp, Saccharomyces pastorianus
ttgtgctggccttaagttgtacttc

SEQ ID NO: 66464 - DNA, 25 bp, Saccharomyces pastorianus
tacatcatatggctggctatccgct

SEQ ID NO: 66465 - DNA, 25 bp, Saccharomyces pastorianus
gggcccatccatctgttgaggctga

SEQ ID NO: 66466 - DNA, 25 bp, Saccharomyces pastorianus
gaggctgacaagtgtcctaccagaa

SEQ ID NO: 66467 - DNA, 25 bp, Saccharomyces pastorianus
acttctactagtttgggcggatccg

SEQ ID NO: 66468 - DNA, 25 bp, Saccharomyces pastorianus
acaggtgttcctaatgacaagccgg

SEQ ID NO: 66469 - DNA, 25 bp, Saccharomyces pastorianus
taaaggagacacaaccacagaattt

SEQ ID NO: 66470 - DNA, 25 bp, Saccharomyces pastorianus
tgcctggcgttccatggtcctctaa

SEQ ID NO: 66471 - DNA, 25 bp, Saccharomyces pastorianus
gaacaagaatttgcgctcggcggac

SEQ ID NO: 66472 - DNA, 25 bp, Saccharomyces pastorianus
agaaatcgcttctcgagcagcagaa

SEQ ID NO: 66473 - DNA, 25 bp, Saccharomyces pastorianus
gatggccgtgcaaatgccggtataa

SEQ ID NO: 66474 - DNA, 25 bp, Saccharomyces pastorianus
tcgttagcgtcctccatgagtggaa

SEQ ID NO: 66475 - DNA, 25 bp, Saccharomyces pastorianus
gggttcaactcgcaaacaataaagg

SEQ ID NO: 66476 - DNA, 25 bp, Saccharomyces pastorianus
atgggatccatcttctcaaacttat

SEQ ID NO: 66477 - DNA, 25 bp, Saccharomyces pastorianus
agagtgtgtcgcaaagttcgttagc

SEQ ID NO: 66478 - DNA, 25 bp, Saccharomyces pastorianus
aattgttgctccattgactgacaga

SEQ ID NO: 66479 - DNA, 25 bp, Saccharomyces pastorianus
agacgttagcaagactgaaaaggac

SEQ ID NO: 66480 - DNA, 25 bp, Saccharomyces pastorianus
gttgctccattgactgacagatata

SEQ ID NO: 66481 - DNA, 25 bp, Saccharomyces pastorianus
aattagagcctctgttaacgaagct

SEQ ID NO: 66482 - DNA, 25 bp, Saccharomyces pastorianus
tgagagacgttagcaagactgaaaa

SEQ ID NO: 66483 - DNA, 25 bp, Saccharomyces pastorianus
tgttaacgaagcttcaagatccgga

SEQ ID NO: 66484 - DNA, 25 bp, Saccharomyces pastorianus
aaggacgaaattagagcctctgtta

SEQ ID NO: 66485 - DNA, 25 bp, Saccharomyces pastorianus
gcctctgttaacgaagcttcaagat

SEQ ID NO: 66486 - DNA, 25 bp, Saccharomyces pastorianus
agagcctctgttaacgaagcttcaa

SEQ ID NO: 66487 - DNA, 25 bp, Saccharomyces pastorianus
gacagatatattttgagagacgtta

SEQ ID NO: 66488 - DNA, 25 bp, Saccharomyces pastorianus
aaaaattgttgctccattgactgac

SEQ ID NO: 66489 - DNA, 25 bp, Saccharomyces pastorianus
gaatcatccaaggttctaccaccaa

SEQ ID NO: 66490 - DNA, 25 bp, Saccharomyces pastorianus
caggtcaacttccttggcaaacggt

SEQ ID NO: 66491 - DNA, 25 bp, Saccharomyces pastorianus
tagtgccccgtttcaaggccagaaa

SEQ ID NO: 66492 - DNA, 25 bp, Saccharomyces pastorianus
ggcaatccttgtacccttattagta

SEQ ID NO: 66493 - DNA, 25 bp, Saccharomyces pastorianus
ttccaatattgacttacccacgtac

SEQ ID NO: 66494 - DNA, 25 bp, Saccharomyces pastorianus
aagacgggcctggtccaatagttca

SEQ ID NO: 66495 - DNA, 25 bp, Saccharomyces pastorianus
ccacgtacgatatggccactactga

SEQ ID NO: 66496 - DNA, 25 bp, Saccharomyces pastorianus
aacaactacatctttccaggtcaac

SEQ ID NO: 66497 - DNA, 25 bp, Saccharomyces pastorianus
gaagaggcaacgtctgtctcagcat

SEQ ID NO: 66498 - DNA, 25 bp, Saccharomyces pastorianus
ggaccgaagatttttcaccgcaaat

SEQ ID NO: 66499 - DNA, 25 bp, Saccharomyces pastorianus
tggatggcttactttcgcaagacat

SEQ ID NO: 66500 - DNA, 25 bp, Saccharomyces pastorianus
tgtggatccacattcgcatacctac

SEQ ID NO: 66501 - DNA, 25 bp, Saccharomyces pastorianus
tttagtgagaactccgcccgaaata

SEQ ID NO: 66502 - DNA, 25 bp, Saccharomyces pastorianus
cagagtatccactccatttagtgag

SEQ ID NO: 66503 - DNA, 25 bp, Saccharomyces pastorianus
tccatttccttcttcatggctgaaa

SEQ ID NO: 66504 - DNA, 25 bp, Saccharomyces pastorianus
gggagaattctctctcttatgagat

SEQ ID NO: 66505 - DNA, 25 bp, Saccharomyces pastorianus
gagccgacttaaattccttggtata

SEQ ID NO: 66506 - DNA, 25 bp, Saccharomyces pastorianus
gcaaatcccgtagcaaaactccatt

SEQ ID NO: 66507 - DNA, 25 bp, Saccharomyces pastorianus
gctgctgactctgcgtcacaaagag

SEQ ID NO: 66508 - DNA, 25 bp, Saccharomyces pastorianus
tgacagcaatggttcactcaccgct

SEQ ID NO: 66509 - DNA, 25 bp, Saccharomyces pastorianus
gcatacctactgtgatcctaacgaa

SEQ ID NO: 66510 - DNA, 25 bp, Saccharomyces pastorianus
attacccatcggcaaaggtctctta

SEQ ID NO: 66511 - DNA, 25 bp, Saccharomyces pastorianus
aggtttccgcagtacaagctgacta

SEQ ID NO: 66512 - DNA, 25 bp, Saccharomyces pastorianus
ttccctcgtggaacctaggcaagtg

SEQ ID NO: 66513 - DNA, 25 bp, Saccharomyces pastorianus
gggttgggcacaagccacatgcacg

SEQ ID NO: 66514 - DNA, 25 bp, Saccharomyces pastorianus
gattgctacgagtttgcagagtact

SEQ ID NO: 66515 - DNA, 25 bp, Saccharomyces pastorianus
aggagctgtccattaggtttccgca

SEQ ID NO: 66516 - DNA, 25 bp, Saccharomyces pastorianus
gggtcctcatctttgatcgaaggca

SEQ ID NO: 66517 - DNA, 25 bp, Saccharomyces pastorianus
gccggcgccagcataaactcaatga

SEQ ID NO: 66518 - DNA, 25 bp, Saccharomyces pastorianus
acaagaccatcaccttagacttcaa

SEQ ID NO: 66519 - DNA, 25 bp, Saccharomyces pastorianus
aagctgactacattcgccaaccaag

SEQ ID NO: 66520 - DNA, 25 bp, Saccharomyces pastorianus
ggctgggcgctgttacaatggctaa

SEQ ID NO: 66521 - DNA, 25 bp, Saccharomyces pastorianus
actgctggcgacaatgccaacggca

SEQ ID NO: 66522 - DNA, 25 bp, Saccharomyces pastorianus
actaccgaatcttccgccaattgat

SEQ ID NO: 66523 - DNA, 25 bp, Saccharomyces pastorianus
aattgatccagctcttgcgggcaaa

SEQ ID NO: 66524 - DNA, 25 bp, Saccharomyces pastorianus
ggactccaagctgttgtgctggtca

SEQ ID NO: 66525 - DNA, 25 bp, Saccharomyces pastorianus
acgtggtagagcttctccccgagag

SEQ ID NO: 66526 - DNA, 25 bp, Saccharomyces pastorianus
agagatacctgagcgacttcctgga

SEQ ID NO: 66527 - DNA, 25 bp, Saccharomyces pastorianus
aaggtctcccggttgtgcatatcga

SEQ ID NO: 66528 - DNA, 25 bp, Saccharomyces pastorianus
gaaaagatcattctccaggtcgcgc

SEQ ID NO: 66529 - DNA, 25 bp, Saccharomyces pastorianus
aagaactcacctctttcgacgaata

SEQ ID NO: 66530 - DNA, 25 bp, Saccharomyces pastorianus
tcgacaatggcttctggtccgacaa

SEQ ID NO: 66531 - DNA, 25 bp, Saccharomyces pastorianus
gacgaggaactacgcgatgacatca

SEQ ID NO: 66532 - DNA, 25 bp, Saccharomyces pastorianus
tatcgatcatcttgcagtgctgttc

SEQ ID NO: 66533 - DNA, 25 bp, Saccharomyces pastorianus
aaccgtctcgggtctcggcgcgtgc

SEQ ID NO: 66534 - DNA, 25 bp, Saccharomyces pastorianus
aacacaaacaagctatctctccact

SEQ ID NO: 66535 - DNA, 25 bp, Saccharomyces pastorianus
taatataacatcaagcaagcaagca

SEQ ID NO: 66536 - DNA, 25 bp, Saccharomyces pastorianus
gtgtcttctctcttaccttgttctt

SEQ ID NO: 66537 - DNA, 25 bp, Saccharomyces pastorianus
tgaactactctctcgtgtcttctct

SEQ ID NO: 66538 - DNA, 25 bp, Saccharomyces pastorianus
ggtctctggttcttcattaactgaa

SEQ ID NO: 66539 - DNA, 25 bp, Saccharomyces pastorianus
attaactgaactactctctcgtgtc

SEQ ID NO: 66540 - DNA, 25 bp, Saccharomyces pastorianus
ttctctcttaccttgttcttgtata

SEQ ID NO: 66541 - DNA, 25 bp, Saccharomyces pastorianus
cggcgcgtgcgtatataaggtctct

SEQ ID NO: 66542 - DNA, 25 bp, Saccharomyces pastorianus
gtgcgtatataaggtctctggttct

SEQ ID NO: 66543 - DNA, 25 bp, Saccharomyces pastorianus
ataaggtctctggttcttcattaac

SEQ ID NO: 66544 - DNA, 25 bp, Saccharomyces pastorianus
gcagacgatcatgccgctgatggga

SEQ ID NO: 66545 - DNA, 25 bp, Saccharomyces pastorianus
tgatcaagacggacgctggcgccaa

SEQ ID NO: 66546 - DNA, 25 bp, Saccharomyces pastorianus
gaggttccctgatgagcctagcgcg

SEQ ID NO: 66547 - DNA, 25 bp, Saccharomyces pastorianus
aacgaactatcgatcagcacgccaa

SEQ ID NO: 66548 - DNA, 25 bp, Saccharomyces pastorianus
acatctacgattgtgtcaccatcct

SEQ ID NO: 66549 - DNA, 25 bp, Saccharomyces pastorianus
gatgtttttctcctcgaacgaacta

SEQ ID NO: 66550 - DNA, 25 bp, Saccharomyces pastorianus
ggagccatgctatcaggatcatcgc

SEQ ID NO: 66551 - DNA, 25 bp, Saccharomyces pastorianus
gagaaactggccacgttcatcgagc

SEQ ID NO: 66552 - DNA, 25 bp, Saccharomyces pastorianus
taagcacccgatacagacgtcgagt

SEQ ID NO: 66553 - DNA, 25 bp, Saccharomyces pastorianus
gtgttcgtaccactttgtcaaactg

SEQ ID NO: 66554 - DNA, 25 bp, Saccharomyces pastorianus
ttcatcgagctttacgcacagctgt

SEQ ID NO: 66555 - DNA, 25 bp, Saccharomyces pastorianus
aatccaacaacacgctagatacgat

SEQ ID NO: 66556 - DNA, 25 bp, Saccharomyces pastorianus
acacgctagatacgattgttctttc

SEQ ID NO: 66557 - DNA, 25 bp, Saccharomyces pastorianus
gaaggttggtatcactggtaagtac

SEQ ID NO: 66558 - DNA, 25 bp, Saccharomyces pastorianus
ggttcctctttgagaagacaagtca

SEQ ID NO: 66559 - DNA, 25 bp, Saccharomyces pastorianus
gctagatacgattgttctttctgtg

SEQ ID NO: 66560 - DNA, 25 bp, Saccharomyces pastorianus
actaagaaggttggtatcactggta

SEQ ID NO: 66561 - DNA, 25 bp, Saccharomyces pastorianus
gacaagtcaagaagttggaaatcca

SEQ ID NO: 66562 - DNA, 25 bp, Saccharomyces pastorianus
ttggaaatccaacaacacgctagat

SEQ ID NO: 66563 - DNA, 25 bp, Saccharomyces pastorianus
acgattgttctttctgtggtaagaa

SEQ ID NO: 66564 - DNA, 25 bp, Saccharomyces pastorianus
tggtatcactggtaagtacggtgtc

SEQ ID NO: 66565 - DNA, 25 bp, Saccharomyces pastorianus
gatacgattgttctttctgtggtaa

SEQ ID NO: 66566 - DNA, 25 bp, Saccharomyces pastorianus
aacgctgaagtcaacgctttacaag

SEQ ID NO: 66567 - DNA, 25 bp, Saccharomyces pastorianus
taacgcttatttcccctggactgca

SEQ ID NO: 66568 - DNA, 25 bp, Saccharomyces pastorianus
aatacctgacattagactgctttgg

SEQ ID NO: 66569 - DNA, 25 bp, Saccharomyces pastorianus
atactccaaacatccaggctcattt

SEQ ID NO: 66570 - DNA, 25 bp, Saccharomyces pastorianus
gggacgttgcattttggttgccaat

SEQ ID NO: 66571 - DNA, 25 bp, Saccharomyces pastorianus
caggctcatttagggacgttgcatt

SEQ ID NO: 66572 - DNA, 25 bp, Saccharomyces pastorianus
gattagctctttcaaaccatactcc

SEQ ID NO: 66573 - DNA, 25 bp, Saccharomyces pastorianus
agacgtgctacttaaagcgggctat

SEQ ID NO: 66574 - DNA, 25 bp, Saccharomyces pastorianus
ggaactttgcggttgcggattgatt

SEQ ID NO: 66575 - DNA, 25 bp, Saccharomyces pastorianus
gctatgcttcttttcgaaatacctg

SEQ ID NO: 66576 - DNA, 25 bp, Saccharomyces pastorianus
gggcctggaccgtattgctatgctt

SEQ ID NO: 66577 - DNA, 25 bp, Saccharomyces pastorianus
atgtatcctctctgtctgacgttcc

SEQ ID NO: 66578 - DNA, 25 bp, Saccharomyces pastorianus
cagcaatgtacgtcaattcaggcca

SEQ ID NO: 66579 - DNA, 25 bp, Saccharomyces pastorianus
tgtctgacgttcctgtgcggatccg

SEQ ID NO: 66580 - DNA, 25 bp, Saccharomyces pastorianus
tactcttgacgtccacagcaatgta

SEQ ID NO: 66581 - DNA, 25 bp, Saccharomyces pastorianus
gtgcggatccgtcttgcacacaatg

SEQ ID NO: 66582 - DNA, 25 bp, Saccharomyces pastorianus
atcagcttcttgatgcttgcaaact

SEQ ID NO: 66583 - DNA, 25 bp, Saccharomyces pastorianus
ttgcacacaatgcacccgattggtg

SEQ ID NO: 66584 - DNA, 25 bp, Saccharomyces pastorianus
gaatacggctctgataagtccgcgt

SEQ ID NO: 66585 - DNA, 25 bp, Saccharomyces pastorianus
gtacgtcaattcaggccattggttt

SEQ ID NO: 66586 - DNA, 25 bp, Saccharomyces pastorianus
gcactaggtgtgctactcttgacgt

SEQ ID NO: 66587 - DNA, 25 bp, Saccharomyces pastorianus
ataagtccgcgtctatcagcttctt

SEQ ID NO: 66588 - DNA, 25 bp, Saccharomyces pastorianus
ttcatacaggttcagcgccgccaca

SEQ ID NO: 66589 - DNA, 25 bp, Saccharomyces pastorianus
atcccttcatacaggttcagcgccg

SEQ ID NO: 66590 - DNA, 25 bp, Saccharomyces pastorianus
caggttcagcgccgccacattttct

SEQ ID NO: 66591 - DNA, 25 bp, Saccharomyces pastorianus
tcatacaggttcagcgccgccacat

SEQ ID NO: 66592 - DNA, 25 bp, Saccharomyces pastorianus
gaaccccatcccttcatacaggttc

SEQ ID NO: 66593 - DNA, 25 bp, Saccharomyces pastorianus
acaggttcagcgccgccacattttc

SEQ ID NO: 66594 - DNA, 25 bp, Saccharomyces pastorianus
tacaggttcagcgccgccacatttt

SEQ ID NO: 66595 - DNA, 25 bp, Saccharomyces pastorianus
atacaggttcagcgccgccacattt

SEQ ID NO: 66596 - DNA, 25 bp, Saccharomyces pastorianus
tgaaccccatcccttcatacaggtt

SEQ ID NO: 66597 - DNA, 25 bp, Saccharomyces pastorianus
catacaggttcagcgccgccacatt

SEQ ID NO: 66598 - DNA, 25 bp, Saccharomyces pastorianus
aaccccatcccttcatacaggttca

SEQ ID NO: 66599 - DNA, 25 bp, Saccharomyces pastorianus
gaagccatagacctcatcgaatcgc

SEQ ID NO: 66600 - DNA, 25 bp, Saccharomyces pastorianus
ttatgcccggaaacctgtcttcatg

SEQ ID NO: 66601 - DNA, 25 bp, Saccharomyces pastorianus
attgggactccacgcacaggctgaa

SEQ ID NO: 66602 - DNA, 25 bp, Saccharomyces pastorianus
gaaccagtgtgtctacaaggcccct

SEQ ID NO: 66603 - DNA, 25 bp, Saccharomyces pastorianus
gatctgtgatttcggtctcgctaga

SEQ ID NO: 66604 - DNA, 25 bp, Saccharomyces pastorianus
tcggctgtatccttgcggaatttta

SEQ ID NO: 66605 - DNA, 25 bp, Saccharomyces pastorianus
acctgagctgcttttgtctaaccaa

SEQ ID NO: 66606 - DNA, 25 bp, Saccharomyces pastorianus
gagattccatgcaccaggttttcga

SEQ ID NO: 66607 - DNA, 25 bp, Saccharomyces pastorianus
atggtctaatatgttcccctttgcg

SEQ ID NO: 66608 - DNA, 25 bp, Saccharomyces pastorianus
ggtatccataccgagtttttccaat

SEQ ID NO: 66609 - DNA, 25 bp, Saccharomyces pastorianus
atcgaatcgctactccattgggact

SEQ ID NO: 66610 - DNA, 25 bp, Saccharomyces pastorianus
gcacagtcgaaaattgaacagctta

SEQ ID NO: 66611 - DNA, 25 bp, Saccharomyces pastorianus
gaaatctttcttcagagccatccaa

SEQ ID NO: 66612 - DNA, 25 bp, Saccharomyces pastorianus
acttctattctctatgtggttctaa

SEQ ID NO: 66613 - DNA, 25 bp, Saccharomyces pastorianus
ggctccataaaaccttctaacaaga

SEQ ID NO: 66614 - DNA, 25 bp, Saccharomyces pastorianus
attaaaggcgctaactccataaaag

SEQ ID NO: 66615 - DNA, 25 bp, Saccharomyces pastorianus
gaacgaactatcgtattgttccatc

SEQ ID NO: 66616 - DNA, 25 bp, Saccharomyces pastorianus
aacagccgaaatcaggagcacagtc

SEQ ID NO: 66617 - DNA, 25 bp, Saccharomyces pastorianus
cgtaaacgtcttacaacatgcttat

SEQ ID NO: 66618 - DNA, 25 bp, Saccharomyces pastorianus
aacgcagtgcttattggtcttgata

SEQ ID NO: 66619 - DNA, 25 bp, Saccharomyces pastorianus
cgtattgttccatcgatgatttgaa

SEQ ID NO: 66620 - DNA, 25 bp, Saccharomyces pastorianus
gcactaatgccaccaaaggctccat

SEQ ID NO: 66621 - DNA, 25 bp, Saccharomyces pastorianus
aaggtctttgctacactagaaatag

SEQ ID NO: 66622 - DNA, 25 bp, Saccharomyces pastorianus
gacagatttaatgacatccaatgga

SEQ ID NO: 66623 - DNA, 25 bp, Saccharomyces pastorianus
gtaccggataatgcaccaaaaatgc

SEQ ID NO: 66624 - DNA, 25 bp, Saccharomyces pastorianus
aacgcactaataccttctttagcat

SEQ ID NO: 66625 - DNA, 25 bp, Saccharomyces pastorianus
gcactaataccttctttagcatata

SEQ ID NO: 66626 - DNA, 25 bp, Saccharomyces pastorianus
tgaaaaacgcactaataccttcttt

SEQ ID NO: 66627 - DNA, 25 bp, Saccharomyces pastorianus
cagtttgcatgacagatttaatgac

SEQ ID NO: 66628 - DNA, 25 bp, Saccharomyces pastorianus
catcaaccataaggcggtaccggat

SEQ ID NO: 66629 - DNA, 25 bp, Saccharomyces pastorianus
aaggcggtaccggataatgcaccaa

SEQ ID NO: 66630 - DNA, 25 bp, Saccharomyces pastorianus
gggcttttgtaaattgtcagtttgc

SEQ ID NO: 66631 - DNA, 25 bp, Saccharomyces pastorianus
gcatataaggtctttgctacactag

SEQ ID NO: 66632 - DNA, 25 bp, Saccharomyces pastorianus
agcagtatttgcagacccgaggcca

SEQ ID NO: 66633 - DNA, 25 bp, Saccharomyces pastorianus
acggtagcgttcttggacgtggcca

SEQ ID NO: 66634 - DNA, 25 bp, Saccharomyces pastorianus
gaggccacgaagtcgtagtcgttga

SEQ ID NO: 66635 - DNA, 25 bp, Saccharomyces pastorianus
gaacatcaacttcaagagcgacggt

SEQ ID NO: 66636 - DNA, 25 bp, Saccharomyces pastorianus
ccacgctgtgtggtaggtgagaaca

SEQ ID NO: 66637 - DNA, 25 bp, Saccharomyces pastorianus
gacgtggccacaatatgagattcca

SEQ ID NO: 66638 - DNA, 25 bp, Saccharomyces pastorianus
gtcgccatgcgacatgtgcactggt

SEQ ID NO: 66639 - DNA, 25 bp, Saccharomyces pastorianus
gaaacagttcattgacgagaggccc

SEQ ID NO: 66640 - DNA, 25 bp, Saccharomyces pastorianus
aggataccactttgtacacgactct

SEQ ID NO: 66641 - DNA, 25 bp, Saccharomyces pastorianus
tgctacgctgcatggtgagatctcc

SEQ ID NO: 66642 - DNA, 25 bp, Saccharomyces pastorianus
aaaagggcatggacatcgcgtatga

SEQ ID NO: 66643 - DNA, 25 bp, Saccharomyces pastorianus
tccacaagctttatcctaggcgtaa

SEQ ID NO: 66644 - DNA, 25 bp, Saccharomyces pastorianus
gtcaaactacgaaatctgcatcccc

SEQ ID NO: 66645 - DNA, 25 bp, Saccharomyces pastorianus
aacccgcgctgtatcgagcatgtca

SEQ ID NO: 66646 - DNA, 25 bp, Saccharomyces pastorianus
tgcactcgagtttctacaagggctt

SEQ ID NO: 66647 - DNA, 25 bp, Saccharomyces pastorianus
atagaatccacagcggacgtgcagt

SEQ ID NO: 66648 - DNA, 25 bp, Saccharomyces pastorianus
tacaagggctttcacttcatcatct

SEQ ID NO: 66649 - DNA, 25 bp, Saccharomyces pastorianus
tgcatccccttcatagacggtggga

SEQ ID NO: 66650 - DNA, 25 bp, Saccharomyces pastorianus
gagctacgcgatttagtatctctac

SEQ ID NO: 66651 - DNA, 25 bp, Saccharomyces pastorianus
gagcatgtcatcgagtacgtctcca

SEQ ID NO: 66652 - DNA, 25 bp, Saccharomyces pastorianus
gagtatcatacctagcgtcagcacc

SEQ ID NO: 66653 - DNA, 25 bp, Saccharomyces pastorianus
gtgaaaacaatcatcccgggcatca

SEQ ID NO: 66654 - DNA, 25 bp, Saccharomyces pastorianus
ataacagccactaatacccacttaa

SEQ ID NO: 66655 - DNA, 25 bp, Saccharomyces pastorianus
aaagagtctttgatttcaccagaga

SEQ ID NO: 66656 - DNA, 25 bp, Saccharomyces pastorianus
aagcggtggatgtcatggtttccaa

SEQ ID NO: 66657 - DNA, 25 bp, Saccharomyces pastorianus
gctaaactgtttttgaccagactat

SEQ ID NO: 66658 - DNA, 25 bp, Saccharomyces pastorianus
tttttactccgatctggccactaaa

SEQ ID NO: 66659 - DNA, 25 bp, Saccharomyces pastorianus
agaacctgcgttcaagtcagatgaa

SEQ ID NO: 66660 - DNA, 25 bp, Saccharomyces pastorianus
cagactatactttaggcttccccgt

SEQ ID NO: 66661 - DNA, 25 bp, Saccharomyces pastorianus
atagtgttgacggtggtgattccaa

SEQ ID NO: 66662 - DNA, 25 bp, Saccharomyces pastorianus
ctgcgagaggtttcccactacagaa

SEQ ID NO: 66663 - DNA, 25 bp, Saccharomyces pastorianus
ggacatagtgtacgtgttacccgaa

SEQ ID NO: 66664 - DNA, 25 bp, Saccharomyces pastorianus
gggttgaacttatctatctctgaaa

SEQ ID NO: 66665 - DNA, 25 bp, Saccharomyces pastorianus
tttggacgagcaacctcactgggac

SEQ ID NO: 66666 - DNA, 25 bp, Saccharomyces pastorianus
gatctcgctggagcagattcttcag

SEQ ID NO: 66667 - DNA, 25 bp, Saccharomyces pastorianus
tgaacgaaatatcgccgtctttgga

SEQ ID NO: 66668 - DNA, 25 bp, Saccharomyces pastorianus
atcttcatcgggatcttcgccattt

SEQ ID NO: 66669 - DNA, 25 bp, Saccharomyces pastorianus
gttcctatttcttcgaagtgcgcag

SEQ ID NO: 66670 - DNA, 25 bp, Saccharomyces pastorianus
tatgcctgtcctacatcgaacaaga

SEQ ID NO: 66671 - DNA, 25 bp, Saccharomyces pastorianus
ggtaacctgcacaattgttcctatt

SEQ ID NO: 66672 - DNA, 25 bp, Saccharomyces pastorianus
aacggctcgatatgcccgaatggta

SEQ ID NO: 66673 - DNA, 25 bp, Saccharomyces pastorianus
ttcttggtcgagtttgccggcagaa

SEQ ID NO: 66674 - DNA, 25 bp, Saccharomyces pastorianus
agtcaacgttgtgggcatcttcatc

SEQ ID NO: 66675 - DNA, 25 bp, Saccharomyces pastorianus
agttggtggctcgtccatcaagaaa

SEQ ID NO: 66676 - DNA, 25 bp, Saccharomyces pastorianus
ttgatccatatttccaatgaccatt

SEQ ID NO: 66677 - DNA, 25 bp, Saccharomyces pastorianus
ggaactcagacgcatcaaaaccttg

SEQ ID NO: 66678 - DNA, 25 bp, Saccharomyces pastorianus
tgaccattacccaaacccaatacta

SEQ ID NO: 66679 - DNA, 25 bp, Saccharomyces pastorianus
atctagaatcgatcttcccctaaag

SEQ ID NO: 66680 - DNA, 25 bp, Saccharomyces pastorianus
aaccacttttgatgaggaactccag

SEQ ID NO: 66681 - DNA, 25 bp, Saccharomyces pastorianus
aatagaccttttaacacggcctgcg

SEQ ID NO: 66682 - DNA, 25 bp, Saccharomyces pastorianus
ggcctgcggcagaatacattaaaaa

SEQ ID NO: 66683 - DNA, 25 bp, Saccharomyces pastorianus
ggtcgccaacgacagttctatcgga

SEQ ID NO: 66684 - DNA, 25 bp, Saccharomyces pastorianus
cggacggtttcataagcaagcacaa

SEQ ID NO: 66685 - DNA, 25 bp, Saccharomyces pastorianus
aagggcgttgcggatttgatccata

SEQ ID NO: 66686 - DNA, 25 bp, Saccharomyces pastorianus
actatatagttgttccacggacggt

SEQ ID NO: 66687 - DNA, 25 bp, Saccharomyces pastorianus
ttgctttgccatttgtcgcatttga

SEQ ID NO: 66688 - DNA, 25 bp, Saccharomyces pastorianus
cctggcatacctggcatatttggca

SEQ ID NO: 66689 - DNA, 25 bp, Saccharomyces pastorianus
gtgcttgttgcatcatttgtggcga

SEQ ID NO: 66690 - DNA, 25 bp, Saccharomyces pastorianus
atacctggcatattgggcatacctg

SEQ ID NO: 66691 - DNA, 25 bp, Saccharomyces pastorianus
atatttggcattccaggcatcctgg

SEQ ID NO: 66692 - DNA, 25 bp, Saccharomyces pastorianus
gtttaacccataccgaattgctttg

SEQ ID NO: 66693 - DNA, 25 bp, Saccharomyces pastorianus
cattagaccgggattttgtttcagt

SEQ ID NO: 66694 - DNA, 25 bp, Saccharomyces pastorianus
tgtggcgatacttttggcatacctg

SEQ ID NO: 66695 - DNA, 25 bp, Saccharomyces pastorianus
aggcatcctggcattggctccgggt

SEQ ID NO: 66696 - DNA, 25 bp, Saccharomyces pastorianus
gctacctccaagcatattcatcatg

SEQ ID NO: 66697 - DNA, 25 bp, Saccharomyces pastorianus
atattgggcatacctggcatacctg

SEQ ID NO: 66698 - DNA, 25 bp, Saccharomyces pastorianus
gtggctacaacactcgacagcgagg

SEQ ID NO: 66699 - DNA, 25 bp, Saccharomyces pastorianus
gaaccacaaatttctcggagcgact

SEQ ID NO: 66700 - DNA, 25 bp, Saccharomyces pastorianus
attccatatttagtgctgccaacga

SEQ ID NO: 66701 - DNA, 25 bp, Saccharomyces pastorianus
gcatactttccaaccatttttacca

SEQ ID NO: 66702 - DNA, 25 bp, Saccharomyces pastorianus
aaggcttatggaggatctgaacgca

SEQ ID NO: 66703 - DNA, 25 bp, Saccharomyces pastorianus
gggctcacaccagttcaattactga

SEQ ID NO: 66704 - DNA, 25 bp, Saccharomyces pastorianus
aactaaatgttccatcttctaccgc

SEQ ID NO: 66705 - DNA, 25 bp, Saccharomyces pastorianus
cgctcaacgtcctgcttggtcaaat

SEQ ID NO: 66706 - DNA, 25 bp, Saccharomyces pastorianus
aaaggtcctgattcgcatactttcc

SEQ ID NO: 66707 - DNA, 25 bp, Saccharomyces pastorianus
cggagcgactcaaacactttagact

SEQ ID NO: 66708 - DNA, 25 bp, Saccharomyces pastorianus
gaatttattgccagggctcacacca

SEQ ID NO: 66709 - DNA, 25 bp, Saccharomyces pastorianus
agaccttctgcttttatcgatccaa

SEQ ID NO: 66710 - DNA, 25 bp, Saccharomyces pastorianus
aggaccattctcaaagaccttctgc

SEQ ID NO: 66711 - DNA, 25 bp, Saccharomyces pastorianus
aaatatctccaccaaagggctcttc

SEQ ID NO: 66712 - DNA, 25 bp, Saccharomyces pastorianus
ggctcactttatcttctgctgcaga

SEQ ID NO: 66713 - DNA, 25 bp, Saccharomyces pastorianus
agggctcttcttttctaatgactaa

SEQ ID NO: 66714 - DNA, 25 bp, Saccharomyces pastorianus
ttgacttgcaggtagctgggctcac

SEQ ID NO: 66715 - DNA, 25 bp, Saccharomyces pastorianus
actaataaggctgggctgtctgcat

SEQ ID NO: 66716 - DNA, 25 bp, Saccharomyces pastorianus
gacgttgtgggctacacgccgttaa

SEQ ID NO: 66717 - DNA, 25 bp, Saccharomyces pastorianus
gatgacaatctcttcctggatacgg

SEQ ID NO: 66718 - DNA, 25 bp, Saccharomyces pastorianus
aataacgacgatgccgctaccaagg

SEQ ID NO: 66719 - DNA, 25 bp, Saccharomyces pastorianus
attcgccactttccgaattcttgga

SEQ ID NO: 66720 - DNA, 25 bp, Saccharomyces pastorianus
aatgggtaccctgagtgagatgcta

SEQ ID NO: 66721 - DNA, 25 bp, Saccharomyces pastorianus
gtactgccaagactgcgatgcgata

SEQ ID NO: 66722 - DNA, 25 bp, Saccharomyces pastorianus
aaccagcatgactacgactcgttgg

SEQ ID NO: 66723 - DNA, 25 bp, Saccharomyces pastorianus
tgagatgctacaagacggcctggtc

SEQ ID NO: 66724 - DNA, 25 bp, Saccharomyces pastorianus
gaaacatgtctacgtggactggcat

SEQ ID NO: 66725 - DNA, 25 bp, Saccharomyces pastorianus
gaccaggtcaccagttatgactcga

SEQ ID NO: 66726 - DNA, 25 bp, Saccharomyces pastorianus
agatgctgctcgactgaacctgtac

SEQ ID NO: 66727 - DNA, 25 bp, Saccharomyces pastorianus
acagtgcggcatttgcggagacaca

SEQ ID NO: 66728 - DNA, 25 bp, Saccharomyces pastorianus
caagcatagcatccagacgcacgtg

SEQ ID NO: 66729 - DNA, 25 bp, Saccharomyces pastorianus
ggcctggtcatagacgccatcaagg

SEQ ID NO: 66730 - DNA, 25 bp, Saccharomyces pastorianus
gtgcggcgagcattggaccagtacc

SEQ ID NO: 66731 - DNA, 25 bp, Saccharomyces pastorianus
gtacaaacgccgaatgtgccagaaa

SEQ ID NO: 66732 - DNA, 25 bp, Saccharomyces pastorianus
cgacagctgcagtgacgatggtagt

SEQ ID NO: 66733 - DNA, 25 bp, Saccharomyces pastorianus
cttcatcacattccatcaactacat

SEQ ID NO: 66734 - DNA, 25 bp, Saccharomyces pastorianus
gagtatagatttaccgcctaagcct

SEQ ID NO: 66735 - DNA, 25 bp, Saccharomyces pastorianus
gcatgataaaccaccaggtcctttt

SEQ ID NO: 66736 - DNA, 25 bp, Saccharomyces pastorianus
gacccatcttcattatctcgttttt

SEQ ID NO: 66737 - DNA, 25 bp, Saccharomyces pastorianus
agctccagttccagtaacaattgcg

SEQ ID NO: 66738 - DNA, 25 bp, Saccharomyces pastorianus
acaaaacgctagagttgcatcccct

SEQ ID NO: 66739 - DNA, 25 bp, Saccharomyces pastorianus
taagcctacaccgacacagaatagt

SEQ ID NO: 66740 - DNA, 25 bp, Saccharomyces pastorianus
agcagcacagcatccagcagtgaaa

SEQ ID NO: 66741 - DNA, 25 bp, Saccharomyces pastorianus
gagcgaaagcggttccagcagcagc

SEQ ID NO: 66742 - DNA, 25 bp, Saccharomyces pastorianus
ttgccaacgatatatgaccgggttt

SEQ ID NO: 66743 - DNA, 25 bp, Saccharomyces pastorianus
ttgtcctctgggtaaagacgaatgt

SEQ ID NO: 66744 - DNA, 25 bp, Saccharomyces pastorianus
atatgaccgggttttgtcctctggg

SEQ ID NO: 66745 - DNA, 25 bp, Saccharomyces pastorianus
tctacatatagatccagccagcaag

SEQ ID NO: 66746 - DNA, 25 bp, Saccharomyces pastorianus
tgggattctgccctctagggaatac

SEQ ID NO: 66747 - DNA, 25 bp, Saccharomyces pastorianus
tctagggaatacttgccccaggcga

SEQ ID NO: 66748 - DNA, 25 bp, Saccharomyces pastorianus
gtccagactgccaatatctacatat

SEQ ID NO: 66749 - DNA, 25 bp, Saccharomyces pastorianus
ttgccccaggcgacatattaagaag

SEQ ID NO: 66750 - DNA, 25 bp, Saccharomyces pastorianus
ggtactgcacgcaaagtccagactg

SEQ ID NO: 66751 - DNA, 25 bp, Saccharomyces pastorianus
gacgaatgtgacatggagcatccac

SEQ ID NO: 66752 - DNA, 25 bp, Saccharomyces pastorianus
agccagcaagatacccaaatgtgag

SEQ ID NO: 66753 - DNA, 25 bp, Saccharomyces pastorianus
gaaggcccaaatcgtgtcccagagg

SEQ ID NO: 66754 - DNA, 25 bp, Saccharomyces pastorianus
taattcaccttgatacagcaaagta

SEQ ID NO: 66755 - DNA, 25 bp, Saccharomyces pastorianus
aaatcgtgtcccagagggcccctat

SEQ ID NO: 66756 - DNA, 25 bp, Saccharomyces pastorianus
attttacaactcgagagaaggccca

SEQ ID NO: 66757 - DNA, 25 bp, Saccharomyces pastorianus
tcactcgatcccgatagacctatat

SEQ ID NO: 66758 - DNA, 25 bp, Saccharomyces pastorianus
gatcccgatagacctatatgtgaat

SEQ ID NO: 66759 - DNA, 25 bp, Saccharomyces pastorianus
gagtttaattcaccttgatacagca

SEQ ID NO: 66760 - DNA, 25 bp, Saccharomyces pastorianus
gagccctttctcaggcaagagtact

SEQ ID NO: 66761 - DNA, 25 bp, Saccharomyces pastorianus
gagagaaggcccaaatcgtgtccca

SEQ ID NO: 66762 - DNA, 25 bp, Saccharomyces pastorianus
aaatttgagccctttctcaggcaag

SEQ ID NO: 66763 - DNA, 25 bp, Saccharomyces pastorianus
ctttctcaggcaagagtactcgttt

SEQ ID NO: 66764 - DNA, 25 bp, Saccharomyces pastorianus
gatgcaccaaaggattctacagatc

SEQ ID NO: 66765 - DNA, 25 bp, Saccharomyces pastorianus
aatgctcatgtctacgcgcgtgatc

SEQ ID NO: 66766 - DNA, 25 bp, Saccharomyces pastorianus
cttatagactattgccccagatcga

SEQ ID NO: 66767 - DNA, 25 bp, Saccharomyces pastorianus
gtagagagtgctggtgccatgacac

SEQ ID NO: 66768 - DNA, 25 bp, Saccharomyces pastorianus
agtttccacagcctcttatagacta

SEQ ID NO: 66769 - DNA, 25 bp, Saccharomyces pastorianus
tttcgctaattgtccagttgtccca

SEQ ID NO: 66770 - DNA, 25 bp, Saccharomyces pastorianus
gcgcgtgatctgaagtttgaacctc

SEQ ID NO: 66771 - DNA, 25 bp, Saccharomyces pastorianus
tagacagtctaccactttcgctaat

SEQ ID NO: 66772 - DNA, 25 bp, Saccharomyces pastorianus
agatcgatatcctgcagccaattaa

SEQ ID NO: 66773 - DNA, 25 bp, Saccharomyces pastorianus
tcccaccgggcgtcattggtattga

SEQ ID NO: 66774 - DNA, 25 bp, Saccharomyces pastorianus
gaaggcgcattgtattttaggtgtc

SEQ ID NO: 66775 - DNA, 25 bp, Saccharomyces pastorianus
gaggttttgcatttgtggaattctt

SEQ ID NO: 66776 - DNA, 25 bp, Saccharomyces pastorianus
atatctgctatggatggcaccgtaa

SEQ ID NO: 66777 - DNA, 25 bp, Saccharomyces pastorianus
ggtgtccatttgttaggccgtagat

SEQ ID NO: 66778 - DNA, 25 bp, Saccharomyces pastorianus
atggcaccgtaattgatgggcacaa

SEQ ID NO: 66779 - DNA, 25 bp, Saccharomyces pastorianus
caagtcgctactaatgaaatggcag

SEQ ID NO: 66780 - DNA, 25 bp, Saccharomyces pastorianus
caaggcaaaactttgtccatgggtt

SEQ ID NO: 66781 - DNA, 25 bp, Saccharomyces pastorianus
attatctcacagacaagcatctcat

SEQ ID NO: 66782 - DNA, 25 bp, Saccharomyces pastorianus
gtagattggccatgcaatatgcaga

SEQ ID NO: 66783 - DNA, 25 bp, Saccharomyces pastorianus
gaatttaccatttgaagctacgaga

SEQ ID NO: 66784 - DNA, 25 bp, Saccharomyces pastorianus
ctggatttgttgttgctcaggtaaa

SEQ ID NO: 66785 - DNA, 25 bp, Saccharomyces pastorianus
gcaaatgctgtcatatctgctatgg

SEQ ID NO: 66786 - DNA, 25 bp, Saccharomyces pastorianus
aaatcatctcgtgcttccagtgttc

SEQ ID NO: 66787 - DNA, 25 bp, Saccharomyces pastorianus
aagcgatcatttcagcaagtgcgta

SEQ ID NO: 66788 - DNA, 25 bp, Saccharomyces pastorianus
ccagtgttccttcgattgtcaatca

SEQ ID NO: 66789 - DNA, 25 bp, Saccharomyces pastorianus
ggatccgaactctcagcttttgaaa

SEQ ID NO: 66790 - DNA, 25 bp, Saccharomyces pastorianus
aagtacctcaggtagccgttaccag

SEQ ID NO: 66791 - DNA, 25 bp, Saccharomyces pastorianus
tggtagttcacccagttgtgtgcca

SEQ ID NO: 66792 - DNA, 25 bp, Saccharomyces pastorianus
tattaaaccaccttacaacagcctg

SEQ ID NO: 66793 - DNA, 25 bp, Saccharomyces pastorianus
gaaacgttccactagtgcgtaccga

SEQ ID NO: 66794 - DNA, 25 bp, Saccharomyces pastorianus
ccaacccaggtatgtcgcaatcaaa

SEQ ID NO: 66795 - DNA, 25 bp, Saccharomyces pastorianus
gaagacatctagtgccggaaacgtt

SEQ ID NO: 66796 - DNA, 25 bp, Saccharomyces pastorianus
gcttttgaaaaccagtcgcctttgt

SEQ ID NO: 66797 - DNA, 25 bp, Saccharomyces pastorianus
agcgttgggccttcttcaaaagaca

SEQ ID NO: 66798 - DNA, 25 bp, Saccharomyces pastorianus
ggttccgcctcgagaaaacttgttg

SEQ ID NO: 66799 - DNA, 25 bp, Saccharomyces pastorianus
ttagcagctgcaacatcttggttcc

SEQ ID NO: 66800 - DNA, 25 bp, Saccharomyces pastorianus
aactggcacccatactagattattc

SEQ ID NO: 66801 - DNA, 25 bp, Saccharomyces pastorianus
gattttcaacctgggatgtcttcaa

SEQ ID NO: 66802 - DNA, 25 bp, Saccharomyces pastorianus
aacatcttggttcccactttcaata

SEQ ID NO: 66803 - DNA, 25 bp, Saccharomyces pastorianus
gaattcagcttctattgtgcgggac

SEQ ID NO: 66804 - DNA, 25 bp, Saccharomyces pastorianus
ggaatttacgcagtcgattttcaac

SEQ ID NO: 66805 - DNA, 25 bp, Saccharomyces pastorianus
agaatacgacgttcaactgcgggaa

SEQ ID NO: 66806 - DNA, 25 bp, Saccharomyces pastorianus
tcttagcgtccccaatgagggcaga

SEQ ID NO: 66807 - DNA, 25 bp, Saccharomyces pastorianus
taatgtgtacggcaggctcttagcg

SEQ ID NO: 66808 - DNA, 25 bp, Saccharomyces pastorianus
aggctctcatagtctcttatccgat

SEQ ID NO: 66809 - DNA, 25 bp, Saccharomyces pastorianus
taattactctacatcctcatcaaat

SEQ ID NO: 66810 - DNA, 25 bp, Saccharomyces pastorianus
agcgtcactttttatgcagcctgat

SEQ ID NO: 66811 - DNA, 25 bp, Saccharomyces pastorianus
tcacaggaaaatatcagcgtcactt

SEQ ID NO: 66812 - DNA, 25 bp, Saccharomyces pastorianus
gattcctgggacttgcgcagtatac

SEQ ID NO: 66813 - DNA, 25 bp, Saccharomyces pastorianus
gtccgtgtgttataaaggctctcat

SEQ ID NO: 66814 - DNA, 25 bp, Saccharomyces pastorianus
taggctattaagtccaagttccgaa

SEQ ID NO: 66815 - DNA, 25 bp, Saccharomyces pastorianus
caagggcacccgaattcatttaatt

SEQ ID NO: 66816 - DNA, 25 bp, Saccharomyces pastorianus
acatactgttgaagcccaagggcac

SEQ ID NO: 66817 - DNA, 25 bp, Saccharomyces pastorianus
gagaagagtttttcacggccttgaa

SEQ ID NO: 66818 - DNA, 25 bp, Saccharomyces pastorianus
gtcaggattgttttacagcacttag

SEQ ID NO: 66819 - DNA, 25 bp, Saccharomyces pastorianus
gatggttatgtgctagcttgtcctt

SEQ ID NO: 66820 - DNA, 25 bp, Saccharomyces pastorianus
gtgacgacgatgacagctccagttc

SEQ ID NO: 66821 - DNA, 25 bp, Saccharomyces pastorianus
gaccacattggacacgatggaatct

SEQ ID NO: 66822 - DNA, 25 bp, Saccharomyces pastorianus
aaatcaggtatctctgggctcctca

SEQ ID NO: 66823 - DNA, 25 bp, Saccharomyces pastorianus
actcgcctaggatatcttacttcag

SEQ ID NO: 66824 - DNA, 25 bp, Saccharomyces pastorianus
agcaatacctttgttgtactcgcct

SEQ ID NO: 66825 - DNA, 25 bp, Saccharomyces pastorianus
gggctccgactaggatatcattatt

SEQ ID NO: 66826 - DNA, 25 bp, Saccharomyces pastorianus
gctactatgcaagttgagtcccctt

SEQ ID NO: 66827 - DNA, 25 bp, Saccharomyces pastorianus
agcttgtcctttcggcactgaagaa

SEQ ID NO: 66828 - DNA, 25 bp, Saccharomyces pastorianus
agttccagctcacttactgacatgg

SEQ ID NO: 66829 - DNA, 25 bp, Saccharomyces pastorianus
atgctaattttagaccacgttcggg

SEQ ID NO: 66830 - DNA, 25 bp, Saccharomyces pastorianus
agacatcgcatccatattcataccg

SEQ ID NO: 66831 - DNA, 25 bp, Saccharomyces pastorianus
tatagctttggttgcactggacata

SEQ ID NO: 66832 - DNA, 25 bp, Saccharomyces pastorianus
acatcgcatccatgttcattgatga

SEQ ID NO: 66833 - DNA, 25 bp, Saccharomyces pastorianus
atgttttgcttgcactggacatcgc

SEQ ID NO: 66834 - DNA, 25 bp, Saccharomyces pastorianus
gtggattgtgtaccggctgaactca

SEQ ID NO: 66835 - DNA, 25 bp, Saccharomyces pastorianus
acgctaccgtcttcgatgcactaga

SEQ ID NO: 66836 - DNA, 25 bp, Saccharomyces pastorianus
gccatcgatgccatacttgaagcca

SEQ ID NO: 66837 - DNA, 25 bp, Saccharomyces pastorianus
atacccgacatgcttgagcctgaag

SEQ ID NO: 66838 - DNA, 25 bp, Saccharomyces pastorianus
atactcatcgaagccatgctcgacg

SEQ ID NO: 66839 - DNA, 25 bp, Saccharomyces pastorianus
gaactcatggttgcagagctcccca

SEQ ID NO: 66840 - DNA, 25 bp, Saccharomyces pastorianus
gatgacatactcgaagctatagctt

SEQ ID NO: 66841 - DNA, 25 bp, Saccharomyces pastorianus
ggatctcttccacgacattattaga

SEQ ID NO: 66842 - DNA, 25 bp, Saccharomyces pastorianus
caccggcttagccttatcagaagtg

SEQ ID NO: 66843 - DNA, 25 bp, Saccharomyces pastorianus
agcacacctgatccaattgccgttg

SEQ ID NO: 66844 - DNA, 25 bp, Saccharomyces pastorianus
ttgccgataccacgtcagctagtga

SEQ ID NO: 66845 - DNA, 25 bp, Saccharomyces pastorianus
gacatacgttttcgcagtcatcacc

SEQ ID NO: 66846 - DNA, 25 bp, Saccharomyces pastorianus
ataggtgcaaactagccctgttaaa

SEQ ID NO: 66847 - DNA, 25 bp, Saccharomyces pastorianus
gaactgtcctggttttggtaactgc

SEQ ID NO: 66848 - DNA, 25 bp, Saccharomyces pastorianus
atgtaactgcgccaaagtctccaga

SEQ ID NO: 66849 - DNA, 25 bp, Saccharomyces pastorianus
atttacctccacaatgatcatctac

SEQ ID NO: 66850 - DNA, 25 bp, Saccharomyces pastorianus
ggtgacatattcgttccttctttaa

SEQ ID NO: 66851 - DNA, 25 bp, Saccharomyces pastorianus
atctgtctgaggttgctattgcgga

SEQ ID NO: 66852 - DNA, 25 bp, Saccharomyces pastorianus
tatggcatcgatggcgagcatgtcg

SEQ ID NO: 66853 - DNA, 25 bp, Saccharomyces pastorianus
cagctcgatggcaggcatgtcgatg

SEQ ID NO: 66854 - DNA, 25 bp, Saccharomyces pastorianus
acaatccacttcaggctcaagcatg

SEQ ID NO: 66855 - DNA, 25 bp, Saccharomyces pastorianus
gggagctctgcaaccatgagttcag

SEQ ID NO: 66856 - DNA, 25 bp, Saccharomyces pastorianus
tgagttcagccggtacacaatccac

SEQ ID NO: 66857 - DNA, 25 bp, Saccharomyces pastorianus
agctcaatggcaggcatgtcgatgg

SEQ ID NO: 66858 - DNA, 25 bp, Saccharomyces pastorianus
agcgtcgagcatggcttcgatgagt

SEQ ID NO: 66859 - DNA, 25 bp, Saccharomyces pastorianus
tatggatgcgatgtccagtgcaagc

SEQ ID NO: 66860 - DNA, 25 bp, Saccharomyces pastorianus
agctatagcttcgagtatgtcatca

SEQ ID NO: 66861 - DNA, 25 bp, Saccharomyces pastorianus
aacattggcttcaagtatggcatcg

SEQ ID NO: 66862 - DNA, 25 bp, Saccharomyces pastorianus
gacgctatgtccagtgcaaccaaag

SEQ ID NO: 66863 - DNA, 25 bp, Saccharomyces pastorianus
ggttcttctatctctaaggtcaatg

SEQ ID NO: 66864 - DNA, 25 bp, Saccharomyces pastorianus
gaaaacacaacttaccgacaaagag

SEQ ID NO: 66865 - DNA, 25 bp, Saccharomyces pastorianus
atccccattcccagtggttcttcta

SEQ ID NO: 66866 - DNA, 25 bp, Saccharomyces pastorianus
tctatctctaaggtcaatgaaaact

SEQ ID NO: 66867 - DNA, 25 bp, Saccharomyces pastorianus
aaattcatccccattcccagtggtt

SEQ ID NO: 66868 - DNA, 25 bp, Saccharomyces pastorianus
acgactcactacagggatcaaacac

SEQ ID NO: 66869 - DNA, 25 bp, Saccharomyces pastorianus
tatgttccggaatacaaaggcgcca

SEQ ID NO: 66870 - DNA, 25 bp, Saccharomyces pastorianus
gggatcaaacactggaactatgttc

SEQ ID NO: 66871 - DNA, 25 bp, Saccharomyces pastorianus
caaaggcgccaaattcatccccatt

SEQ ID NO: 66872 - DNA, 25 bp, Saccharomyces pastorianus
cacaacttaccgacaaagagttcaa

SEQ ID NO: 66873 - DNA, 25 bp, Saccharomyces pastorianus
aaacactggaactatgttccggaat

SEQ ID NO: 66874 - DNA, 25 bp, Saccharomyces pastorianus
gagagctgagcccattcctcaatcg

SEQ ID NO: 66875 - DNA, 25 bp, Saccharomyces pastorianus
gcacagagctgttgagttggccaga

SEQ ID NO: 66876 - DNA, 25 bp, Saccharomyces pastorianus
agttggccagagaacgtggacacaa

SEQ ID NO: 66877 - DNA, 25 bp, Saccharomyces pastorianus
accggttatggtctgatgagtttga

SEQ ID NO: 66878 - DNA, 25 bp, Saccharomyces pastorianus
tatccataagttagataccggttat

SEQ ID NO: 66879 - DNA, 25 bp, Saccharomyces pastorianus
tcttcaacgttggtgagttttacgg

SEQ ID NO: 66880 - DNA, 25 bp, Saccharomyces pastorianus
cactgaattgagaaacgatatccat

SEQ ID NO: 66881 - DNA, 25 bp, Saccharomyces pastorianus
ggccttcttcaacgttggtgagttt

SEQ ID NO: 66882 - DNA, 25 bp, Saccharomyces pastorianus
gagtttgacctggagagctgagccc

SEQ ID NO: 66883 - DNA, 25 bp, Saccharomyces pastorianus
attcctcaatcgcaagctttcgaag

SEQ ID NO: 66884 - DNA, 25 bp, Saccharomyces pastorianus
gctttcgaagcgatgcacagagctg

SEQ ID NO: 66885 - DNA, 25 bp, Saccharomyces pastorianus
ggaggttttctttcatgatcattct

SEQ ID NO: 66886 - DNA, 25 bp, Saccharomyces pastorianus
aacgatgtgggcaatctctcagcgg

SEQ ID NO: 66887 - DNA, 25 bp, Saccharomyces pastorianus
ttcgaggttcacttctttccaagaa

SEQ ID NO: 66888 - DNA, 25 bp, Saccharomyces pastorianus
tatcgcaaatcttcacgggaccaat

SEQ ID NO: 66889 - DNA, 25 bp, Saccharomyces pastorianus
ggaccaatggccgtggtggctacaa

SEQ ID NO: 66890 - DNA, 25 bp, Saccharomyces pastorianus
gatttccacgttaatcacgcaacct

SEQ ID NO: 66891 - DNA, 25 bp, Saccharomyces pastorianus
gtagagtccgccaagttcagtaatg

SEQ ID NO: 66892 - DNA, 25 bp, Saccharomyces pastorianus
aaactcattttcctgtactcttcat

SEQ ID NO: 66893 - DNA, 25 bp, Saccharomyces pastorianus
ggtggctgccagcatatcgcaaatc

SEQ ID NO: 66894 - DNA, 25 bp, Saccharomyces pastorianus
ataaacccgtccattacatatgcct

SEQ ID NO: 66895 - DNA, 25 bp, Saccharomyces pastorianus
aacaaactgtccactctgtagagtc

SEQ ID NO: 66896 - DNA, 25 bp, Saccharomyces pastorianus
aaagaagtctgttatggattctgcc

SEQ ID NO: 66897 - DNA, 25 bp, Saccharomyces pastorianus
tcacgcggatcttcagtacaaactc

SEQ ID NO: 66898 - DNA, 25 bp, Saccharomyces pastorianus
gaagactccacttcacgcggatctt

SEQ ID NO: 66899 - DNA, 25 bp, Saccharomyces pastorianus
aactctatacgaacaagctgccgca

SEQ ID NO: 66900 - DNA, 25 bp, Saccharomyces pastorianus
cctgcacaaactaccactgattaca

SEQ ID NO: 66901 - DNA, 25 bp, Saccharomyces pastorianus
acaagctgccgcaaggaggaacaga

SEQ ID NO: 66902 - DNA, 25 bp, Saccharomyces pastorianus
tctaaatccggtgaagactccactt

SEQ ID NO: 66903 - DNA, 25 bp, Saccharomyces pastorianus
agtatgctcctgtaagcaacatcaa

SEQ ID NO: 66904 - DNA, 25 bp, Saccharomyces pastorianus
tcaacacagtgcctacgaacgcgag

SEQ ID NO: 66905 - DNA, 25 bp, Saccharomyces pastorianus
tggttccaccttaaacaacagtgaa

SEQ ID NO: 66906 - DNA, 25 bp, Saccharomyces pastorianus
ggaacagagctgctgcacctgcaca

SEQ ID NO: 66907 - DNA, 25 bp, Saccharomyces pastorianus
tattgcggctcaactggacatcgac

SEQ ID NO: 66908 - DNA, 25 bp, Saccharomyces pastorianus
ggaagccacgcctgatgatggtaca

SEQ ID NO: 66909 - DNA, 25 bp, Saccharomyces pastorianus
gtgccactccaaccagtagacagga

SEQ ID NO: 66910 - DNA, 25 bp, Saccharomyces pastorianus
aaaccacactgatgacagcgggcgt

SEQ ID NO: 66911 - DNA, 25 bp, Saccharomyces pastorianus
aaactggcgatacttctttgattgc

SEQ ID NO: 66912 - DNA, 25 bp, Saccharomyces pastorianus
accaaagttctcaaccagcggtaga

SEQ ID NO: 66913 - DNA, 25 bp, Saccharomyces pastorianus
acagcgggcgtcaaggagtcacaga

SEQ ID NO: 66914 - DNA, 25 bp, Saccharomyces pastorianus
acagctttcctgcatgagtcggttt

SEQ ID NO: 66915 - DNA, 25 bp, Saccharomyces pastorianus
gatagggattctagtgccactccaa

SEQ ID NO: 66916 - DNA, 25 bp, Saccharomyces pastorianus
agcgcagacctctcggatgatgaat

SEQ ID NO: 66917 - DNA, 25 bp, Saccharomyces pastorianus
tggcccaaaggacacaggcgacttg

SEQ ID NO: 66918 - DNA, 25 bp, Saccharomyces pastorianus
gagacgtttggaagtgtattcgata

SEQ ID NO: 66919 - DNA, 25 bp, Saccharomyces pastorianus
gttacgattcattactcagtgcgga

SEQ ID NO: 66920 - DNA, 25 bp, Saccharomyces pastorianus
attatcatccaaatgtcgccacctt

SEQ ID NO: 66921 - DNA, 25 bp, Saccharomyces pastorianus
ttggccaaggtcttttctcaaccat

SEQ ID NO: 66922 - DNA, 25 bp, Saccharomyces pastorianus
aaagctgagttacaacatggaagat

SEQ ID NO: 66923 - DNA, 25 bp, Saccharomyces pastorianus
agattgaaaactcttcctactttag

SEQ ID NO: 66924 - DNA, 25 bp, Saccharomyces pastorianus
tcctactttagaatttgagacgttt

SEQ ID NO: 66925 - DNA, 25 bp, Saccharomyces pastorianus
atttcttggattggagttacgattc

SEQ ID NO: 66926 - DNA, 25 bp, Saccharomyces pastorianus
tcattactcagtgcggaatcatcaa

SEQ ID NO: 66927 - DNA, 25 bp, Saccharomyces pastorianus
aaatgtcgccaccttggccaaggtc

SEQ ID NO: 66928 - DNA, 25 bp, Saccharomyces pastorianus
gccaaggtcttttctcaaccattta

SEQ ID NO: 66929 - DNA, 25 bp, Saccharomyces pastorianus
cgaccatttgacgaatttgaaagac

SEQ ID NO: 66930 - DNA, 25 bp, Saccharomyces pastorianus
tgcacaatccagctttcatttccga

SEQ ID NO: 66931 - DNA, 25 bp, Saccharomyces pastorianus
tttgaaagacagttacgtggatcca

SEQ ID NO: 66932 - DNA, 25 bp, Saccharomyces pastorianus
tgttgcacaatccagctttcatttc

SEQ ID NO: 66933 - DNA, 25 bp, Saccharomyces pastorianus
aatccagctttcatttccgatccat

SEQ ID NO: 66934 - DNA, 25 bp, Saccharomyces pastorianus
tttcatttccgatccattccagatc

SEQ ID NO: 66935 - DNA, 25 bp, Saccharomyces pastorianus
gagcaagtcgaccatttgacgaatt

SEQ ID NO: 66936 - DNA, 25 bp, Saccharomyces pastorianus
agatccctgagcaagtcgaccattt

SEQ ID NO: 66937 - DNA, 25 bp, Saccharomyces pastorianus
atccctgagcaagtcgaccatttga

SEQ ID NO: 66938 - DNA, 25 bp, Saccharomyces pastorianus
atgataatgttgcacaatccagctt

SEQ ID NO: 66939 - DNA, 25 bp, Saccharomyces pastorianus
atccattccagatccctgagcaagt

SEQ ID NO: 66940 - DNA, 25 bp, Saccharomyces pastorianus
aaacccaccgcaagccattgagaat

SEQ ID NO: 66941 - DNA, 25 bp, Saccharomyces pastorianus
tgttatccccatcttggccttgaat

SEQ ID NO: 66942 - DNA, 25 bp, Saccharomyces pastorianus
aaaactggctctctttactgaacgg

SEQ ID NO: 66943 - DNA, 25 bp, Saccharomyces pastorianus
catttggtcgcttccttcatgaaga

SEQ ID NO: 66944 - DNA, 25 bp, Saccharomyces pastorianus
ggccttgaatggtcttttcgagcta

SEQ ID NO: 66945 - DNA, 25 bp, Saccharomyces pastorianus
ttggcgagactcacactggaatccc

SEQ ID NO: 66946 - DNA, 25 bp, Saccharomyces pastorianus
aacggtcaattatctcttcaacagt

SEQ ID NO: 66947 - DNA, 25 bp, Saccharomyces pastorianus
aacgcatctatcagctcatttggtc

SEQ ID NO: 66948 - DNA, 25 bp, Saccharomyces pastorianus
ggcttaccaggagctacttcttaaa

SEQ ID NO: 66949 - DNA, 25 bp, Saccharomyces pastorianus
ggacattttcttgtcttcaacgcat

SEQ ID NO: 66950 - DNA, 25 bp, Saccharomyces pastorianus
aattgtgtccgtgattccctttatt

SEQ ID NO: 66951 - DNA, 25 bp, Saccharomyces pastorianus
aactctattattaagctcgtcaatg

SEQ ID NO: 66952 - DNA, 25 bp, Saccharomyces pastorianus
gtcattccagaggatgtctcccaat

SEQ ID NO: 66953 - DNA, 25 bp, Saccharomyces pastorianus
ttaagctcgtcaatgaacttgtcat

SEQ ID NO: 66954 - DNA, 25 bp, Saccharomyces pastorianus
tgactactgccaccgacagaaagca

SEQ ID NO: 66955 - DNA, 25 bp, Saccharomyces pastorianus
tcttgatcatgtcgctgttccaaat

SEQ ID NO: 66956 - DNA, 25 bp, Saccharomyces pastorianus
gaggatgtctcccaattgaaagatg

SEQ ID NO: 66957 - DNA, 25 bp, Saccharomyces pastorianus
aagaagctgactactgccaccgaca

SEQ ID NO: 66958 - DNA, 25 bp, Saccharomyces pastorianus
ttgaggttcttgatcatgtcgctgt

SEQ ID NO: 66959 - DNA, 25 bp, Saccharomyces pastorianus
gccaccgacagaaagcagtataact

SEQ ID NO: 66960 - DNA, 25 bp, Saccharomyces pastorianus
tattgccaagaagctgactactgcc

SEQ ID NO: 66961 - DNA, 25 bp, Saccharomyces pastorianus
atgaacttgtcattccagaggatgt

SEQ ID NO: 66962 - DNA, 25 bp, Saccharomyces pastorianus
ggacgtctttccactcagggaagta

SEQ ID NO: 66963 - DNA, 25 bp, Saccharomyces pastorianus
gaagggacgtctttccactcaggga

SEQ ID NO: 66964 - DNA, 25 bp, Saccharomyces pastorianus
tatgaagggacgtctttccactcag

SEQ ID NO: 66965 - DNA, 25 bp, Saccharomyces pastorianus
gtatgaagggacgtctttccactca

SEQ ID NO: 66966 - DNA, 25 bp, Saccharomyces pastorianus
tgaagggacgtctttccactcaggg

SEQ ID NO: 66967 - DNA, 25 bp, Saccharomyces pastorianus
acgtctttccactcagggaagtact

SEQ ID NO: 66968 - DNA, 25 bp, Saccharomyces pastorianus
agggacgtctttccactcagggaag

SEQ ID NO: 66969 - DNA, 25 bp, Saccharomyces pastorianus
atgtatgaagggacgtctttccact

SEQ ID NO: 66970 - DNA, 25 bp, Saccharomyces pastorianus
atgaagggacgtctttccactcagg

SEQ ID NO: 66971 - DNA, 25 bp, Saccharomyces pastorianus
gtctttccactcagggaagtactcc

SEQ ID NO: 66972 - DNA, 25 bp, Saccharomyces pastorianus
gacgtctttccactcagggaagtac

SEQ ID NO: 66973 - DNA, 25 bp, Saccharomyces pastorianus
tgtccacctggatcccactttgttg

SEQ ID NO: 66974 - DNA, 25 bp, Saccharomyces pastorianus
ggttcagatcctttttgacgtggtc

SEQ ID NO: 66975 - DNA, 25 bp, Saccharomyces pastorianus
gttttctatgtccacctggatccca

SEQ ID NO: 66976 - DNA, 25 bp, Saccharomyces pastorianus
atgggattcctgataggcgccatct

SEQ ID NO: 66977 - DNA, 25 bp, Saccharomyces pastorianus
atgtacgtcacttttggcggcgtgc

SEQ ID NO: 66978 - DNA, 25 bp, Saccharomyces pastorianus
gcgcagtggttcagatcctttttga

SEQ ID NO: 66979 - DNA, 25 bp, Saccharomyces pastorianus
gacagcgggtacaatcatgggattc

SEQ ID NO: 66980 - DNA, 25 bp, Saccharomyces pastorianus
gcagggcctgacagcgggtacaatc

SEQ ID NO: 66981 - DNA, 25 bp, Saccharomyces pastorianus
gataggcgccatctacagatccgga

SEQ ID NO: 66982 - DNA, 25 bp, Saccharomyces pastorianus
actttgttgcgcagtggttcagatc

SEQ ID NO: 66983 - DNA, 25 bp, Saccharomyces pastorianus
acagatccggactgttttctatgtc

SEQ ID NO: 66984 - DNA, 25 bp, Saccharomyces pastorianus
gggacggtatctgcatatccagttt

SEQ ID NO: 66985 - DNA, 25 bp, Saccharomyces pastorianus
gagacttaaccctaaccttattgat

SEQ ID NO: 66986 - DNA, 25 bp, Saccharomyces pastorianus
tatccagtttaaccgatcgttttca

SEQ ID NO: 66987 - DNA, 25 bp, Saccharomyces pastorianus
gtcactggtacattcagactctgtg

SEQ ID NO: 66988 - DNA, 25 bp, Saccharomyces pastorianus
gggctctctacttttcacattcaga

SEQ ID NO: 66989 - DNA, 25 bp, Saccharomyces pastorianus
attcagacggacgaacccaatgata

SEQ ID NO: 66990 - DNA, 25 bp, Saccharomyces pastorianus
aagagcctttaatttgagtcgacag

SEQ ID NO: 66991 - DNA, 25 bp, Saccharomyces pastorianus
agaatacgtcacaagccgagcatac

SEQ ID NO: 66992 - DNA, 25 bp, Saccharomyces pastorianus
gtgagctttacaaccatcgcaaaaa

SEQ ID NO: 66993 - DNA, 25 bp, Saccharomyces pastorianus
agcatacctttagtgggctctctac

SEQ ID NO: 66994 - DNA, 25 bp, Saccharomyces pastorianus
gattcagaagccactcaaatgttat

SEQ ID NO: 66995 - DNA, 25 bp, Saccharomyces pastorianus
ggccgaacaagccaacaggccattt

SEQ ID NO: 66996 - DNA, 25 bp, Saccharomyces pastorianus
atttccagatgtctgggcaacaaat

SEQ ID NO: 66997 - DNA, 25 bp, Saccharomyces pastorianus
agatgtctgggcaacaaatggccga

SEQ ID NO: 66998 - DNA, 25 bp, Saccharomyces pastorianus
gccgaacaagccaacaggccatttt

SEQ ID NO: 66999 - DNA, 25 bp, Saccharomyces pastorianus
acaaatggccgaacaagccaacagg

SEQ ID NO: 67000 - DNA, 25 bp, Saccharomyces pastorianus
gaacaagccaacaggccatttttcc

SEQ ID NO: 67001 - DNA, 25 bp, Saccharomyces pastorianus
atgtctgggcaacaaatggccgaac

SEQ ID NO: 67002 - DNA, 25 bp, Saccharomyces pastorianus
aacaagccaacaggccatttttcca

SEQ ID NO: 67003 - DNA, 25 bp, Saccharomyces pastorianus
caagccaacaggccatttttccaag

SEQ ID NO: 67004 - DNA, 25 bp, Saccharomyces pastorianus
gtctgggcaacaaatggccgaacaa

SEQ ID NO: 67005 - DNA, 25 bp, Saccharomyces pastorianus
tgggcaacaaatggccgaacaagcc

SEQ ID NO: 67006 - DNA, 25 bp, Saccharomyces pastorianus
aaagatcaacatccttggggaattt

SEQ ID NO: 67007 - DNA, 25 bp, Saccharomyces pastorianus
gacaaaagatcaacatccttgggga

SEQ ID NO: 67008 - DNA, 25 bp, Saccharomyces pastorianus
tatacgagacaaaagatcaacatcc

SEQ ID NO: 67009 - DNA, 25 bp, Saccharomyces pastorianus
atatacgagacaaaagatcaacatc

SEQ ID NO: 67010 - DNA, 25 bp, Saccharomyces pastorianus
gagacaaaagatcaacatccttggg

SEQ ID NO: 67011 - DNA, 25 bp, Saccharomyces pastorianus
gatatacgagacaaaagatcaacat

SEQ ID NO: 67012 - DNA, 25 bp, Saccharomyces pastorianus
acgagacaaaagatcaacatccttg

SEQ ID NO: 67013 - DNA, 25 bp, Saccharomyces pastorianus
cgagacaaaagatcaacatccttgg

SEQ ID NO: 67014 - DNA, 25 bp, Saccharomyces pastorianus
caaaagatcaacatccttggggaat

SEQ ID NO: 67015 - DNA, 25 bp, Saccharomyces pastorianus
tacgagacaaaagatcaacatcctt

SEQ ID NO: 67016 - DNA, 25 bp, Saccharomyces pastorianus
atacgagacaaaagatcaacatcct

SEQ ID NO: 67017 - DNA, 25 bp, Saccharomyces pastorianus
gtctccatttatgacttccctggta

SEQ ID NO: 67018 - DNA, 25 bp, Saccharomyces pastorianus
gtctgtctaaggtcgacattccctt

SEQ ID NO: 67019 - DNA, 25 bp, Saccharomyces pastorianus
acaggaccaggtggcctcgattatt

SEQ ID NO: 67020 - DNA, 25 bp, Saccharomyces pastorianus
tgtgcagtacattgaggacggtcgt

SEQ ID NO: 67021 - DNA, 25 bp, Saccharomyces pastorianus
agactcgctggctgataagatcgtg

SEQ ID NO: 67022 - DNA, 25 bp, Saccharomyces pastorianus
aagcccgtcgaggatatcataaaga

SEQ ID NO: 67023 - DNA, 25 bp, Saccharomyces pastorianus
gtttgtcgaattaggcgtctccatt

SEQ ID NO: 67024 - DNA, 25 bp, Saccharomyces pastorianus
tggtactcccgaggccagcaaggga

SEQ ID NO: 67025 - DNA, 25 bp, Saccharomyces pastorianus
gaatttcccgagttacagaagcccg

SEQ ID NO: 67026 - DNA, 25 bp, Saccharomyces pastorianus
cgtggaccgtttgtacaagttgaat

SEQ ID NO: 67027 - DNA, 25 bp, Saccharomyces pastorianus
acaacaagagttgggcgccacacag

SEQ ID NO: 67028 - DNA, 25 bp, Saccharomyces pastorianus
agtccgatgaggatcttgccagttc

SEQ ID NO: 67029 - DNA, 25 bp, Saccharomyces pastorianus
gacgaggtcaatttcttggatttag

SEQ ID NO: 67030 - DNA, 25 bp, Saccharomyces pastorianus
tttagattgcgaataccgtgttgtt

SEQ ID NO: 67031 - DNA, 25 bp, Saccharomyces pastorianus
gaaactgaagtcacgcttgtcggac

SEQ ID NO: 67032 - DNA, 25 bp, Saccharomyces pastorianus
gatgagctggacaaagacttgaacc

SEQ ID NO: 67033 - DNA, 25 bp, Saccharomyces pastorianus
gaaatcataacagccttgacgaggt

SEQ ID NO: 67034 - DNA, 25 bp, Saccharomyces pastorianus
tatcgtcaccgtttggaaaccaaat

SEQ ID NO: 67035 - DNA, 25 bp, Saccharomyces pastorianus
tcacgcttgtcggactatcgaaaga

SEQ ID NO: 67036 - DNA, 25 bp, Saccharomyces pastorianus
atgggcgaaggtatcgtcaccgttt

SEQ ID NO: 67037 - DNA, 25 bp, Saccharomyces pastorianus
atacgcttttatgcgggatgggcga

SEQ ID NO: 67038 - DNA, 25 bp, Saccharomyces pastorianus
gatgacagctccgaagaaagttcta

SEQ ID NO: 67039 - DNA, 25 bp, Saccharomyces pastorianus
gtcgttggccctgtttcaagtaatc

SEQ ID NO: 67040 - DNA, 25 bp, Saccharomyces pastorianus
attttgccattaacgctcacattgt

SEQ ID NO: 67041 - DNA, 25 bp, Saccharomyces pastorianus
aaagggtcaccagtattttgccatt

SEQ ID NO: 67042 - DNA, 25 bp, Saccharomyces pastorianus
gggaaccgtcgcacaagatgtcatt

SEQ ID NO: 67043 - DNA, 25 bp, Saccharomyces pastorianus
agtactatgtacagccactctgaaa

SEQ ID NO: 67044 - DNA, 25 bp, Saccharomyces pastorianus
ttactgaaccgagaggcagctgcat

SEQ ID NO: 67045 - DNA, 25 bp, Saccharomyces pastorianus
gggtaaaagattgtctcctctgaat

SEQ ID NO: 67046 - DNA, 25 bp, Saccharomyces pastorianus
attacggagcataaggcctactgtc

SEQ ID NO: 67047 - DNA, 25 bp, Saccharomyces pastorianus
atattgaatttgctcctgtcgcagc

SEQ ID NO: 67048 - DNA, 25 bp, Saccharomyces pastorianus
actgggtgtccctatggcaatattg

SEQ ID NO: 67049 - DNA, 25 bp, Saccharomyces pastorianus
tgatcgaattcgtctcagaggatga

SEQ ID NO: 67050 - DNA, 25 bp, Saccharomyces pastorianus
ggttgagtcttctactgaattctgt

SEQ ID NO: 67051 - DNA, 25 bp, Saccharomyces pastorianus
ggagcaagggattcatcttagcgat

SEQ ID NO: 67052 - DNA, 25 bp, Saccharomyces pastorianus
tctcactcactaccagtcaatgcat

SEQ ID NO: 67053 - DNA, 25 bp, Saccharomyces pastorianus
aacaacttcgtctttttgcaaaatg

SEQ ID NO: 67054 - DNA, 25 bp, Saccharomyces pastorianus
atgtcccatttgcaacaagccttgt

SEQ ID NO: 67055 - DNA, 25 bp, Saccharomyces pastorianus
gatgaggatgttcccttagaattga

SEQ ID NO: 67056 - DNA, 25 bp, Saccharomyces pastorianus
aagaaaacacgaccttctcactcac

SEQ ID NO: 67057 - DNA, 25 bp, Saccharomyces pastorianus
gaataccgtatatggtcgcagttgc

SEQ ID NO: 67058 - DNA, 25 bp, Saccharomyces pastorianus
tgaagacgtcaccagcgaacaagat

SEQ ID NO: 67059 - DNA, 25 bp, Saccharomyces pastorianus
ggtcgcagttgcaatcacatattaa

SEQ ID NO: 67060 - DNA, 25 bp, Saccharomyces pastorianus
ttaagaacgaccatcctaaactgaa

SEQ ID NO: 67061 - DNA, 25 bp, Saccharomyces pastorianus
gaatgccccagtttttgtagacttg

SEQ ID NO: 67062 - DNA, 25 bp, Saccharomyces pastorianus
ttgggtacaagagctctgcaaattt

SEQ ID NO: 67063 - DNA, 25 bp, Saccharomyces pastorianus
ttttgggtacaagagctctgcaaat

SEQ ID NO: 67064 - DNA, 25 bp, Saccharomyces pastorianus
gccccagtttttgtagacttggaag

SEQ ID NO: 67065 - DNA, 25 bp, Saccharomyces pastorianus
gggtacaagagctctgcaaatttcc

SEQ ID NO: 67066 - DNA, 25 bp, Saccharomyces pastorianus
aatgccccagtttttgtagacttgg

SEQ ID NO: 67067 - DNA, 25 bp, Saccharomyces pastorianus
atgccccagtttttgtagacttgga

SEQ ID NO: 67068 - DNA, 25 bp, Saccharomyces pastorianus
agaattttgggtacaagagctctgc

SEQ ID NO: 67069 - DNA, 25 bp, Saccharomyces pastorianus
aattttgggtacaagagctctgcaa

SEQ ID NO: 67070 - DNA, 25 bp, Saccharomyces pastorianus
gaattttgggtacaagagctctgca

SEQ ID NO: 67071 - DNA, 25 bp, Saccharomyces pastorianus
tgccccagtttttgtagacttggaa

SEQ ID NO: 67072 - DNA, 25 bp, Saccharomyces pastorianus
atcatcgactgcattctggaatctc

SEQ ID NO: 67073 - DNA, 25 bp, Saccharomyces pastorianus
gtccttcaattttttcgatcgcatc

SEQ ID NO: 67074 - DNA, 25 bp, Saccharomyces pastorianus
gtccctgggaacctaaccaagtcat

SEQ ID NO: 67075 - DNA, 25 bp, Saccharomyces pastorianus
gatcctgaggctaagaaaccccatt

SEQ ID NO: 67076 - DNA, 25 bp, Saccharomyces pastorianus
gtctcgacgattcttcagagcgcaa

SEQ ID NO: 67077 - DNA, 25 bp, Saccharomyces pastorianus
gaaatcgtgcctcaaggcgtctcga

SEQ ID NO: 67078 - DNA, 25 bp, Saccharomyces pastorianus
gagcggatctcctaacatgatgata

SEQ ID NO: 67079 - DNA, 25 bp, Saccharomyces pastorianus
tcagtacttactattgccgtcgttc

SEQ ID NO: 67080 - DNA, 25 bp, Saccharomyces pastorianus
acagcgaaacggtgtccttcaattt

SEQ ID NO: 67081 - DNA, 25 bp, Saccharomyces pastorianus
gattgaaaacccactgtactacgaa

SEQ ID NO: 67082 - DNA, 25 bp, Saccharomyces pastorianus
gagcatggcgaatggatcccaccca

SEQ ID NO: 67083 - DNA, 25 bp, Saccharomyces pastorianus
tgaggcacgatttctcatgacccat

SEQ ID NO: 67084 - DNA, 25 bp, Saccharomyces pastorianus
gaatcgtcgagacgccttgaggcac

SEQ ID NO: 67085 - DNA, 25 bp, Saccharomyces pastorianus
gacgccttgaggcacgatttctcat

SEQ ID NO: 67086 - DNA, 25 bp, Saccharomyces pastorianus
gacccatgtcttatttccaatgatt

SEQ ID NO: 67087 - DNA, 25 bp, Saccharomyces pastorianus
gtcgagacgccttgaggcacgattt

SEQ ID NO: 67088 - DNA, 25 bp, Saccharomyces pastorianus
gctctgaagaatcgtcgagacgcct

SEQ ID NO: 67089 - DNA, 25 bp, Saccharomyces pastorianus
aggcacgatttctcatgacccatgt

SEQ ID NO: 67090 - DNA, 25 bp, Saccharomyces pastorianus
acgatttctcatgacccatgtctta

SEQ ID NO: 67091 - DNA, 25 bp, Saccharomyces pastorianus
ttgcgctctgaagaatcgtcgagac

SEQ ID NO: 67092 - DNA, 25 bp, Saccharomyces pastorianus
atgacccatgtcttatttccaatga

SEQ ID NO: 67093 - DNA, 25 bp, Saccharomyces pastorianus
tctcatgacccatgtcttatttcca

SEQ ID NO: 67094 - DNA, 25 bp, Saccharomyces pastorianus
aaacgtcttgtataatgggtatgaa

SEQ ID NO: 67095 - DNA, 25 bp, Saccharomyces pastorianus
gcatatcaccactcgaattgtttct

SEQ ID NO: 67096 - DNA, 25 bp, Saccharomyces pastorianus
tttggttgtaccgttctcgaatcgc

SEQ ID NO: 67097 - DNA, 25 bp, Saccharomyces pastorianus
tgtgacgtttggttgtaccgttctc

SEQ ID NO: 67098 - DNA, 25 bp, Saccharomyces pastorianus
tcgccctttggtgttgtatttgttt

SEQ ID NO: 67099 - DNA, 25 bp, Saccharomyces pastorianus
aagtctcttgggatagtaattggtg

SEQ ID NO: 67100 - DNA, 25 bp, Saccharomyces pastorianus
taattggtggtaaaacgtcttgtat

SEQ ID NO: 67101 - DNA, 25 bp, Saccharomyces pastorianus
tatgaattcagctttcgttaaggaa

SEQ ID NO: 67102 - DNA, 25 bp, Saccharomyces pastorianus
aattgtttctttagtcattgtgacg

SEQ ID NO: 67103 - DNA, 25 bp, Saccharomyces pastorianus
tagacttgatttaccaacgccttcg

SEQ ID NO: 67104 - DNA, 25 bp, Saccharomyces pastorianus
tctcgaatcgccctttggtgttgta

SEQ ID NO: 67105 - DNA, 25 bp, Saccharomyces pastorianus
atgacgacgctgattccaagccatt

SEQ ID NO: 67106 - DNA, 25 bp, Saccharomyces pastorianus
gagttcaattgtgtccttttctaat

SEQ ID NO: 67107 - DNA, 25 bp, Saccharomyces pastorianus
aacatatgatttgttccacgcctct

SEQ ID NO: 67108 - DNA, 25 bp, Saccharomyces pastorianus
tgtgtcggagtaccttttcctaaca

SEQ ID NO: 67109 - DNA, 25 bp, Saccharomyces pastorianus
agtgcgcatcaacaaatccttcaat

SEQ ID NO: 67110 - DNA, 25 bp, Saccharomyces pastorianus
aaattctcatttatcgctgttagcg

SEQ ID NO: 67111 - DNA, 25 bp, Saccharomyces pastorianus
agcgattgtcgactcgtggtatcaa

SEQ ID NO: 67112 - DNA, 25 bp, Saccharomyces pastorianus
ggccataacgaatccaagtgcgcat

SEQ ID NO: 67113 - DNA, 25 bp, Saccharomyces pastorianus
acacactggcctcttgttattggat

SEQ ID NO: 67114 - DNA, 25 bp, Saccharomyces pastorianus
gttccacgcctctattcagaatttt

SEQ ID NO: 67115 - DNA, 25 bp, Saccharomyces pastorianus
agaggctaaccttattggcaatgaa

SEQ ID NO: 67116 - DNA, 25 bp, Saccharomyces pastorianus
gtacgcattggcaaagtctctgaaa

SEQ ID NO: 67117 - DNA, 25 bp, Saccharomyces pastorianus
gaagaccagcattcacacatttctc

SEQ ID NO: 67118 - DNA, 25 bp, Saccharomyces pastorianus
tggtgctccctttttgaaggcttta

SEQ ID NO: 67119 - DNA, 25 bp, Saccharomyces pastorianus
caagctaagcacaaccgagtttggt

SEQ ID NO: 67120 - DNA, 25 bp, Saccharomyces pastorianus
gtcaccgtcttctgattcattgagc

SEQ ID NO: 67121 - DNA, 25 bp, Saccharomyces pastorianus
agctaagctcgcgtctgctatggaa

SEQ ID NO: 67122 - DNA, 25 bp, Saccharomyces pastorianus
gccttctctccgagacttaacaata

SEQ ID NO: 67123 - DNA, 25 bp, Saccharomyces pastorianus
aagtctctgaaactggcgacctcaa

SEQ ID NO: 67124 - DNA, 25 bp, Saccharomyces pastorianus
aactggcgacctcaaagctaagctc

SEQ ID NO: 67125 - DNA, 25 bp, Saccharomyces pastorianus
ctgttaacggccatgtacttcaacc

SEQ ID NO: 67126 - DNA, 25 bp, Saccharomyces pastorianus
gtttaagtcagttaagagcccgtat

SEQ ID NO: 67127 - DNA, 25 bp, Saccharomyces pastorianus
aagcatgtcgactttgccccaactt

SEQ ID NO: 67128 - DNA, 25 bp, Saccharomyces pastorianus
agaaacgccgccagaaaggccgaat

SEQ ID NO: 67129 - DNA, 25 bp, Saccharomyces pastorianus
gactttgccccaacttctccatttg

SEQ ID NO: 67130 - DNA, 25 bp, Saccharomyces pastorianus
aaagcatgtcgactttgccccaact

SEQ ID NO: 67131 - DNA, 25 bp, Saccharomyces pastorianus
actttgccccaacttctccatttgg

SEQ ID NO: 67132 - DNA, 25 bp, Saccharomyces pastorianus
aaacgccgccagaaaggccgaatct

SEQ ID NO: 67133 - DNA, 25 bp, Saccharomyces pastorianus
aacgccgccagaaaggccgaatctt

SEQ ID NO: 67134 - DNA, 25 bp, Saccharomyces pastorianus
gcatgtcgactttgccccaacttct

SEQ ID NO: 67135 - DNA, 25 bp, Saccharomyces pastorianus
acgccgccagaaaggccgaatcttc

SEQ ID NO: 67136 - DNA, 25 bp, Saccharomyces pastorianus
gaaacgccgccagaaaggccgaatc

SEQ ID NO: 67137 - DNA, 25 bp, Saccharomyces pastorianus
cgccagaaaggccgaatcttccggt

SEQ ID NO: 67138 - DNA, 25 bp, Saccharomyces pastorianus
ctaaacgtcacattgtcgcaactcg

SEQ ID NO: 67139 - DNA, 25 bp, Saccharomyces pastorianus
gaatctttagattcaacggtcgttt

SEQ ID NO: 67140 - DNA, 25 bp, Saccharomyces pastorianus
atgctgtacgtatgcggttggctca

SEQ ID NO: 67141 - DNA, 25 bp, Saccharomyces pastorianus
gcctaaatttccaactacttcgcat

SEQ ID NO: 67142 - DNA, 25 bp, Saccharomyces pastorianus
gatgtctaaagctgaactaccgcaa

SEQ ID NO: 67143 - DNA, 25 bp, Saccharomyces pastorianus
acggtcgtttatccattgcctaaat

SEQ ID NO: 67144 - DNA, 25 bp, Saccharomyces pastorianus
gatgcttcactccttgtacgagata

SEQ ID NO: 67145 - DNA, 25 bp, Saccharomyces pastorianus
agtacctggccaagctttagatgct

SEQ ID NO: 67146 - DNA, 25 bp, Saccharomyces pastorianus
ttacatctaccttgcaacatttcca

SEQ ID NO: 67147 - DNA, 25 bp, Saccharomyces pastorianus
gagataccaagccatcaaaaccttt

SEQ ID NO: 67148 - DNA, 25 bp, Saccharomyces pastorianus
tcgcaactcgtgtccgttacatcta

SEQ ID NO: 67149 - DNA, 25 bp, Saccharomyces pastorianus
acaggcgattgatgacccggaagta

SEQ ID NO: 67150 - DNA, 25 bp, Saccharomyces pastorianus
gacggattcccgcaggatttcgaga

SEQ ID NO: 67151 - DNA, 25 bp, Saccharomyces pastorianus
aaagctggaattcaagcccggcaaa

SEQ ID NO: 67152 - DNA, 25 bp, Saccharomyces pastorianus
agaagggccagcgtggtacttccgc

SEQ ID NO: 67153 - DNA, 25 bp, Saccharomyces pastorianus
gagcctatcatcaacgacggattcc

SEQ ID NO: 67154 - DNA, 25 bp, Saccharomyces pastorianus
aagcgtcaacggcagcagaatcaca

SEQ ID NO: 67155 - DNA, 25 bp, Saccharomyces pastorianus
taacctagtacccactgagacgcag

SEQ ID NO: 67156 - DNA, 25 bp, Saccharomyces pastorianus
aaaggatctccagactccacagttg

SEQ ID NO: 67157 - DNA, 25 bp, Saccharomyces pastorianus
ttggtctgagatcgacaccctagat

SEQ ID NO: 67158 - DNA, 25 bp, Saccharomyces pastorianus
agaagctaaacacgccgccgacgag

SEQ ID NO: 67159 - DNA, 25 bp, Saccharomyces pastorianus
gaatcacaatgcactctaacctagt

SEQ ID NO: 67160 - DNA, 25 bp, Saccharomyces pastorianus
gagattgtcctctttttgaattaga

SEQ ID NO: 67161 - DNA, 25 bp, Saccharomyces pastorianus
gccttgcgccgaaaactttctgagt

SEQ ID NO: 67162 - DNA, 25 bp, Saccharomyces pastorianus
atgctaaagcattctggtctaatat

SEQ ID NO: 67163 - DNA, 25 bp, Saccharomyces pastorianus
agaggaccgttttattcttctaatg

SEQ ID NO: 67164 - DNA, 25 bp, Saccharomyces pastorianus
catcgaatcttgaaaccgagcaatt

SEQ ID NO: 67165 - DNA, 25 bp, Saccharomyces pastorianus
agaggaagtgcgtgcttatgctaaa

SEQ ID NO: 67166 - DNA, 25 bp, Saccharomyces pastorianus
aatgcaacaagaggccttgcgccga

SEQ ID NO: 67167 - DNA, 25 bp, Saccharomyces pastorianus
tgaagttgaaacatcctccttcctc

SEQ ID NO: 67168 - DNA, 25 bp, Saccharomyces pastorianus
gagtttgcaaatgaggtcgccgata

SEQ ID NO: 67169 - DNA, 25 bp, Saccharomyces pastorianus
ggaattgtactcgatgatgctacta

SEQ ID NO: 67170 - DNA, 25 bp, Saccharomyces pastorianus
aggacacccgtagaattggccagaa

SEQ ID NO: 67171 - DNA, 25 bp, Saccharomyces pastorianus
tatcgggaaggcaggcgccttttct

SEQ ID NO: 67172 - DNA, 25 bp, Saccharomyces pastorianus
ataactctgcagcaaacgcggtcgc

SEQ ID NO: 67173 - DNA, 25 bp, Saccharomyces pastorianus
gaagccaaacttagtcgtagacttg

SEQ ID NO: 67174 - DNA, 25 bp, Saccharomyces pastorianus
ctccaccaggttctgcacaaataac

SEQ ID NO: 67175 - DNA, 25 bp, Saccharomyces pastorianus
tcgagttcagctgcgctaataccag

SEQ ID NO: 67176 - DNA, 25 bp, Saccharomyces pastorianus
taataccagtgattcctccaccagg

SEQ ID NO: 67177 - DNA, 25 bp, Saccharomyces pastorianus
cgccgatactgctgcattagatgta

SEQ ID NO: 67178 - DNA, 25 bp, Saccharomyces pastorianus
acatactccggatcgcatttggcaa

SEQ ID NO: 67179 - DNA, 25 bp, Saccharomyces pastorianus
gtagacttgatttgcccctcgagtt

SEQ ID NO: 67180 - DNA, 25 bp, Saccharomyces pastorianus
gcgccttttctctaactagatcgga

SEQ ID NO: 67181 - DNA, 25 bp, Saccharomyces pastorianus
gaatctgaaattttctctcttttcc

SEQ ID NO: 67182 - DNA, 25 bp, Saccharomyces pastorianus
aagcgtagcatgtagtgcgtggtcc

SEQ ID NO: 67183 - DNA, 25 bp, Saccharomyces pastorianus
gtccgatgaacctatcgcatcttat

SEQ ID NO: 67184 - DNA, 25 bp, Saccharomyces pastorianus
gaagtgccagagtcgaaatctttct

SEQ ID NO: 67185 - DNA, 25 bp, Saccharomyces pastorianus
gagtcgcgattcactaagcgtagca

SEQ ID NO: 67186 - DNA, 25 bp, Saccharomyces pastorianus
aacttgtagcgggagtcgcgattca

SEQ ID NO: 67187 - DNA, 25 bp, Saccharomyces pastorianus
gtgcgtggtccaactattatcgtgt

SEQ ID NO: 67188 - DNA, 25 bp, Saccharomyces pastorianus
tgggcgggcgttcaaaagcaaactt

SEQ ID NO: 67189 - DNA, 25 bp, Saccharomyces pastorianus
agagcgtctccacctggatatggaa

SEQ ID NO: 67190 - DNA, 25 bp, Saccharomyces pastorianus
aactattatcgtgtggacgcccctg

SEQ ID NO: 67191 - DNA, 25 bp, Saccharomyces pastorianus
aaaataggaccacctcagagcgtct

SEQ ID NO: 67192 - DNA, 25 bp, Saccharomyces pastorianus
tgaggttcagtgtccaaacgtggaa

SEQ ID NO: 67193 - DNA, 25 bp, Saccharomyces pastorianus
gtctcgtggtgtagtcattggcaac

SEQ ID NO: 67194 - DNA, 25 bp, Saccharomyces pastorianus
gccaaataagtttcccatctcagtg

SEQ ID NO: 67195 - DNA, 25 bp, Saccharomyces pastorianus
agctccgtgatcttccacgatatgt

SEQ ID NO: 67196 - DNA, 25 bp, Saccharomyces pastorianus
gaacagaatggtctcctgtctctga

SEQ ID NO: 67197 - DNA, 25 bp, Saccharomyces pastorianus
agacgtcttttgtcgagtccattgc

SEQ ID NO: 67198 - DNA, 25 bp, Saccharomyces pastorianus
atctcagtgccgtttagctggacgt

SEQ ID NO: 67199 - DNA, 25 bp, Saccharomyces pastorianus
gatgctaacgatgacggcctagaca

SEQ ID NO: 67200 - DNA, 25 bp, Saccharomyces pastorianus
gaacgaaaccgtctccgaatcgagt

SEQ ID NO: 67201 - DNA, 25 bp, Saccharomyces pastorianus
gctggacgtccgagtattctattgt

SEQ ID NO: 67202 - DNA, 25 bp, Saccharomyces pastorianus
ctacagcatccgcagtcgatttgga

SEQ ID NO: 67203 - DNA, 25 bp, Saccharomyces pastorianus
tatatcgtaattgcgtcatccgtcc

SEQ ID NO: 67204 - DNA, 25 bp, Saccharomyces pastorianus
gaggtcaatcctgatcatgttcttt

SEQ ID NO: 67205 - DNA, 25 bp, Saccharomyces pastorianus
gtgtattgttgatggaccccgtaga

SEQ ID NO: 67206 - DNA, 25 bp, Saccharomyces pastorianus
agacctcctacttacaccggtgaat

SEQ ID NO: 67207 - DNA, 25 bp, Saccharomyces pastorianus
aatgagactcgctgctactggtata

SEQ ID NO: 67208 - DNA, 25 bp, Saccharomyces pastorianus
aaatcatcggtgtgccaagtgacaa

SEQ ID NO: 67209 - DNA, 25 bp, Saccharomyces pastorianus
tagaaaacccctccaagttcttgag

SEQ ID NO: 67210 - DNA, 25 bp, Saccharomyces pastorianus
aaactgataacgctttgggctggtt

SEQ ID NO: 67211 - DNA, 25 bp, Saccharomyces pastorianus
ggacttgttatctgtattacaccca

SEQ ID NO: 67212 - DNA, 25 bp, Saccharomyces pastorianus
tcaaccaattttgttcctccgttat

SEQ ID NO: 67213 - DNA, 25 bp, Saccharomyces pastorianus
gcctacctcgtgaaatcttgggatt

SEQ ID NO: 67214 - DNA, 25 bp, Saccharomyces pastorianus
aaaatgggatgtttgcctacctcgt

SEQ ID NO: 67215 - DNA, 25 bp, Saccharomyces pastorianus
taaagagtcctgtcaccgtcaaaga

SEQ ID NO: 67216 - DNA, 25 bp, Saccharomyces pastorianus
tttgtaagagaactgcccgatccca

SEQ ID NO: 67217 - DNA, 25 bp, Saccharomyces pastorianus
aaccgcaacttacttgaagcactgt

SEQ ID NO: 67218 - DNA, 25 bp, Saccharomyces pastorianus
gttgattacttgatcacccataatg

SEQ ID NO: 67219 - DNA, 25 bp, Saccharomyces pastorianus
aaagcttccaaattcgactcagagg

SEQ ID NO: 67220 - DNA, 25 bp, Saccharomyces pastorianus
acctaacatcttatacttaccccat

SEQ ID NO: 67221 - DNA, 25 bp, Saccharomyces pastorianus
cccgatcccattttgtcaactgatt

SEQ ID NO: 67222 - DNA, 25 bp, Saccharomyces pastorianus
gattccactactatggtcgtgcaaa

SEQ ID NO: 67223 - DNA, 25 bp, Saccharomyces pastorianus
tgatatattccttgctgccttcata

SEQ ID NO: 67224 - DNA, 25 bp, Saccharomyces pastorianus
ggattagttgactcattcgcccaaa

SEQ ID NO: 67225 - DNA, 25 bp, Saccharomyces pastorianus
attggacatcttctttctcctacat

SEQ ID NO: 67226 - DNA, 25 bp, Saccharomyces pastorianus
tgaatcaccatttctggtcgacggc

SEQ ID NO: 67227 - DNA, 25 bp, Saccharomyces pastorianus
gatactgtccattttgtgggtacga

SEQ ID NO: 67228 - DNA, 25 bp, Saccharomyces pastorianus
gattggatgtaccattcagcgcaag

SEQ ID NO: 67229 - DNA, 25 bp, Saccharomyces pastorianus
ggattaggcggcacactattagttt

SEQ ID NO: 67230 - DNA, 25 bp, Saccharomyces pastorianus
gggccttggaaatttcagctgacta

SEQ ID NO: 67231 - DNA, 25 bp, Saccharomyces pastorianus
gaataccattgtgtcagctttcaac

SEQ ID NO: 67232 - DNA, 25 bp, Saccharomyces pastorianus
atttctggtcgacggccttgataag

SEQ ID NO: 67233 - DNA, 25 bp, Saccharomyces pastorianus
gtacgagtctcttggaggtaacgat

SEQ ID NO: 67234 - DNA, 25 bp, Saccharomyces pastorianus
tagattccaccttcccacaaaaggg

SEQ ID NO: 67235 - DNA, 25 bp, Saccharomyces pastorianus
ggtgctggttccatgatcgaatcat

SEQ ID NO: 67236 - DNA, 25 bp, Saccharomyces pastorianus
tgggtacgaacgtagattccacctt

SEQ ID NO: 67237 - DNA, 25 bp, Saccharomyces pastorianus
atcacttctacttcgatctttggaa

SEQ ID NO: 67238 - DNA, 25 bp, Saccharomyces pastorianus
atatggtcagggttgcaccgcaatt

SEQ ID NO: 67239 - DNA, 25 bp, Saccharomyces pastorianus
atgcatgacacccttgacttcaaaa

SEQ ID NO: 67240 - DNA, 25 bp, Saccharomyces pastorianus
agatcgtgttgcaattgcgctcgca

SEQ ID NO: 67241 - DNA, 25 bp, Saccharomyces pastorianus
gggaacccgatcgtagtgcactgct

SEQ ID NO: 67242 - DNA, 25 bp, Saccharomyces pastorianus
gaaagacttctacacggtcaccgat

SEQ ID NO: 67243 - DNA, 25 bp, Saccharomyces pastorianus
ggatcagttcctgttcatctatcac

SEQ ID NO: 67244 - DNA, 25 bp, Saccharomyces pastorianus
accgatatcaagttaacgccctcag

SEQ ID NO: 67245 - DNA, 25 bp, Saccharomyces pastorianus
attcacatagccttaattctcgcgg

SEQ ID NO: 67246 - DNA, 25 bp, Saccharomyces pastorianus
gtgacgcccttggtcgagtataaca

SEQ ID NO: 67247 - DNA, 25 bp, Saccharomyces pastorianus
gagtttccttgcgatctgcagatag

SEQ ID NO: 67248 - DNA, 25 bp, Saccharomyces pastorianus
ggacttgatgaaccctcttctgaga

SEQ ID NO: 67249 - DNA, 25 bp, Saccharomyces pastorianus
agatcacccttctcactgacgaaat

SEQ ID NO: 67250 - DNA, 25 bp, Saccharomyces pastorianus
tgccgtttactcttttactgttact

SEQ ID NO: 67251 - DNA, 25 bp, Saccharomyces pastorianus
agcttcactttagatgcggcagcct

SEQ ID NO: 67252 - DNA, 25 bp, Saccharomyces pastorianus
tttgttgtccaccattgccgtttac

SEQ ID NO: 67253 - DNA, 25 bp, Saccharomyces pastorianus
tggtctctaaacctttttgcactag

SEQ ID NO: 67254 - DNA, 25 bp, Saccharomyces pastorianus
gaagtttttcttgtctctcttaggg

SEQ ID NO: 67255 - DNA, 25 bp, Saccharomyces pastorianus
ttgcccttattgctactcatgtttt

SEQ ID NO: 67256 - DNA, 25 bp, Saccharomyces pastorianus
ctctcctccttagattttctagcga

SEQ ID NO: 67257 - DNA, 25 bp, Saccharomyces pastorianus
tttctagcgactgcttttggcttaa

SEQ ID NO: 67258 - DNA, 25 bp, Saccharomyces pastorianus
tttgcaggtcctccggtagatgaag

SEQ ID NO: 67259 - DNA, 25 bp, Saccharomyces pastorianus
aagacttaggtgttgagctcagctc

SEQ ID NO: 67260 - DNA, 25 bp, Saccharomyces pastorianus
tacagtaaccttgcaacggaagagc

SEQ ID NO: 67261 - DNA, 25 bp, Saccharomyces pastorianus
aagatagagaccatacagcaagagc

SEQ ID NO: 67262 - DNA, 25 bp, Saccharomyces pastorianus
aaatccactgactctcaaaaaactg

SEQ ID NO: 67263 - DNA, 25 bp, Saccharomyces pastorianus
gactgacgctcaacaaaaggctaaa

SEQ ID NO: 67264 - DNA, 25 bp, Saccharomyces pastorianus
tcaagcagaagcgtctcgatctcat

SEQ ID NO: 67265 - DNA, 25 bp, Saccharomyces pastorianus
gacttaatgcttttggttaccgatt

SEQ ID NO: 67266 - DNA, 25 bp, Saccharomyces pastorianus
tcaagacgagatacagagcactaag

SEQ ID NO: 67267 - DNA, 25 bp, Saccharomyces pastorianus
gaatcattggattcttacttgaaag

SEQ ID NO: 67268 - DNA, 25 bp, Saccharomyces pastorianus
gaagcaggagttgactgacgctcaa

SEQ ID NO: 67269 - DNA, 25 bp, Saccharomyces pastorianus
gtctcgatctcatgaaattgccaaa

SEQ ID NO: 67270 - DNA, 25 bp, Saccharomyces pastorianus
gacttgaaggcctaaatttctatga

SEQ ID NO: 67271 - DNA, 25 bp, Saccharomyces pastorianus
ctgaactatttgacagccgtcggat

SEQ ID NO: 67272 - DNA, 25 bp, Saccharomyces pastorianus
ataaatcgtggtatatcccgcaagg

SEQ ID NO: 67273 - DNA, 25 bp, Saccharomyces pastorianus
tatatcccgcaaggcgctagaatat

SEQ ID NO: 67274 - DNA, 25 bp, Saccharomyces pastorianus
gttcagatggtccaggattttcctg

SEQ ID NO: 67275 - DNA, 25 bp, Saccharomyces pastorianus
acagccgtcggattggttgacgata

SEQ ID NO: 67276 - DNA, 25 bp, Saccharomyces pastorianus
gtggctcctatcgagacttgttcag

SEQ ID NO: 67277 - DNA, 25 bp, Saccharomyces pastorianus
ctagaaatctatcaactgcccacgt

SEQ ID NO: 67278 - DNA, 25 bp, Saccharomyces pastorianus
tttcgcgatcatgcctaccataaat

SEQ ID NO: 67279 - DNA, 25 bp, Saccharomyces pastorianus
aagtgtggctgagcttcacgcatga

SEQ ID NO: 67280 - DNA, 25 bp, Saccharomyces pastorianus
attgcagcgtttccaatgttagccc

SEQ ID NO: 67281 - DNA, 25 bp, Saccharomyces pastorianus
gctagtggagaatcgcaccagcttc

SEQ ID NO: 67282 - DNA, 25 bp, Saccharomyces pastorianus
tccccatctttacctcaaattcaaa

SEQ ID NO: 67283 - DNA, 25 bp, Saccharomyces pastorianus
tacattgaccgccaagagctcttgt

SEQ ID NO: 67284 - DNA, 25 bp, Saccharomyces pastorianus
taacggaccgttgtcgtttctgaat

SEQ ID NO: 67285 - DNA, 25 bp, Saccharomyces pastorianus
gaggccaagggcatttttcagacat

SEQ ID NO: 67286 - DNA, 25 bp, Saccharomyces pastorianus
aagagctcttgtccgaactggcgtt

SEQ ID NO: 67287 - DNA, 25 bp, Saccharomyces pastorianus
gaactggcgttccaatgtcaatggt

SEQ ID NO: 67288 - DNA, 25 bp, Saccharomyces pastorianus
gcgaagcttcatccgctggagcaaa

SEQ ID NO: 67289 - DNA, 25 bp, Saccharomyces pastorianus
gggctgggcgataacttcaacgtat

SEQ ID NO: 67290 - DNA, 25 bp, Saccharomyces pastorianus
taggttgtacgctaacgcaggtgca

SEQ ID NO: 67291 - DNA, 25 bp, Saccharomyces pastorianus
aaaactcgatggatgtgctgaaccc

SEQ ID NO: 67292 - DNA, 25 bp, Saccharomyces pastorianus
ggaccagcgggaccaaccagaaatt

SEQ ID NO: 67293 - DNA, 25 bp, Saccharomyces pastorianus
gaaaataccaccctcaaagcaacaa

SEQ ID NO: 67294 - DNA, 25 bp, Saccharomyces pastorianus
gatagcgcccatgccgcaggaaaag

SEQ ID NO: 67295 - DNA, 25 bp, Saccharomyces pastorianus
agaggccgatgctggtgaccaacca

SEQ ID NO: 67296 - DNA, 25 bp, Saccharomyces pastorianus
taatgcaacatctaacccggtaaat

SEQ ID NO: 67297 - DNA, 25 bp, Saccharomyces pastorianus
ttcacctgccgaagtgggctcaagt

SEQ ID NO: 67298 - DNA, 25 bp, Saccharomyces pastorianus
gactccattaaatctgtcgtttcag

SEQ ID NO: 67299 - DNA, 25 bp, Saccharomyces pastorianus
aggctgttaggccatatccattaaa

SEQ ID NO: 67300 - DNA, 25 bp, Saccharomyces pastorianus
aaatgcatcagatagctcacagagc

SEQ ID NO: 67301 - DNA, 25 bp, Saccharomyces pastorianus
tgaccaaccagctgactaaccaaga

SEQ ID NO: 67302 - DNA, 25 bp, Saccharomyces pastorianus
ggcaagcaagtacttacatccatgg

SEQ ID NO: 67303 - DNA, 25 bp, Saccharomyces pastorianus
tttagcaatgccgttcagtccaaaa

SEQ ID NO: 67304 - DNA, 25 bp, Saccharomyces pastorianus
aggactggatcttcaaacggctatt

SEQ ID NO: 67305 - DNA, 25 bp, Saccharomyces pastorianus
aatactccaatgttaggctcctcaa

SEQ ID NO: 67306 - DNA, 25 bp, Saccharomyces pastorianus
ataggttcatctttcacctcgagat

SEQ ID NO: 67307 - DNA, 25 bp, Saccharomyces pastorianus
aatggctccgcatctaattatcgta

SEQ ID NO: 67308 - DNA, 25 bp, Saccharomyces pastorianus
tcgagatctcatgtgcgtcctataa

SEQ ID NO: 67309 - DNA, 25 bp, Saccharomyces pastorianus
acggttatggtaatgctgtctcaca

SEQ ID NO: 67310 - DNA, 25 bp, Saccharomyces pastorianus
attgccgacgacaatgcatcgactt

SEQ ID NO: 67311 - DNA, 25 bp, Saccharomyces pastorianus
agctacttcctgacacaactttgaa

SEQ ID NO: 67312 - DNA, 25 bp, Saccharomyces pastorianus
ggaattcactcaccactaacagata

SEQ ID NO: 67313 - DNA, 25 bp, Saccharomyces pastorianus
cttcaagctttatgccagtggattc

SEQ ID NO: 67314 - DNA, 25 bp, Saccharomyces pastorianus
attctgtgacgctctagaatacggt

SEQ ID NO: 67315 - DNA, 25 bp, Saccharomyces pastorianus
tcaaccaggtctatgtgaacgtttt

SEQ ID NO: 67316 - DNA, 25 bp, Saccharomyces pastorianus
accaggtctatgtgaacgttttgaa

SEQ ID NO: 67317 - DNA, 25 bp, Saccharomyces pastorianus
acgttttgaagtctttgttgctaca

SEQ ID NO: 67318 - DNA, 25 bp, Saccharomyces pastorianus
aactttcatcttcggtcacccacaa

SEQ ID NO: 67319 - DNA, 25 bp, Saccharomyces pastorianus
ttacactgaactgaatgatccattt

SEQ ID NO: 67320 - DNA, 25 bp, Saccharomyces pastorianus
aagagatttgtaacgcttacactga

SEQ ID NO: 67321 - DNA, 25 bp, Saccharomyces pastorianus
gacgaaacattctgtgacgctctag

SEQ ID NO: 67322 - DNA, 25 bp, Saccharomyces pastorianus
gaagctcaactagtcgacgaaacat

SEQ ID NO: 67323 - DNA, 25 bp, Saccharomyces pastorianus
ttcggtcacccacaaatgatgtctc

SEQ ID NO: 67324 - DNA, 25 bp, Saccharomyces pastorianus
gtaacgcttacactgaactgaatga

SEQ ID NO: 67325 - DNA, 25 bp, Saccharomyces pastorianus
gctaacctacacctcgatgaaacca

SEQ ID NO: 67326 - DNA, 25 bp, Saccharomyces pastorianus
aagtccgccactgaaggtgtcgcta

SEQ ID NO: 67327 - DNA, 25 bp, Saccharomyces pastorianus
atatttcgagactagatcccgtcaa

SEQ ID NO: 67328 - DNA, 25 bp, Saccharomyces pastorianus
gacttattagccgatctggatccat

SEQ ID NO: 67329 - DNA, 25 bp, Saccharomyces pastorianus
attagccgatctggatccatcgcaa

SEQ ID NO: 67330 - DNA, 25 bp, Saccharomyces pastorianus
aaaagacagacttattagccgatct

SEQ ID NO: 67331 - DNA, 25 bp, Saccharomyces pastorianus
gactagatcccgtcaaatcaaagaa

SEQ ID NO: 67332 - DNA, 25 bp, Saccharomyces pastorianus
ccacgtttccatttctaatcctgaa

SEQ ID NO: 67333 - DNA, 25 bp, Saccharomyces pastorianus
caagataacgttaagtccgccactg

SEQ ID NO: 67334 - DNA, 25 bp, Saccharomyces pastorianus
acacaaattccacgtttccatttct

SEQ ID NO: 67335 - DNA, 25 bp, Saccharomyces pastorianus
cactgaaggtgtcgctaacctacac

SEQ ID NO: 67336 - DNA, 25 bp, Saccharomyces pastorianus
agcacggccttacagaaaactcttt

SEQ ID NO: 67337 - DNA, 25 bp, Saccharomyces pastorianus
gaacttaaggatctgaacgtccaaa

SEQ ID NO: 67338 - DNA, 25 bp, Saccharomyces pastorianus
aacaccaaagccaagtcagaagatt

SEQ ID NO: 67339 - DNA, 25 bp, Saccharomyces pastorianus
gacgttaactactgaattatcttta

SEQ ID NO: 67340 - DNA, 25 bp, Saccharomyces pastorianus
attataccgcaaacttggattctat

SEQ ID NO: 67341 - DNA, 25 bp, Saccharomyces pastorianus
aaactacactccatgcaaaactttg

SEQ ID NO: 67342 - DNA, 25 bp, Saccharomyces pastorianus
atctactcaagctaagcacggcctt

SEQ ID NO: 67343 - DNA, 25 bp, Saccharomyces pastorianus
aattctgccggaacaagcatgaact

SEQ ID NO: 67344 - DNA, 25 bp, Saccharomyces pastorianus
cgggattattgctatttcatttgga

SEQ ID NO: 67345 - DNA, 25 bp, Saccharomyces pastorianus
gacgcactactcaaagaatctgaag

SEQ ID NO: 67346 - DNA, 25 bp, Saccharomyces pastorianus
aaggaatgcttttcgggattattgc

SEQ ID NO: 67347 - DNA, 25 bp, Saccharomyces pastorianus
gttagggatcaatccatctcgccag

SEQ ID NO: 67348 - DNA, 25 bp, Saccharomyces pastorianus
agggatcaatccatctcgccaggaa

SEQ ID NO: 67349 - DNA, 25 bp, Saccharomyces pastorianus
tccgcaaacttcaccgccgaagagg

SEQ ID NO: 67350 - DNA, 25 bp, Saccharomyces pastorianus
gatcaatccatctcgccaggaatga

SEQ ID NO: 67351 - DNA, 25 bp, Saccharomyces pastorianus
aatccatctcgccaggaatgacaaa

SEQ ID NO: 67352 - DNA, 25 bp, Saccharomyces pastorianus
cttcaccgccgaagagggctatggg

SEQ ID NO: 67353 - DNA, 25 bp, Saccharomyces pastorianus
ggaatgacaaagactccgcaaactt

SEQ ID NO: 67354 - DNA, 25 bp, Saccharomyces pastorianus
aacttcaccgccgaagagggctatg

SEQ ID NO: 67355 - DNA, 25 bp, Saccharomyces pastorianus
atgacaaagactccgcaaacttcac

SEQ ID NO: 67356 - DNA, 25 bp, Saccharomyces pastorianus
ttctccttacgttagggatcaatcc

SEQ ID NO: 67357 - DNA, 25 bp, Saccharomyces pastorianus
atctcgccaggaatgacaaagactc

SEQ ID NO: 67358 - DNA, 25 bp, Saccharomyces pastorianus
tccgcaaacttcaccgccgaagagg

SEQ ID NO: 67359 - DNA, 25 bp, Saccharomyces pastorianus
gatcaatccatctcgccaggaatga

SEQ ID NO: 67360 - DNA, 25 bp, Saccharomyces pastorianus
aatccatctcgccaggaatgacaaa

SEQ ID NO: 67361 - DNA, 25 bp, Saccharomyces pastorianus
aaagaagaagaaggcctcctccgca

SEQ ID NO: 67362 - DNA, 25 bp, Saccharomyces pastorianus
tctccttacgttagggatcaatcca

SEQ ID NO: 67363 - DNA, 25 bp, Saccharomyces pastorianus
tagggatcaatccatctcgccagga

SEQ ID NO: 67364 - DNA, 25 bp, Saccharomyces pastorianus
cttcaccgccgaagagggctatggg

SEQ ID NO: 67365 - DNA, 25 bp, Saccharomyces pastorianus
aacttcaccgccgaagagggctatg

SEQ ID NO: 67366 - DNA, 25 bp, Saccharomyces pastorianus
atgacaaagactccgcaaacttcac

SEQ ID NO: 67367 - DNA, 25 bp, Saccharomyces pastorianus
aactgcaacattctccttacgttag

SEQ ID NO: 67368 - DNA, 25 bp, Saccharomyces pastorianus
atctcgccaggaatgacaaagactc

SEQ ID NO: 67369 - DNA, 25 bp, Saccharomyces pastorianus
agagcgcctgtcaaattcatcgatg

SEQ ID NO: 67370 - DNA, 25 bp, Saccharomyces pastorianus
gcaacccaatattacggcggacatt

SEQ ID NO: 67371 - DNA, 25 bp, Saccharomyces pastorianus
tgccctgccagtctttcttgagaat

SEQ ID NO: 67372 - DNA, 25 bp, Saccharomyces pastorianus
ggccattcttggtggtatccttgca

SEQ ID NO: 67373 - DNA, 25 bp, Saccharomyces pastorianus
gataagctagccaagttgccgcata

SEQ ID NO: 67374 - DNA, 25 bp, Saccharomyces pastorianus
gaatgtttctccagacaccagagcg

SEQ ID NO: 67375 - DNA, 25 bp, Saccharomyces pastorianus
ttgccgcataacacttttgggtacg

SEQ ID NO: 67376 - DNA, 25 bp, Saccharomyces pastorianus
gaggaagaagcgtgcagcccttaaa

SEQ ID NO: 67377 - DNA, 25 bp, Saccharomyces pastorianus
tatccttgcacctttgcggctaaaa

SEQ ID NO: 67378 - DNA, 25 bp, Saccharomyces pastorianus
atgatcccatgcacgcgtatatctt

SEQ ID NO: 67379 - DNA, 25 bp, Saccharomyces pastorianus
aaacaatgctcagtgatccctcggg

SEQ ID NO: 67380 - DNA, 25 bp, Saccharomyces pastorianus
cgtaatctagtctgcttagcgggct

SEQ ID NO: 67381 - DNA, 25 bp, Saccharomyces pastorianus
aaaggtacccagacagttgactgta

SEQ ID NO: 67382 - DNA, 25 bp, Saccharomyces pastorianus
tgcttagcgggctgtgattacacaa

SEQ ID NO: 67383 - DNA, 25 bp, Saccharomyces pastorianus
ttcggctaagcaaaacgttcaaaca

SEQ ID NO: 67384 - DNA, 25 bp, Saccharomyces pastorianus
caaatatacttgtaggtcggtccga

SEQ ID NO: 67385 - DNA, 25 bp, Saccharomyces pastorianus
cctctcataaactgtcgtgccgaaa

SEQ ID NO: 67386 - DNA, 25 bp, Saccharomyces pastorianus
gaaaatcgtaaaacagcactctgct

SEQ ID NO: 67387 - DNA, 25 bp, Saccharomyces pastorianus
ggaaggtaggtctgatcactgcaat

SEQ ID NO: 67388 - DNA, 25 bp, Saccharomyces pastorianus
ggatgtattggctctgttgttgaaa

SEQ ID NO: 67389 - DNA, 25 bp, Saccharomyces pastorianus
tcaatatcagagagtgttttgcccc

SEQ ID NO: 67390 - DNA, 25 bp, Saccharomyces pastorianus
acaacattaaaccatatcccacagc

SEQ ID NO: 67391 - DNA, 25 bp, Saccharomyces pastorianus
gtgattttttccctatcgatgcaaa

SEQ ID NO: 67392 - DNA, 25 bp, Saccharomyces pastorianus
ggagggtacaaatctcccttcggca

SEQ ID NO: 67393 - DNA, 25 bp, Saccharomyces pastorianus
ggaaggtcaaatgtacacgtctgta

SEQ ID NO: 67394 - DNA, 25 bp, Saccharomyces pastorianus
gcaagccgccggttgagactagcaa

SEQ ID NO: 67395 - DNA, 25 bp, Saccharomyces pastorianus
agagctctgtagtaaatcccaccca

SEQ ID NO: 67396 - DNA, 25 bp, Saccharomyces pastorianus
cccttcggcactgatagctgtgatt

SEQ ID NO: 67397 - DNA, 25 bp, Saccharomyces pastorianus
ggagccgctgtgaaagccatttcca

SEQ ID NO: 67398 - DNA, 25 bp, Saccharomyces pastorianus
gaactccagagaggccggtctcgaa

SEQ ID NO: 67399 - DNA, 25 bp, Saccharomyces pastorianus
gacgggcggcaaaactcaatccgat

SEQ ID NO: 67400 - DNA, 25 bp, Saccharomyces pastorianus
gagcacagtgcaatttcatcgaagg

SEQ ID NO: 67401 - DNA, 25 bp, Saccharomyces pastorianus
ttcgaccatggcagacgagcacagt

SEQ ID NO: 67402 - DNA, 25 bp, Saccharomyces pastorianus
tctacggatgaatgtcgagctctta

SEQ ID NO: 67403 - DNA, 25 bp, Saccharomyces pastorianus
gagctcttatttctcttctaaacga

SEQ ID NO: 67404 - DNA, 25 bp, Saccharomyces pastorianus
aattgccttcgagctatgctttgaa

SEQ ID NO: 67405 - DNA, 25 bp, Saccharomyces pastorianus
gattgaaactcctgatctttattgg

SEQ ID NO: 67406 - DNA, 25 bp, Saccharomyces pastorianus
tttccagtgggctgtctagaagcac

SEQ ID NO: 67407 - DNA, 25 bp, Saccharomyces pastorianus
gataaggcagcgttttccagtgggc

SEQ ID NO: 67408 - DNA, 25 bp, Saccharomyces pastorianus
gaggtacttagacattggcccacga

SEQ ID NO: 67409 - DNA, 25 bp, Saccharomyces pastorianus
gaaattgaatctctactccgaactg

SEQ ID NO: 67410 - DNA, 25 bp, Saccharomyces pastorianus
caaagatactattctcctcagtgta

SEQ ID NO: 67411 - DNA, 25 bp, Saccharomyces pastorianus
aataggccggctctttttaatcaga

SEQ ID NO: 67412 - DNA, 25 bp, Saccharomyces pastorianus
gcactaatttggctgtcctggaaga

SEQ ID NO: 67413 - DNA, 25 bp, Saccharomyces pastorianus
ttgccgaacatgctagatccgtcta

SEQ ID NO: 67414 - DNA, 25 bp, Saccharomyces pastorianus
atttcgacgccgttgcattgtggag

SEQ ID NO: 67415 - DNA, 25 bp, Saccharomyces pastorianus
tgtgcttgaagccattgccgaacat

SEQ ID NO: 67416 - DNA, 25 bp, Saccharomyces pastorianus
ttccatgactcaaaggcgttcgatt

SEQ ID NO: 67417 - DNA, 25 bp, Saccharomyces pastorianus
actattattacctcttctgtatcgg

SEQ ID NO: 67418 - DNA, 25 bp, Saccharomyces pastorianus
tactacgcgtcgtgctatttggact

SEQ ID NO: 67419 - DNA, 25 bp, Saccharomyces pastorianus
gaccacgacaaggtttgcgtcctga

SEQ ID NO: 67420 - DNA, 25 bp, Saccharomyces pastorianus
acgtccccaaggtactgagcaatga

SEQ ID NO: 67421 - DNA, 25 bp, Saccharomyces pastorianus
gaaattcttcaatatccccatcacg

SEQ ID NO: 67422 - DNA, 25 bp, Saccharomyces pastorianus
ttgcgtcctgaacaaggccacagat

SEQ ID NO: 67423 - DNA, 25 bp, Saccharomyces pastorianus
ggataactgcgctattgtgcttgaa

SEQ ID NO: 67424 - DNA, 25 bp, Saccharomyces pastorianus
aactttgccagtttccaattcttca

SEQ ID NO: 67425 - DNA, 25 bp, Saccharomyces pastorianus
gccagtttccaattcttcagacatt

SEQ ID NO: 67426 - DNA, 25 bp, Saccharomyces pastorianus
gtttagatctttcttgttcagtcaa

SEQ ID NO: 67427 - DNA, 25 bp, Saccharomyces pastorianus
gcattaagctgttgtatgacgaatt

SEQ ID NO: 67428 - DNA, 25 bp, Saccharomyces pastorianus
ggtaatgctttttatagggcctcgt

SEQ ID NO: 67429 - DNA, 25 bp, Saccharomyces pastorianus
gcctcgtcgatttgtaactttgcca

SEQ ID NO: 67430 - DNA, 25 bp, Saccharomyces pastorianus
gatccatgctttgaagctagctgcg

SEQ ID NO: 67431 - DNA, 25 bp, Saccharomyces pastorianus
gtttcaagatctttccaatggtcaa

SEQ ID NO: 67432 - DNA, 25 bp, Saccharomyces pastorianus
aatcttggttcaactgtttgatctg

SEQ ID NO: 67433 - DNA, 25 bp, Saccharomyces pastorianus
attgttaatttctagcatgtctgat

SEQ ID NO: 67434 - DNA, 25 bp, Saccharomyces pastorianus
cttcagacattctttgatccatgct

SEQ ID NO: 67435 - DNA, 25 bp, Saccharomyces pastorianus
gccactttcacccatggaatattca

SEQ ID NO: 67436 - DNA, 25 bp, Saccharomyces pastorianus
acatattccaattcatctcctacag

SEQ ID NO: 67437 - DNA, 25 bp, Saccharomyces pastorianus
agacacgctcctttactatctaaga

SEQ ID NO: 67438 - DNA, 25 bp, Saccharomyces pastorianus
ggatcgccaaagagtgctccttctg

SEQ ID NO: 67439 - DNA, 25 bp, Saccharomyces pastorianus
ggtacgaggttctgcatactcttaa

SEQ ID NO: 67440 - DNA, 25 bp, Saccharomyces pastorianus
ggatcacacaccaagcataagcaat

SEQ ID NO: 67441 - DNA, 25 bp, Saccharomyces pastorianus
gaaatattcagcaccttccaacatg

SEQ ID NO: 67442 - DNA, 25 bp, Saccharomyces pastorianus
gagacagaacctgcctacatattcc

SEQ ID NO: 67443 - DNA, 25 bp, Saccharomyces pastorianus
agtgtaaattcagcttccgccatta

SEQ ID NO: 67444 - DNA, 25 bp, Saccharomyces pastorianus
acaactccaatatcgggcaaccggt

SEQ ID NO: 67445 - DNA, 25 bp, Saccharomyces pastorianus
agcaagaagcgttttcccacatagc

SEQ ID NO: 67446 - DNA, 25 bp, Saccharomyces pastorianus
gacatctagaaaaaggtctccgcac

SEQ ID NO: 67447 - DNA, 25 bp, Saccharomyces pastorianus
cactgtattcaaggctgttgataag

SEQ ID NO: 67448 - DNA, 25 bp, Saccharomyces pastorianus
atggctcttactccactgtattcaa

SEQ ID NO: 67449 - DNA, 25 bp, Saccharomyces pastorianus
actccactgtattcaaggctgttga

SEQ ID NO: 67450 - DNA, 25 bp, Saccharomyces pastorianus
ctcttactccactgtattcaaggct

SEQ ID NO: 67451 - DNA, 25 bp, Saccharomyces pastorianus
gctcttactccactgtattcaaggc

SEQ ID NO: 67452 - DNA, 25 bp, Saccharomyces pastorianus
cttactccactgtattcaaggctgt

SEQ ID NO: 67453 - DNA, 25 bp, Saccharomyces pastorianus
tactccactgtattcaaggctgttg

SEQ ID NO: 67454 - DNA, 25 bp, Saccharomyces pastorianus
ggctcttactccactgtattcaagg

SEQ ID NO: 67455 - DNA, 25 bp, Saccharomyces pastorianus
tggctcttactccactgtattcaag

SEQ ID NO: 67456 - DNA, 25 bp, Saccharomyces pastorianus
tccactgtattcaaggctgttgata

SEQ ID NO: 67457 - DNA, 25 bp, Saccharomyces pastorianus
gacatctagaaaaaggtctccgcac

SEQ ID NO: 67458 - DNA, 25 bp, Saccharomyces pastorianus
ctccactgtattcaaggctgttgat

SEQ ID NO: 67459 - DNA, 25 bp, Saccharomyces pastorianus
cactgtattcaaggctgttgataag

SEQ ID NO: 67460 - DNA, 25 bp, Saccharomyces pastorianus
atggctcttactccactgtattcaa

SEQ ID NO: 67461 - DNA, 25 bp, Saccharomyces pastorianus
taaagaggagctgggccatggctct

SEQ ID NO: 67462 - DNA, 25 bp, Saccharomyces pastorianus
gtctccgcacgatttcatttttaaa

SEQ ID NO: 67463 - DNA, 25 bp, Saccharomyces pastorianus
ctcttactccactgtattcaaggct

SEQ ID NO: 67464 - DNA, 25 bp, Saccharomyces pastorianus
cttactccactgtattcaaggctgt

SEQ ID NO: 67465 - DNA, 25 bp, Saccharomyces pastorianus
tactccactgtattcaaggctgttg

SEQ ID NO: 67466 - DNA, 25 bp, Saccharomyces pastorianus
aaaaggtctccgcacgatttcattt

SEQ ID NO: 67467 - DNA, 25 bp, Saccharomyces pastorianus
ggctcttactccactgtattcaagg

SEQ ID NO: 67468 - DNA, 25 bp, Saccharomyces pastorianus
agcagctttacttggcgctctggac

SEQ ID NO: 67469 - DNA, 25 bp, Saccharomyces pastorianus
gcgctctggacctttatatacgaaa

SEQ ID NO: 67470 - DNA, 25 bp, Saccharomyces pastorianus
gatggccagcacagcaagggtgaaa

SEQ ID NO: 67471 - DNA, 25 bp, Saccharomyces pastorianus
ctattgggtgtggtactagtataaa

SEQ ID NO: 67472 - DNA, 25 bp, Saccharomyces pastorianus
ggaaatgagtgctaagtacccgaca

SEQ ID NO: 67473 - DNA, 25 bp, Saccharomyces pastorianus
ccgatggagggagagcagctttact

SEQ ID NO: 67474 - DNA, 25 bp, Saccharomyces pastorianus
tgccgagaggcgttcgatcagctga

SEQ ID NO: 67475 - DNA, 25 bp, Saccharomyces pastorianus
tgctaagtacccgacaacgatgagt

SEQ ID NO: 67476 - DNA, 25 bp, Saccharomyces pastorianus
gggcccgagatatcgcatcttagta

SEQ ID NO: 67477 - DNA, 25 bp, Saccharomyces pastorianus
accaagggagcagtgatggccagca

SEQ ID NO: 67478 - DNA, 25 bp, Saccharomyces pastorianus
tagttggaatttgtgagccgatgga

SEQ ID NO: 67479 - DNA, 25 bp, Saccharomyces pastorianus
agtcatttctttatgtgattctaat

SEQ ID NO: 67480 - DNA, 25 bp, Saccharomyces pastorianus
gtgattctaatagacttatggtcaa

SEQ ID NO: 67481 - DNA, 25 bp, Saccharomyces pastorianus
ggaaacataattaccaatgcggaag

SEQ ID NO: 67482 - DNA, 25 bp, Saccharomyces pastorianus
gacttatggtcaaggatattactgt

SEQ ID NO: 67483 - DNA, 25 bp, Saccharomyces pastorianus
ttaccaatgcggaagctaccatcaa

SEQ ID NO: 67484 - DNA, 25 bp, Saccharomyces pastorianus
tcaattcgaaataaagggcttactt

SEQ ID NO: 67485 - DNA, 25 bp, Saccharomyces pastorianus
ggaattagagcaatgtcagtcaata

SEQ ID NO: 67486 - DNA, 25 bp, Saccharomyces pastorianus
gagggacggagaacaatcaacggta

SEQ ID NO: 67487 - DNA, 25 bp, Saccharomyces pastorianus
gcggaagctaccatcaaacttaatg

SEQ ID NO: 67488 - DNA, 25 bp, Saccharomyces pastorianus
atgaatttcgaaatattctctcaaa

SEQ ID NO: 67489 - DNA, 25 bp, Saccharomyces pastorianus
gggccgaaatcacctattatgaatt

SEQ ID NO: 67490 - DNA, 25 bp, Saccharomyces pastorianus
ttactttgtcttcggcgaacccact

SEQ ID NO: 67491 - DNA, 25 bp, Saccharomyces pastorianus
gacttacctagaacaggagacgcta

SEQ ID NO: 67492 - DNA, 25 bp, Saccharomyces pastorianus
aattacgacgaaaatctctcggaag

SEQ ID NO: 67493 - DNA, 25 bp, Saccharomyces pastorianus
cgagccacaattttgctgtaaagca

SEQ ID NO: 67494 - DNA, 25 bp, Saccharomyces pastorianus
ctctcggaagacaaagatctcgtat

SEQ ID NO: 67495 - DNA, 25 bp, Saccharomyces pastorianus
aagactcaagcatactctgcatgaa

SEQ ID NO: 67496 - DNA, 25 bp, Saccharomyces pastorianus
gaagatgagtcatttgttaatccta

SEQ ID NO: 67497 - DNA, 25 bp, Saccharomyces pastorianus
tgagattcaagagacgagccacaat

SEQ ID NO: 67498 - DNA, 25 bp, Saccharomyces pastorianus
gctttatttagagacaactgctgac

SEQ ID NO: 67499 - DNA, 25 bp, Saccharomyces pastorianus
gaacccactacacctgaactcagag

SEQ ID NO: 67500 - DNA, 25 bp, Saccharomyces pastorianus
ggagacgctagactatttcttaagg

SEQ ID NO: 67501 - DNA, 25 bp, Saccharomyces pastorianus
gcgtatgtatcagctgcaacaccac

SEQ ID NO: 67502 - DNA, 25 bp, Saccharomyces pastorianus
cttcatttttgttcgagatcagcgt

SEQ ID NO: 67503 - DNA, 25 bp, Saccharomyces pastorianus
gttattttgtatttcgttcgtcagc

SEQ ID NO: 67504 - DNA, 25 bp, Saccharomyces pastorianus
tcctcaggttcgttagctcgttgat

SEQ ID NO: 67505 - DNA, 25 bp, Saccharomyces pastorianus
gttagctcgttgatcagcacgttat

SEQ ID NO: 67506 - DNA, 25 bp, Saccharomyces pastorianus
tcttcccacaccaaagcttctttat

SEQ ID NO: 67507 - DNA, 25 bp, Saccharomyces pastorianus
gtatccatctgtacttcactttctt

SEQ ID NO: 67508 - DNA, 25 bp, Saccharomyces pastorianus
accgttcttgaccagttcttcattt

SEQ ID NO: 67509 - DNA, 25 bp, Saccharomyces pastorianus
gttcgtcagctttaccagcgatatt

SEQ ID NO: 67510 - DNA, 25 bp, Saccharomyces pastorianus
atgttaattcctccaccgttcttga

SEQ ID NO: 67511 - DNA, 25 bp, Saccharomyces pastorianus
gattgttcccgatcatgttaattcc

SEQ ID NO: 67512 - DNA, 25 bp, Saccharomyces pastorianus
gttgtaccgctctttataccgttct

SEQ ID NO: 67513 - DNA, 25 bp, Saccharomyces pastorianus
actcttgcctgtgtgcgattgcgat

SEQ ID NO: 67514 - DNA, 25 bp, Saccharomyces pastorianus
atcgcccttatctgttcagtttgtg

SEQ ID NO: 67515 - DNA, 25 bp, Saccharomyces pastorianus
ttataccgttcttctggatctcgtc

SEQ ID NO: 67516 - DNA, 25 bp, Saccharomyces pastorianus
acttgcccactaggagtttctcaat

SEQ ID NO: 67517 - DNA, 25 bp, Saccharomyces pastorianus
aatatcatgcatctctaggccgtgc

SEQ ID NO: 67518 - DNA, 25 bp, Saccharomyces pastorianus
catgtcctccatgggttgtagtcgt

SEQ ID NO: 67519 - DNA, 25 bp, Saccharomyces pastorianus
cagtttgtgctctcttgaattcatc

SEQ ID NO: 67520 - DNA, 25 bp, Saccharomyces pastorianus
gcgattgcgattgcgttgtaccgct

SEQ ID NO: 67521 - DNA, 25 bp, Saccharomyces pastorianus
ttgaattcatcgtacttgcccacta

SEQ ID NO: 67522 - DNA, 25 bp, Saccharomyces pastorianus
ggttgtagtcgtgcctatcacggca

SEQ ID NO: 67523 - DNA, 25 bp, Saccharomyces pastorianus
tacgagttgattgacctcaaggcaa

SEQ ID NO: 67524 - DNA, 25 bp, Saccharomyces pastorianus
gctaaggttcaagcctatacgtttg

SEQ ID NO: 67525 - DNA, 25 bp, Saccharomyces pastorianus
gaccaatgtcttgaggttcatacac

SEQ ID NO: 67526 - DNA, 25 bp, Saccharomyces pastorianus
agtcgatttcatttgcagctgttgc

SEQ ID NO: 67527 - DNA, 25 bp, Saccharomyces pastorianus
aatccagacaattccgctaaggttc

SEQ ID NO: 67528 - DNA, 25 bp, Saccharomyces pastorianus
ggactggagccaaagaccgaaccgt

SEQ ID NO: 67529 - DNA, 25 bp, Saccharomyces pastorianus
gttgaccactacattgagtgttcca

SEQ ID NO: 67530 - DNA, 25 bp, Saccharomyces pastorianus
aaacatatcaaagtagcggcgcaga

SEQ ID NO: 67531 - DNA, 25 bp, Saccharomyces pastorianus
cagctgttgcaggagaccaatgtct

SEQ ID NO: 67532 - DNA, 25 bp, Saccharomyces pastorianus
aaagggtattctctctcatagctca

SEQ ID NO: 67533 - DNA, 25 bp, Saccharomyces pastorianus
gtcaaggagccgttagtcaattttt

SEQ ID NO: 67534 - DNA, 25 bp, Saccharomyces pastorianus
acatgagcatcgtggtcgttgcact

SEQ ID NO: 67535 - DNA, 25 bp, Saccharomyces pastorianus
acgcggacgcggatgccatggaaat

SEQ ID NO: 67536 - DNA, 25 bp, Saccharomyces pastorianus
ggacaagttcaccagggaccacgag

SEQ ID NO: 67537 - DNA, 25 bp, Saccharomyces pastorianus
agggaacaggcatcggctgcgacaa

SEQ ID NO: 67538 - DNA, 25 bp, Saccharomyces pastorianus
ggcgccggcaacaaagtcacttaca

SEQ ID NO: 67539 - DNA, 25 bp, Saccharomyces pastorianus
aagtctttgccgtcaccacgaaaag

SEQ ID NO: 67540 - DNA, 25 bp, Saccharomyces pastorianus
aatcgacgacacagacgcggacaca

SEQ ID NO: 67541 - DNA, 25 bp, Saccharomyces pastorianus
atcatcgacgtatgctgctcaccaa

SEQ ID NO: 67542 - DNA, 25 bp, Saccharomyces pastorianus
tggacccttcaagccagtctaagca

SEQ ID NO: 67543 - DNA, 25 bp, Saccharomyces pastorianus
tttcagctactacgatttctccaag

SEQ ID NO: 67544 - DNA, 25 bp, Saccharomyces pastorianus
gctgtcgcaactgcttcaatcgatg

SEQ ID NO: 67545 - DNA, 25 bp, Saccharomyces pastorianus
ggtggtgaggaagcttctgattcaa

SEQ ID NO: 67546 - DNA, 25 bp, Saccharomyces pastorianus
taccccaggttcttttgatccagtt

SEQ ID NO: 67547 - DNA, 25 bp, Saccharomyces pastorianus
gcgtaagctccgatggcggccatta

SEQ ID NO: 67548 - DNA, 25 bp, Saccharomyces pastorianus
ttatcgacaaattaccccaggttct

SEQ ID NO: 67549 - DNA, 25 bp, Saccharomyces pastorianus
gtgatttatcaccacggcgtaagct

SEQ ID NO: 67550 - DNA, 25 bp, Saccharomyces pastorianus
tattaccattcaaatcctcttcggg

SEQ ID NO: 67551 - DNA, 25 bp, Saccharomyces pastorianus
aatgttgaagaaccacgcctcaggc

SEQ ID NO: 67552 - DNA, 25 bp, Saccharomyces pastorianus
ggtggccaatttagatccgtactag

SEQ ID NO: 67553 - DNA, 25 bp, Saccharomyces pastorianus
ggatatttcagactccagcgtgaat

SEQ ID NO: 67554 - DNA, 25 bp, Saccharomyces pastorianus
acgcctcaggcatcgccgatagaaa

SEQ ID NO: 67555 - DNA, 25 bp, Saccharomyces pastorianus
gcggccattacacggcagatgttta

SEQ ID NO: 67556 - DNA, 25 bp, Saccharomyces pastorianus
aatgggatggttgaagccgcccgct

SEQ ID NO: 67557 - DNA, 25 bp, Saccharomyces pastorianus
gtggtcgagctagacgtgcctgaat

SEQ ID NO: 67558 - DNA, 25 bp, Saccharomyces pastorianus
aattcctcaattgtcttcactttcg

SEQ ID NO: 67559 - DNA, 25 bp, Saccharomyces pastorianus
aatcttcagacatcatattccccaa

SEQ ID NO: 67560 - DNA, 25 bp, Saccharomyces pastorianus
cgctacatggctacttgacggattc

SEQ ID NO: 67561 - DNA, 25 bp, Saccharomyces pastorianus
aagttactgccggacgacctcataa

SEQ ID NO: 67562 - DNA, 25 bp, Saccharomyces pastorianus
aaaagagcggacttctctgcactgt

SEQ ID NO: 67563 - DNA, 25 bp, Saccharomyces pastorianus
gggacacagacttcaatgctcttga

SEQ ID NO: 67564 - DNA, 25 bp, Saccharomyces pastorianus
tgcctgaatccgctatactcgaaag

SEQ ID NO: 67565 - DNA, 25 bp, Saccharomyces pastorianus
gtcagagtctacattgggccgcaaa

SEQ ID NO: 67566 - DNA, 25 bp, Saccharomyces pastorianus
gggccgcaaagctgctacttatatt

SEQ ID NO: 67567 - DNA, 25 bp, Saccharomyces pastorianus
attcaatcatcgatcttccaaccaa

SEQ ID NO: 67568 - DNA, 25 bp, Saccharomyces pastorianus
gagcgatcctaatcatgataggcat

SEQ ID NO: 67569 - DNA, 25 bp, Saccharomyces pastorianus
ttccaaccaatcgaagagcatggca

SEQ ID NO: 67570 - DNA, 25 bp, Saccharomyces pastorianus
agagcatggcaaggtttttgggtct

SEQ ID NO: 67571 - DNA, 25 bp, Saccharomyces pastorianus
gtctgggtctgcaactgggactgat

SEQ ID NO: 67572 - DNA, 25 bp, Saccharomyces pastorianus
gggtctgcaactgggactgattcca

SEQ ID NO: 67573 - DNA, 25 bp, Saccharomyces pastorianus
atcgatcttccaaccaatcgaagag

SEQ ID NO: 67574 - DNA, 25 bp, Saccharomyces pastorianus
aaaagtgagcgatcctaatcatgat

SEQ ID NO: 67575 - DNA, 25 bp, Saccharomyces pastorianus
ttttgggtctgggtctgggtctgca

SEQ ID NO: 67576 - DNA, 25 bp, Saccharomyces pastorianus
taatggaaatgaatccaatctaggc

SEQ ID NO: 67577 - DNA, 25 bp, Saccharomyces pastorianus
ctgggactgattccagtacagaaaa

SEQ ID NO: 67578 - DNA, 25 bp, Saccharomyces pastorianus
aagccagtttagagctacttccaga

SEQ ID NO: 67579 - DNA, 25 bp, Saccharomyces pastorianus
atccactcctgtacctgagggaaat

SEQ ID NO: 67580 - DNA, 25 bp, Saccharomyces pastorianus
tgagatgagcttttccactgccagg

SEQ ID NO: 67581 - DNA, 25 bp, Saccharomyces pastorianus
gataatacgccaataccgccaagac

SEQ ID NO: 67582 - DNA, 25 bp, Saccharomyces pastorianus
atgaagaccgtatggcttccatcca

SEQ ID NO: 67583 - DNA, 25 bp, Saccharomyces pastorianus
gggatttgggacttttgacacttgt

SEQ ID NO: 67584 - DNA, 25 bp, Saccharomyces pastorianus
ccaaggccctacatttctatcaatg

SEQ ID NO: 67585 - DNA, 25 bp, Saccharomyces pastorianus
acggttaaaattgctgtccttgaca

SEQ ID NO: 67586 - DNA, 25 bp, Saccharomyces pastorianus
gctgggattcataaacatcgccaat

SEQ ID NO: 67587 - DNA, 25 bp, Saccharomyces pastorianus
ttgcgatagtagcacatccactcct

SEQ ID NO: 67588 - DNA, 25 bp, Saccharomyces pastorianus
actgcattgcccatacataacggtt

SEQ ID NO: 67589 - DNA, 25 bp, Saccharomyces pastorianus
attgaagtcccagttcttgcagctt

SEQ ID NO: 67590 - DNA, 25 bp, Saccharomyces pastorianus
aatcggcttggaacgtgaactccta

SEQ ID NO: 67591 - DNA, 25 bp, Saccharomyces pastorianus
gtgaactcctattaaccgaacgtct

SEQ ID NO: 67592 - DNA, 25 bp, Saccharomyces pastorianus
gaatgcacctgatccggatgaagac

SEQ ID NO: 67593 - DNA, 25 bp, Saccharomyces pastorianus
agtgttctgcaaccgaatgcacctg

SEQ ID NO: 67594 - DNA, 25 bp, Saccharomyces pastorianus
ggattggcacgatctacagtacgat

SEQ ID NO: 67595 - DNA, 25 bp, Saccharomyces pastorianus
cttgcagcttccattgtttgagtac

SEQ ID NO: 67596 - DNA, 25 bp, Saccharomyces pastorianus
aatatcgctcgtcatctgtgtttca

SEQ ID NO: 67597 - DNA, 25 bp, Saccharomyces pastorianus
ctgtgtttcagtctttgtgtggtgt

SEQ ID NO: 67598 - DNA, 25 bp, Saccharomyces pastorianus
gtacaactggctactcttacaaaac

SEQ ID NO: 67599 - DNA, 25 bp, Saccharomyces pastorianus
gtataccaagtcattcggcttcctt

SEQ ID NO: 67600 - DNA, 25 bp, Saccharomyces pastorianus
gccaggtttggccattggtagcaaa

SEQ ID NO: 67601 - DNA, 25 bp, Saccharomyces pastorianus
aaagattggctggtcgttgtcctgc

SEQ ID NO: 67602 - DNA, 25 bp, Saccharomyces pastorianus
aattcactattgttgcggtagccaa

SEQ ID NO: 67603 - DNA, 25 bp, Saccharomyces pastorianus
cgttgtcctgcctcaaatatgtaat

SEQ ID NO: 67604 - DNA, 25 bp, Saccharomyces pastorianus
tctatgggacaagatctggcgtacc

SEQ ID NO: 67605 - DNA, 25 bp, Saccharomyces pastorianus
aagacaacaaatttcctctatggga

SEQ ID NO: 67606 - DNA, 25 bp, Saccharomyces pastorianus
gataggttcgtcaacaacgttttgg

SEQ ID NO: 67607 - DNA, 25 bp, Saccharomyces pastorianus
acagttacacggatttgctaagagc

SEQ ID NO: 67608 - DNA, 25 bp, Saccharomyces pastorianus
ctggcgtaccagactatgtatggtt

SEQ ID NO: 67609 - DNA, 25 bp, Saccharomyces pastorianus
tggacttcatacatattacctcaat

SEQ ID NO: 67610 - DNA, 25 bp, Saccharomyces pastorianus
ggtagctaagttcccaattgaggca

SEQ ID NO: 67611 - DNA, 25 bp, Saccharomyces pastorianus
tcagaactcaactaacatcgcaaga

SEQ ID NO: 67612 - DNA, 25 bp, Saccharomyces pastorianus
atctagtttcggaattcagaactca

SEQ ID NO: 67613 - DNA, 25 bp, Saccharomyces pastorianus
gaaaagattcttctagcttattatg

SEQ ID NO: 67614 - DNA, 25 bp, Saccharomyces pastorianus
tggtacatctttgccatattttgtt

SEQ ID NO: 67615 - DNA, 25 bp, Saccharomyces pastorianus
tttgccatattttgtttacctactg

SEQ ID NO: 67616 - DNA, 25 bp, Saccharomyces pastorianus
ttgttttaagacacgtccccaactg

SEQ ID NO: 67617 - DNA, 25 bp, Saccharomyces pastorianus
gtgagattggtacatctttgccata

SEQ ID NO: 67618 - DNA, 25 bp, Saccharomyces pastorianus
tcttctagcttattatgattcgtat

SEQ ID NO: 67619 - DNA, 25 bp, Saccharomyces pastorianus
tgtttacctactggaaaatctagtt

SEQ ID NO: 67620 - DNA, 25 bp, Saccharomyces pastorianus
gacacgtccccaactgtgagattgg

SEQ ID NO: 67621 - DNA, 25 bp, Saccharomyces pastorianus
catcgcaagagtttgatttcatgtt

SEQ ID NO: 67622 - DNA, 25 bp, Saccharomyces pastorianus
agagcctatccaattgaacccatac

SEQ ID NO: 67623 - DNA, 25 bp, Saccharomyces pastorianus
gaccttatcggaaagcccatggatt

SEQ ID NO: 67624 - DNA, 25 bp, Saccharomyces pastorianus
aaggcttctgacactctgttccaaa

SEQ ID NO: 67625 - DNA, 25 bp, Saccharomyces pastorianus
ctttgaggccagattccattgaatt

SEQ ID NO: 67626 - DNA, 25 bp, Saccharomyces pastorianus
tgggtttcaaactaacgccaacaca

SEQ ID NO: 67627 - DNA, 25 bp, Saccharomyces pastorianus
gattcactcatcatcaaggcttctg

SEQ ID NO: 67628 - DNA, 25 bp, Saccharomyces pastorianus
aggaacgctgtttctgatcttgccc

SEQ ID NO: 67629 - DNA, 25 bp, Saccharomyces pastorianus
atttacctgcccaaaatatcgttga

SEQ ID NO: 67630 - DNA, 25 bp, Saccharomyces pastorianus
ataccagctgcaagtgaggattcac

SEQ ID NO: 67631 - DNA, 25 bp, Saccharomyces pastorianus
agcacaacgttaatcggtaccttag

SEQ ID NO: 67632 - DNA, 25 bp, Saccharomyces pastorianus
gatcttgcccaatctttatggcaga

SEQ ID NO: 67633 - DNA, 25 bp, Saccharomyces pastorianus
aaaagccagcatcccgtaattgcat

SEQ ID NO: 67634 - DNA, 25 bp, Saccharomyces pastorianus
ggcaaattactcaactcccaagcaa

SEQ ID NO: 67635 - DNA, 25 bp, Saccharomyces pastorianus
tctcttctgggcttgacactagtat

SEQ ID NO: 67636 - DNA, 25 bp, Saccharomyces pastorianus
tttaagatcaccagaacacccagtc

SEQ ID NO: 67637 - DNA, 25 bp, Saccharomyces pastorianus
acacccagtcgatgagttctctatt

SEQ ID NO: 67638 - DNA, 25 bp, Saccharomyces pastorianus
aggccacgcttctggagttattact

SEQ ID NO: 67639 - DNA, 25 bp, Saccharomyces pastorianus
taagcatgttattgcaggccacgct

SEQ ID NO: 67640 - DNA, 25 bp, Saccharomyces pastorianus
atagcatagccgtattcgtgggaac

SEQ ID NO: 67641 - DNA, 25 bp, Saccharomyces pastorianus
taatcagttttgctacacgccgcac

SEQ ID NO: 67642 - DNA, 25 bp, Saccharomyces pastorianus
gctgatgaatttttgcttgtctctt

SEQ ID NO: 67643 - DNA, 25 bp, Saccharomyces pastorianus
aagcgcctatatttttagtctccga

SEQ ID NO: 67644 - DNA, 25 bp, Saccharomyces pastorianus
aacctgagtgttattccggcttgtc

SEQ ID NO: 67645 - DNA, 25 bp, Saccharomyces pastorianus
ataccgtttcttgtggtctgctaat

SEQ ID NO: 67646 - DNA, 25 bp, Saccharomyces pastorianus
cttgtctagggtttgcgtacgtgat

SEQ ID NO: 67647 - DNA, 25 bp, Saccharomyces pastorianus
gaaagccgttacgtggatcgccatt

SEQ ID NO: 67648 - DNA, 25 bp, Saccharomyces pastorianus
gagtcgcctcgtttcaagaccggtt

SEQ ID NO: 67649 - DNA, 25 bp, Saccharomyces pastorianus
tattcattctctcagtctacttacg

SEQ ID NO: 67650 - DNA, 25 bp, Saccharomyces pastorianus
gtatgcatttttcaccacgtatttc

SEQ ID NO: 67651 - DNA, 25 bp, Saccharomyces pastorianus
acgtgatcttttgtgctatgggtgc

SEQ ID NO: 67652 - DNA, 25 bp, Saccharomyces pastorianus
ttggcatggcctactgtggagtcgc

SEQ ID NO: 67653 - DNA, 25 bp, Saccharomyces pastorianus
tgggatatttcctccaaggctaaat

SEQ ID NO: 67654 - DNA, 25 bp, Saccharomyces pastorianus
gtatttcagtgttgctgcgtcacca

SEQ ID NO: 67655 - DNA, 25 bp, Saccharomyces pastorianus
cgacgtcacgtcgaatattgcattc

SEQ ID NO: 67656 - DNA, 25 bp, Saccharomyces pastorianus
gttcattacgcaaccattcacactt

SEQ ID NO: 67657 - DNA, 25 bp, Saccharomyces pastorianus
ggagaacccatcaagctgccagaaa

SEQ ID NO: 67658 - DNA, 25 bp, Saccharomyces pastorianus
atatgctcatcacctgcgtaatgat

SEQ ID NO: 67659 - DNA, 25 bp, Saccharomyces pastorianus
tcgtttgttgattcgaactcgccat

SEQ ID NO: 67660 - DNA, 25 bp, Saccharomyces pastorianus
gactcaattgggtcatttggtacag

SEQ ID NO: 67661 - DNA, 25 bp, Saccharomyces pastorianus
gttgtacagtttagtcacgacgtca

SEQ ID NO: 67662 - DNA, 25 bp, Saccharomyces pastorianus
attcacacttgacagcagcactttc

SEQ ID NO: 67663 - DNA, 25 bp, Saccharomyces pastorianus
aatgattaccaagatcttctgcaag

SEQ ID NO: 67664 - DNA, 25 bp, Saccharomyces pastorianus
aagtctcttcatgaaatgtgcggca

SEQ ID NO: 67665 - DNA, 25 bp, Saccharomyces pastorianus
ggacgcagagcgaccttcaaaaatt

SEQ ID NO: 67666 - DNA, 25 bp, Saccharomyces pastorianus
tccttttcatccatttacaaaactt

SEQ ID NO: 67667 - DNA, 25 bp, Saccharomyces pastorianus
catggtacgacaatcacaataaggg

SEQ ID NO: 67668 - DNA, 25 bp, Saccharomyces pastorianus
atttgattccgcgatcacttcatgg

SEQ ID NO: 67669 - DNA, 25 bp, Saccharomyces pastorianus
aacagtatttgattccgcgatcact

SEQ ID NO: 67670 - DNA, 25 bp, Saccharomyces pastorianus
attccgcgatcacttcatggtacga

SEQ ID NO: 67671 - DNA, 25 bp, Saccharomyces pastorianus
gttttccaaacagtatttgattccg

SEQ ID NO: 67672 - DNA, 25 bp, Saccharomyces pastorianus
tcatccatttacaaaacttttttca

SEQ ID NO: 67673 - DNA, 25 bp, Saccharomyces pastorianus
gatcacttcatggtacgacaatcac

SEQ ID NO: 67674 - DNA, 25 bp, Saccharomyces pastorianus
ttatggaaggacgtaaaggctcgaa

SEQ ID NO: 67675 - DNA, 25 bp, Saccharomyces pastorianus
cgcgatcacttcatggtacgacaat

SEQ ID NO: 67676 - DNA, 25 bp, Saccharomyces pastorianus
ttgattccgcgatcacttcatggta

SEQ ID NO: 67677 - DNA, 25 bp, Saccharomyces pastorianus
tccttttcatccatttacaaaactt

SEQ ID NO: 67678 - DNA, 25 bp, Saccharomyces pastorianus
catggtacgacaatcacaataaggg

SEQ ID NO: 67679 - DNA, 25 bp, Saccharomyces pastorianus
atttgattccgcgatcacttcatgg

SEQ ID NO: 67680 - DNA, 25 bp, Saccharomyces pastorianus
aacagtatttgattccgcgatcact

SEQ ID NO: 67681 - DNA, 25 bp, Saccharomyces pastorianus
attccgcgatcacttcatggtacga

SEQ ID NO: 67682 - DNA, 25 bp, Saccharomyces pastorianus
tgttggtactatctttgctggtgcc

SEQ ID NO: 67683 - DNA, 25 bp, Saccharomyces pastorianus
tgctggtgcctttgttttccaaaca

SEQ ID NO: 67684 - DNA, 25 bp, Saccharomyces pastorianus
gatcacttcatggtacgacaatcac

SEQ ID NO: 67685 - DNA, 25 bp, Saccharomyces pastorianus
ttatggaaggacgtaaaggctcgaa

SEQ ID NO: 67686 - DNA, 25 bp, Saccharomyces pastorianus
tttccaaacagtatttgattccgcg

SEQ ID NO: 67687 - DNA, 25 bp, Saccharomyces pastorianus
cgcgatcacttcatggtacgacaat

SEQ ID NO: 67688 - DNA, 25 bp, Saccharomyces pastorianus
ttagaaaagcgtggcgaacccttag

SEQ ID NO: 67689 - DNA, 25 bp, Saccharomyces pastorianus
attaccgcctggaactaaattcaag

SEQ ID NO: 67690 - DNA, 25 bp, Saccharomyces pastorianus
gaaggccatctggaacagtacgcaa

SEQ ID NO: 67691 - DNA, 25 bp, Saccharomyces pastorianus
ttggtagatcattcgacatgtcctt

SEQ ID NO: 67692 - DNA, 25 bp, Saccharomyces pastorianus
agacaaattggcaagctgatcagca

SEQ ID NO: 67693 - DNA, 25 bp, Saccharomyces pastorianus
ccagataattgcatggtcaggttag

SEQ ID NO: 67694 - DNA, 25 bp, Saccharomyces pastorianus
acggattagctggtgtcatacattc

SEQ ID NO: 67695 - DNA, 25 bp, Saccharomyces pastorianus
gacatgtccttattaccgcctggaa

SEQ ID NO: 67696 - DNA, 25 bp, Saccharomyces pastorianus
gaaatgttatactccatgtcgaaga

SEQ ID NO: 67697 - DNA, 25 bp, Saccharomyces pastorianus
cagtggtagagtttccaaccaaact

SEQ ID NO: 67698 - DNA, 25 bp, Saccharomyces pastorianus
gttacgaagctgattattacggatt

SEQ ID NO: 67699 - DNA, 25 bp, Saccharomyces pastorianus
ttacctctaaagtccgtgtctgatg

SEQ ID NO: 67700 - DNA, 25 bp, Saccharomyces pastorianus
gtacaagtcagcacgacacacgcag

SEQ ID NO: 67701 - DNA, 25 bp, Saccharomyces pastorianus
gaaatttcgcacatgacacaccaag

SEQ ID NO: 67702 - DNA, 25 bp, Saccharomyces pastorianus
ggatgaccctggttctaatcaaggt

SEQ ID NO: 67703 - DNA, 25 bp, Saccharomyces pastorianus
actattctaccccaggtgcattatt

SEQ ID NO: 67704 - DNA, 25 bp, Saccharomyces pastorianus
cacaacttccattttacctctaaag

SEQ ID NO: 67705 - DNA, 25 bp, Saccharomyces pastorianus
attgtttcgataatgctgccggtga

SEQ ID NO: 67706 - DNA, 25 bp, Saccharomyces pastorianus
taagactttcttaggcgcccatggt

SEQ ID NO: 67707 - DNA, 25 bp, Saccharomyces pastorianus
gacgtcacagaaactatcgccaaat

SEQ ID NO: 67708 - DNA, 25 bp, Saccharomyces pastorianus
gttcccgaagaagagccgacgtcac

SEQ ID NO: 67709 - DNA, 25 bp, Saccharomyces pastorianus
gacgccatgaacgaggtattttcca

SEQ ID NO: 67710 - DNA, 25 bp, Saccharomyces pastorianus
tgtacatatacatccttttcgctcc

SEQ ID NO: 67711 - DNA, 25 bp, Saccharomyces pastorianus
atatacatccttttcgctccattat

SEQ ID NO: 67712 - DNA, 25 bp, Saccharomyces pastorianus
atccttttcgctccattatgtcaag

SEQ ID NO: 67713 - DNA, 25 bp, Saccharomyces pastorianus
ttcgctccattatgtcaaggtatgc

SEQ ID NO: 67714 - DNA, 25 bp, Saccharomyces pastorianus
gtatgcacggtgatggagaaaaata

SEQ ID NO: 67715 - DNA, 25 bp, Saccharomyces pastorianus
atgtcaaggtatgcacggtgatgga

SEQ ID NO: 67716 - DNA, 25 bp, Saccharomyces pastorianus
cttttcgctccattatgtcaaggta

SEQ ID NO: 67717 - DNA, 25 bp, Saccharomyces pastorianus
atacatccttttcgctccattatgt

SEQ ID NO: 67718 - DNA, 25 bp, Saccharomyces pastorianus
tacatatacatccttttcgctccat

SEQ ID NO: 67719 - DNA, 25 bp, Saccharomyces pastorianus
gtgatggagaaaaatatgtaccttt

SEQ ID NO: 67720 - DNA, 25 bp, Saccharomyces pastorianus
tccattatgtcaaggtatgcacggt

SEQ ID NO: 67721 - DNA, 25 bp, Saccharomyces pastorianus
gatgaagatccagacaccttgcacc

SEQ ID NO: 67722 - DNA, 25 bp, Saccharomyces pastorianus
acagtttatcgtcaagtgcatggga

SEQ ID NO: 67723 - DNA, 25 bp, Saccharomyces pastorianus
ttgcaccctgtttctacctttttca

SEQ ID NO: 67724 - DNA, 25 bp, Saccharomyces pastorianus
gttcatcatcatttctgtgctgtat

SEQ ID NO: 67725 - DNA, 25 bp, Saccharomyces pastorianus
tgttacctggcttccactgggctaa

SEQ ID NO: 67726 - DNA, 25 bp, Saccharomyces pastorianus
aatggattccccaaatcctgactac

SEQ ID NO: 67727 - DNA, 25 bp, Saccharomyces pastorianus
gcttactcatatttccgttcatcat

SEQ ID NO: 67728 - DNA, 25 bp, Saccharomyces pastorianus
ggatatctactacatgcttactcat

SEQ ID NO: 67729 - DNA, 25 bp, Saccharomyces pastorianus
gattttgttttgaccaacttcgcca

SEQ ID NO: 67730 - DNA, 25 bp, Saccharomyces pastorianus
gaggcacaaggttttgggctgttac

SEQ ID NO: 67731 - DNA, 25 bp, Saccharomyces pastorianus
cttcgccatggcttcgtctaataat

SEQ ID NO: 67732 - DNA, 25 bp, Saccharomyces pastorianus
gagagccttagttcgtcaatccaaa

SEQ ID NO: 67733 - DNA, 25 bp, Saccharomyces pastorianus
aaattcaagcgcgtattgtcgaaga

SEQ ID NO: 67734 - DNA, 25 bp, Saccharomyces pastorianus
gaagttgcagaatttgataccccat

SEQ ID NO: 67735 - DNA, 25 bp, Saccharomyces pastorianus
actagtcagaggtggcgcgattgcc

SEQ ID NO: 67736 - DNA, 25 bp, Saccharomyces pastorianus
aagctacatcttcagtggattatga

SEQ ID NO: 67737 - DNA, 25 bp, Saccharomyces pastorianus
tgagctatgggatgcactagtcaga

SEQ ID NO: 67738 - DNA, 25 bp, Saccharomyces pastorianus
gaaaactggccattattccacaaga

SEQ ID NO: 67739 - DNA, 25 bp, Saccharomyces pastorianus
gagaggcaattactagcactaacga

SEQ ID NO: 67740 - DNA, 25 bp, Saccharomyces pastorianus
gataccccatggacattattttctc

SEQ ID NO: 67741 - DNA, 25 bp, Saccharomyces pastorianus
tattccacaagatccggttttattt

SEQ ID NO: 67742 - DNA, 25 bp, Saccharomyces pastorianus
atgtattgctcataggctgaagact

SEQ ID NO: 67743 - DNA, 25 bp, Saccharomyces pastorianus
ggtttgtaatatctctttttgcctt

SEQ ID NO: 67744 - DNA, 25 bp, Saccharomyces pastorianus
gcagagtttgttggaagctccggaa

SEQ ID NO: 67745 - DNA, 25 bp, Saccharomyces pastorianus
gtatcttctttgctgggtttgtaat

SEQ ID NO: 67746 - DNA, 25 bp, Saccharomyces pastorianus
agacagcccggtaacatttttgcct

SEQ ID NO: 67747 - DNA, 25 bp, Saccharomyces pastorianus
gatatgatcattgggctgggccgtt

SEQ ID NO: 67748 - DNA, 25 bp, Saccharomyces pastorianus
catggccttatctttacccagtatt

SEQ ID NO: 67749 - DNA, 25 bp, Saccharomyces pastorianus
tctgggtttcagaatcgctgcaaat

SEQ ID NO: 67750 - DNA, 25 bp, Saccharomyces pastorianus
acctattgccattggtacgggtatt

SEQ ID NO: 67751 - DNA, 25 bp, Saccharomyces pastorianus
aaatggaaccttccgctgactttga

SEQ ID NO: 67752 - DNA, 25 bp, Saccharomyces pastorianus
attgcttcactggtcacatttctag

SEQ ID NO: 67753 - DNA, 25 bp, Saccharomyces pastorianus
gatgactcactgttcatttgaatgg

SEQ ID NO: 67754 - DNA, 25 bp, Saccharomyces pastorianus
aattacttatctgcacgacgggctc

SEQ ID NO: 67755 - DNA, 25 bp, Saccharomyces pastorianus
aaaaactggccattcgatgcacctt

SEQ ID NO: 67756 - DNA, 25 bp, Saccharomyces pastorianus
cacttttggtgtcttggcgattatc

SEQ ID NO: 67757 - DNA, 25 bp, Saccharomyces pastorianus
aaattcatttccttttccattgcga

SEQ ID NO: 67758 - DNA, 25 bp, Saccharomyces pastorianus
tactagtcggactcgggctatttgt

SEQ ID NO: 67759 - DNA, 25 bp, Saccharomyces pastorianus
atcattatacatgctggtggcccca

SEQ ID NO: 67760 - DNA, 25 bp, Saccharomyces pastorianus
ggtaaccagttctttttgctactag

SEQ ID NO: 67761 - DNA, 25 bp, Saccharomyces pastorianus
gatctcggcagcttccaatatttta

SEQ ID NO: 67762 - DNA, 25 bp, Saccharomyces pastorianus
tggcagacaccagcttgaacagagt

SEQ ID NO: 67763 - DNA, 25 bp, Saccharomyces pastorianus
gaatccttcaactatctcgtatcaa

SEQ ID NO: 67764 - DNA, 25 bp, Saccharomyces pastorianus
tttaccattacaaacttctgcccaa

SEQ ID NO: 67765 - DNA, 25 bp, Saccharomyces pastorianus
aaatttcctcgagcatagtttcaag

SEQ ID NO: 67766 - DNA, 25 bp, Saccharomyces pastorianus
gactaggtttcttgaggtaccgcaa

SEQ ID NO: 67767 - DNA, 25 bp, Saccharomyces pastorianus
ttgcgatatggattttcagcgctat

SEQ ID NO: 67768 - DNA, 25 bp, Saccharomyces pastorianus
gatcgggtatatttgcggttcccag

SEQ ID NO: 67769 - DNA, 25 bp, Saccharomyces pastorianus
agcatatcctttattgtcctagcgg

SEQ ID NO: 67770 - DNA, 25 bp, Saccharomyces pastorianus
taacgggctccattgtgtttggcaa

SEQ ID NO: 67771 - DNA, 25 bp, Saccharomyces pastorianus
tgcgtttgccggattataccttttc

SEQ ID NO: 67772 - DNA, 25 bp, Saccharomyces pastorianus
tgaccggttacgcattaacgggctc

SEQ ID NO: 67773 - DNA, 25 bp, Saccharomyces pastorianus
cggttcccagcgtgatcttgttgaa

SEQ ID NO: 67774 - DNA, 25 bp, Saccharomyces pastorianus
tagcggttctcattcacggtatctc

SEQ ID NO: 67775 - DNA, 25 bp, Saccharomyces pastorianus
catctaggtgtgttttccacggtta

SEQ ID NO: 67776 - DNA, 25 bp, Saccharomyces pastorianus
aagatcattgttgcgtgagcccaaa

SEQ ID NO: 67777 - DNA, 25 bp, Saccharomyces pastorianus
atccctcaggatcctgttttgttca

SEQ ID NO: 67778 - DNA, 25 bp, Saccharomyces pastorianus
atagtggagacctggagcttttgaa

SEQ ID NO: 67779 - DNA, 25 bp, Saccharomyces pastorianus
acaaggtacttgtcatggatgcagg

SEQ ID NO: 67780 - DNA, 25 bp, Saccharomyces pastorianus
caagtcaatttgatttccgcaggtg

SEQ ID NO: 67781 - DNA, 25 bp, Saccharomyces pastorianus
aattgcacatcgactgagatcagtt

SEQ ID NO: 67782 - DNA, 25 bp, Saccharomyces pastorianus
gatctagttactttacgtcgtgcca

SEQ ID NO: 67783 - DNA, 25 bp, Saccharomyces pastorianus
gaccatccctctaacctgttgaaaa

SEQ ID NO: 67784 - DNA, 25 bp, Saccharomyces pastorianus
tctgacaatttgatccagggcatta

SEQ ID NO: 67785 - DNA, 25 bp, Saccharomyces pastorianus
aggtcaaaacatttctcaaggcgaa

SEQ ID NO: 67786 - DNA, 25 bp, Saccharomyces pastorianus
atgaagctacttcctccgttgatta

SEQ ID NO: 67787 - DNA, 25 bp, Saccharomyces pastorianus
gagtgctgtagattcacacaccgcc

SEQ ID NO: 67788 - DNA, 25 bp, Saccharomyces pastorianus
tgatcttcaggaaagcacttcacaa

SEQ ID NO: 67789 - DNA, 25 bp, Saccharomyces pastorianus
gccttgctcactctttatgttatta

SEQ ID NO: 67790 - DNA, 25 bp, Saccharomyces pastorianus
aacggcgccataagtctagatgttt

SEQ ID NO: 67791 - DNA, 25 bp, Saccharomyces pastorianus
gaaacttccggtttttcgatgaatg

SEQ ID NO: 67792 - DNA, 25 bp, Saccharomyces pastorianus
gaagaaattgctcagatgccttatg

SEQ ID NO: 67793 - DNA, 25 bp, Saccharomyces pastorianus
gtgaacgattccaaaccccatatag

SEQ ID NO: 67794 - DNA, 25 bp, Saccharomyces pastorianus
agtcctggtggatacgatactgggt

SEQ ID NO: 67795 - DNA, 25 bp, Saccharomyces pastorianus
ttggtcacccacaacgtttcattaa

SEQ ID NO: 67796 - DNA, 25 bp, Saccharomyces pastorianus
gttggaaagctttaaccgccttgct

SEQ ID NO: 67797 - DNA, 25 bp, Saccharomyces pastorianus
cacaccgccgtatggatctacgaaa

SEQ ID NO: 67798 - DNA, 25 bp, Saccharomyces pastorianus
tttcgaagatgaaccaaatgcacat

SEQ ID NO: 67799 - DNA, 25 bp, Saccharomyces pastorianus
gatttcgaagatgaaccaaatgcac

SEQ ID NO: 67800 - DNA, 25 bp, Saccharomyces pastorianus
aaacacaaacgctgatcaagatatt

SEQ ID NO: 67801 - DNA, 25 bp, Saccharomyces pastorianus
gaaccaaatgcacatgcaaacacaa

SEQ ID NO: 67802 - DNA, 25 bp, Saccharomyces pastorianus
tgcaaacacaaacgctgatcaagat

SEQ ID NO: 67803 - DNA, 25 bp, Saccharomyces pastorianus
atgcaaacacaaacgctgatcaaga

SEQ ID NO: 67804 - DNA, 25 bp, Saccharomyces pastorianus
gaagatgaaccaaatgcacatgcaa

SEQ ID NO: 67805 - DNA, 25 bp, Saccharomyces pastorianus
gatatttttttcgacatcgattata

SEQ ID NO: 67806 - DNA, 25 bp, Saccharomyces pastorianus
gatgaaccaaatgcacatgcaaaca

SEQ ID NO: 67807 - DNA, 25 bp, Saccharomyces pastorianus
attgatttagcatccgatttcgaag

SEQ ID NO: 67808 - DNA, 25 bp, Saccharomyces pastorianus
acatgcaaacacaaacgctgatcaa

SEQ ID NO: 67809 - DNA, 25 bp, Saccharomyces pastorianus
agatgactttcacatttctccttgc

SEQ ID NO: 67810 - DNA, 25 bp, Saccharomyces pastorianus
gatgccagatgtttgctgcgtttac

SEQ ID NO: 67811 - DNA, 25 bp, Saccharomyces pastorianus
agacctaccagtacatcctatttgt

SEQ ID NO: 67812 - DNA, 25 bp, Saccharomyces pastorianus
aatcccgagtctttgtctaatttga

SEQ ID NO: 67813 - DNA, 25 bp, Saccharomyces pastorianus
tattcttaggcttactcgtctcaac

SEQ ID NO: 67814 - DNA, 25 bp, Saccharomyces pastorianus
gccgttttcgcattcttttggagac

SEQ ID NO: 67815 - DNA, 25 bp, Saccharomyces pastorianus
aactttcgcctatgttgggatggac

SEQ ID NO: 67816 - DNA, 25 bp, Saccharomyces pastorianus
tcccctggtggtatgtttgtttgca

SEQ ID NO: 67817 - DNA, 25 bp, Saccharomyces pastorianus
tatgcattgcattcctactccaaaa

SEQ ID NO: 67818 - DNA, 25 bp, Saccharomyces pastorianus
gttgatatcctttggctacggtata

SEQ ID NO: 67819 - DNA, 25 bp, Saccharomyces pastorianus
tagcgtagcccttcatatctacatg

SEQ ID NO: 67820 - DNA, 25 bp, Saccharomyces pastorianus
ggatcctctttaaccaaatcacaaa

SEQ ID NO: 67821 - DNA, 25 bp, Saccharomyces pastorianus
gccagttatcagttcttaatttagg

SEQ ID NO: 67822 - DNA, 25 bp, Saccharomyces pastorianus
ggatctgtcgcccttaatacggcat

SEQ ID NO: 67823 - DNA, 25 bp, Saccharomyces pastorianus
accacaattttctgcgagtgaaacg

SEQ ID NO: 67824 - DNA, 25 bp, Saccharomyces pastorianus
tgcccattatcttcaggatcctctt

SEQ ID NO: 67825 - DNA, 25 bp, Saccharomyces pastorianus
gagcgtccttaaaattacgttggca

SEQ ID NO: 67826 - DNA, 25 bp, Saccharomyces pastorianus
ttctctataagatccatgacctcct

SEQ ID NO: 67827 - DNA, 25 bp, Saccharomyces pastorianus
acatctagaatatactgccagttat

SEQ ID NO: 67828 - DNA, 25 bp, Saccharomyces pastorianus
ttacgttggcatcctgttgttccag

SEQ ID NO: 67829 - DNA, 25 bp, Saccharomyces pastorianus
atacggcatttctcatttctgtcat

SEQ ID NO: 67830 - DNA, 25 bp, Saccharomyces pastorianus
gaaacgatcaaagagagcgtcctta

SEQ ID NO: 67831 - DNA, 25 bp, Saccharomyces pastorianus
ggactgacctacttccataagtttt

SEQ ID NO: 67832 - DNA, 25 bp, Saccharomyces pastorianus
agatttttgtttcccataaaggcat

SEQ ID NO: 67833 - DNA, 25 bp, Saccharomyces pastorianus
gcatgggcactgattgcactgcttt

SEQ ID NO: 67834 - DNA, 25 bp, Saccharomyces pastorianus
ttgcgttggaagcactacacactgt

SEQ ID NO: 67835 - DNA, 25 bp, Saccharomyces pastorianus
acagattcttccgttcttggactga

SEQ ID NO: 67836 - DNA, 25 bp, Saccharomyces pastorianus
cactgctttttgctgaatacccgaa

SEQ ID NO: 67837 - DNA, 25 bp, Saccharomyces pastorianus
attcctgtgcaatcgaatacccaag

SEQ ID NO: 67838 - DNA, 25 bp, Saccharomyces pastorianus
ggtatttgcttcacctatgcaggta

SEQ ID NO: 67839 - DNA, 25 bp, Saccharomyces pastorianus
gaagactctctagtcgtccaaacag

SEQ ID NO: 67840 - DNA, 25 bp, Saccharomyces pastorianus
aaggttgtgatttcctggtgagcaa

SEQ ID NO: 67841 - DNA, 25 bp, Saccharomyces pastorianus
atacccatacgtggagtgcacagat

SEQ ID NO: 67842 - DNA, 25 bp, Saccharomyces pastorianus
caacggtgtgcaaacttgggactgt

SEQ ID NO: 67843 - DNA, 25 bp, Saccharomyces pastorianus
gcattgtttcatggcccacagggca

SEQ ID NO: 67844 - DNA, 25 bp, Saccharomyces pastorianus
ttatacggtttctgactgtactgca

SEQ ID NO: 67845 - DNA, 25 bp, Saccharomyces pastorianus
tttgtgcccttgttaccttaattga

SEQ ID NO: 67846 - DNA, 25 bp, Saccharomyces pastorianus
aattcttgtgtcgttctcagtttga

SEQ ID NO: 67847 - DNA, 25 bp, Saccharomyces pastorianus
ttttttactgctggtctggcagaaa

SEQ ID NO: 67848 - DNA, 25 bp, Saccharomyces pastorianus
gatggtgtagattcaaaagccttca

SEQ ID NO: 67849 - DNA, 25 bp, Saccharomyces pastorianus
gtttgacactgaatgcgttcctggt

SEQ ID NO: 67850 - DNA, 25 bp, Saccharomyces pastorianus
gcgttcctggtagttttagagacaa

SEQ ID NO: 67851 - DNA, 25 bp, Saccharomyces pastorianus
ttgggactgtgcatttgccattcaa

SEQ ID NO: 67852 - DNA, 25 bp, Saccharomyces pastorianus
tagcacctgttaatcaagcattttg

SEQ ID NO: 67853 - DNA, 25 bp, Saccharomyces pastorianus
taccttcacgtatattttggacttt

SEQ ID NO: 67854 - DNA, 25 bp, Saccharomyces pastorianus
gcttcttggtttcaagcctttcaaa

SEQ ID NO: 67855 - DNA, 25 bp, Saccharomyces pastorianus
agcccaaaccgcaagaccagtgaag

SEQ ID NO: 67856 - DNA, 25 bp, Saccharomyces pastorianus
gagaagaatgttaacccggtcactg

SEQ ID NO: 67857 - DNA, 25 bp, Saccharomyces pastorianus
gctattatgtgcttttggcttcttg

SEQ ID NO: 67858 - DNA, 25 bp, Saccharomyces pastorianus
tgccaagttttggaaccctatatag

SEQ ID NO: 67859 - DNA, 25 bp, Saccharomyces pastorianus
gatagacacacgttacagcagttgg

SEQ ID NO: 67860 - DNA, 25 bp, Saccharomyces pastorianus
ataggcccgtccacaataagattga

SEQ ID NO: 67861 - DNA, 25 bp, Saccharomyces pastorianus
ttacctcaagagcatgcgacgctgg

SEQ ID NO: 67862 - DNA, 25 bp, Saccharomyces pastorianus
aactgaccttgattgccggtatagc

SEQ ID NO: 67863 - DNA, 25 bp, Saccharomyces pastorianus
aaaatttccaaatcatcaagccggg

SEQ ID NO: 67864 - DNA, 25 bp, Saccharomyces pastorianus
gaaccatctggcgaagacggcaatc

SEQ ID NO: 67865 - DNA, 25 bp, Saccharomyces pastorianus
aagcttttcatcaacgccttatagt

SEQ ID NO: 67866 - DNA, 25 bp, Saccharomyces pastorianus
gaatatcctcggttgggtgagcact

SEQ ID NO: 67867 - DNA, 25 bp, Saccharomyces pastorianus
gtgaacccagagtgatgtccaagaa

SEQ ID NO: 67868 - DNA, 25 bp, Saccharomyces pastorianus
gaggtcattttctccaggtaacatt

SEQ ID NO: 67869 - DNA, 25 bp, Saccharomyces pastorianus
gagtattgccttccacagctttaaa

SEQ ID NO: 67870 - DNA, 25 bp, Saccharomyces pastorianus
agggacatcctttcgcagggcaaaa

SEQ ID NO: 67871 - DNA, 25 bp, Saccharomyces pastorianus
ttcgaatggtcatacctcttcaggt

SEQ ID NO: 67872 - DNA, 25 bp, Saccharomyces pastorianus
aagattctggtgtgaaccccgatga

SEQ ID NO: 67873 - DNA, 25 bp, Saccharomyces pastorianus
atagcactgatatcgcaaacaccat

SEQ ID NO: 67874 - DNA, 25 bp, Saccharomyces pastorianus
gcggatcatagttgtgccttgtcga

SEQ ID NO: 67875 - DNA, 25 bp, Saccharomyces pastorianus
tggagctcgtggtggtagttcattc

SEQ ID NO: 67876 - DNA, 25 bp, Saccharomyces pastorianus
tagctcattcagaggcggttcccgt

SEQ ID NO: 67877 - DNA, 25 bp, Saccharomyces pastorianus
gggtgatattgtttgtcgttccatc

SEQ ID NO: 67878 - DNA, 25 bp, Saccharomyces pastorianus
gtgtccaggctaccagcttcaaaga

SEQ ID NO: 67879 - DNA, 25 bp, Saccharomyces pastorianus
gggtgctttcgtacatccatgtgag

SEQ ID NO: 67880 - DNA, 25 bp, Saccharomyces pastorianus
gacaaattctacattgctgctgata

SEQ ID NO: 67881 - DNA, 25 bp, Saccharomyces pastorianus
agttcattcagaggcggatctcgcg

SEQ ID NO: 67882 - DNA, 25 bp, Saccharomyces pastorianus
gaaagattcttaccaaagccaaagg

SEQ ID NO: 67883 - DNA, 25 bp, Saccharomyces pastorianus
aagccaaaggtagcaggcccaccaa

SEQ ID NO: 67884 - DNA, 25 bp, Saccharomyces pastorianus
ggatctcgcggtggtagctcattca

SEQ ID NO: 67885 - DNA, 25 bp, Saccharomyces pastorianus
gttccatcaacaccaaggttccata

SEQ ID NO: 67886 - DNA, 25 bp, Saccharomyces pastorianus
gttggcgtattgcatctaaacaaat

SEQ ID NO: 67887 - DNA, 25 bp, Saccharomyces pastorianus
cttcccgaggaagttggcgtattgc

SEQ ID NO: 67888 - DNA, 25 bp, Saccharomyces pastorianus
accggagatgccttcccgaggaagt

SEQ ID NO: 67889 - DNA, 25 bp, Saccharomyces pastorianus
ggaagttggcgtattgcatctaaac

SEQ ID NO: 67890 - DNA, 25 bp, Saccharomyces pastorianus
gaagaagtagttcccttcgaaacat

SEQ ID NO: 67891 - DNA, 25 bp, Saccharomyces pastorianus
gtagttcccttcgaaacatttattg

SEQ ID NO: 67892 - DNA, 25 bp, Saccharomyces pastorianus
tttattgcaccggagatgccttccc

SEQ ID NO: 67893 - DNA, 25 bp, Saccharomyces pastorianus
gcatctaaacaaatagagctgctgt

SEQ ID NO: 67894 - DNA, 25 bp, Saccharomyces pastorianus
tgctcgaggagatcatgcttgggaa

SEQ ID NO: 67895 - DNA, 25 bp, Saccharomyces pastorianus
tcgaaacatttattgcaccggagat

SEQ ID NO: 67896 - DNA, 25 bp, Saccharomyces pastorianus
agagctgctgttgttgctcgatgta

SEQ ID NO: 67897 - DNA, 25 bp, Saccharomyces pastorianus
gaaaaaagtccaggtccgccagagc

SEQ ID NO: 67898 - DNA, 25 bp, Saccharomyces pastorianus
gggacaattacaccaatgacacgag

SEQ ID NO: 67899 - DNA, 25 bp, Saccharomyces pastorianus
gacagctgacgatgaccgtgaacat

SEQ ID NO: 67900 - DNA, 25 bp, Saccharomyces pastorianus
gctatggagctttgtcagcgacgtc

SEQ ID NO: 67901 - DNA, 25 bp, Saccharomyces pastorianus
gcacccaggaagtagctcagcagat

SEQ ID NO: 67902 - DNA, 25 bp, Saccharomyces pastorianus
tcagcgacgtcaaggcaggtttgtt

SEQ ID NO: 67903 - DNA, 25 bp, Saccharomyces pastorianus
cgattccacagtacgacatcacatt

SEQ ID NO: 67904 - DNA, 25 bp, Saccharomyces pastorianus
aagaagcttcctcacaaggctctgt

SEQ ID NO: 67905 - DNA, 25 bp, Saccharomyces pastorianus
agatctttctaaacagtctctctgg

SEQ ID NO: 67906 - DNA, 25 bp, Saccharomyces pastorianus
taaaccattggctttattcaaccag

SEQ ID NO: 67907 - DNA, 25 bp, Saccharomyces pastorianus
aaggctctgtctccagatcgctatg

SEQ ID NO: 67908 - DNA, 25 bp, Saccharomyces pastorianus
gaaagatcgaggtcacccttcaaaa

SEQ ID NO: 67909 - DNA, 25 bp, Saccharomyces pastorianus
taacataccctctgatactgaacat

SEQ ID NO: 67910 - DNA, 25 bp, Saccharomyces pastorianus
caaagcgtcgtcatcttgatttttt

SEQ ID NO: 67911 - DNA, 25 bp, Saccharomyces pastorianus
tacgccgctggctaatagcagtaat

SEQ ID NO: 67912 - DNA, 25 bp, Saccharomyces pastorianus
gattttggttatccatctctcgaga

SEQ ID NO: 67913 - DNA, 25 bp, Saccharomyces pastorianus
acgggtacgttaatcagcggccatt

SEQ ID NO: 67914 - DNA, 25 bp, Saccharomyces pastorianus
aagtcggtttttcacgttgcataca

SEQ ID NO: 67915 - DNA, 25 bp, Saccharomyces pastorianus
gaatcatggctctgacaagaacttg

SEQ ID NO: 67916 - DNA, 25 bp, Saccharomyces pastorianus
aagatccaattctaatacgccgctg

SEQ ID NO: 67917 - DNA, 25 bp, Saccharomyces pastorianus
gagattttactatgacttgaccaag

SEQ ID NO: 67918 - DNA, 25 bp, Saccharomyces pastorianus
agcggccattacacgtcattggtga

SEQ ID NO: 67919 - DNA, 25 bp, Saccharomyces pastorianus
gaatatagcctgaacgtggcccaag

SEQ ID NO: 67920 - DNA, 25 bp, Saccharomyces pastorianus
ttgttcccttcaaagacatccactg

SEQ ID NO: 67921 - DNA, 25 bp, Saccharomyces pastorianus
aagtagggttatgctacctgccctc

SEQ ID NO: 67922 - DNA, 25 bp, Saccharomyces pastorianus
agtagtggattctgtgcctatggct

SEQ ID NO: 67923 - DNA, 25 bp, Saccharomyces pastorianus
ggccttttccactacacttattgtt

SEQ ID NO: 67924 - DNA, 25 bp, Saccharomyces pastorianus
tgccctctggagtttgtactctaat

SEQ ID NO: 67925 - DNA, 25 bp, Saccharomyces pastorianus
ggtttgcatcgctcttttctaattg

SEQ ID NO: 67926 - DNA, 25 bp, Saccharomyces pastorianus
ttagcagccgtcttgtgcatgagtg

SEQ ID NO: 67927 - DNA, 25 bp, Saccharomyces pastorianus
agattacaacctgcgtttgtcacct

SEQ ID NO: 67928 - DNA, 25 bp, Saccharomyces pastorianus
taatcagtattgtcaccgccggtag

SEQ ID NO: 67929 - DNA, 25 bp, Saccharomyces pastorianus
tccgctgttttcatcgctgcattga

SEQ ID NO: 67930 - DNA, 25 bp, Saccharomyces pastorianus
catccaacctcttgttttttacaga

SEQ ID NO: 67931 - DNA, 25 bp, Saccharomyces pastorianus
gtagtttctttactttcatccttca

SEQ ID NO: 67932 - DNA, 25 bp, Saccharomyces pastorianus
tatttcctgcaataatccaccacgt

SEQ ID NO: 67933 - DNA, 25 bp, Saccharomyces pastorianus
acttcatctcgcaaagactttattt

SEQ ID NO: 67934 - DNA, 25 bp, Saccharomyces pastorianus
atccaccacgtgtgaaagattcctt

SEQ ID NO: 67935 - DNA, 25 bp, Saccharomyces pastorianus
actttcatccttcaattgcaaccta

SEQ ID NO: 67936 - DNA, 25 bp, Saccharomyces pastorianus
ggattttcatccaacctcttgtttt

SEQ ID NO: 67937 - DNA, 25 bp, Saccharomyces pastorianus
gcgagcttcgccactaatggatttt

SEQ ID NO: 67938 - DNA, 25 bp, Saccharomyces pastorianus
gaaagattccttagcgagcttcgcc

SEQ ID NO: 67939 - DNA, 25 bp, Saccharomyces pastorianus
gatgactccaatgatgtagtttctt

SEQ ID NO: 67940 - DNA, 25 bp, Saccharomyces pastorianus
aattgcaacctacttacttcatctc

SEQ ID NO: 67941 - DNA, 25 bp, Saccharomyces pastorianus
acaagagctttgtctctggctacaa

SEQ ID NO: 67942 - DNA, 25 bp, Saccharomyces pastorianus
agcaagctccgccaatattgacata

SEQ ID NO: 67943 - DNA, 25 bp, Saccharomyces pastorianus
ggttgcaaaccaatcaagctttcaa

SEQ ID NO: 67944 - DNA, 25 bp, Saccharomyces pastorianus
catagctacctattgttggaacatc

SEQ ID NO: 67945 - DNA, 25 bp, Saccharomyces pastorianus
ggaacatcggtgtcaactgtataat

SEQ ID NO: 67946 - DNA, 25 bp, Saccharomyces pastorianus
gatccagatggcattcttcagacag

SEQ ID NO: 67947 - DNA, 25 bp, Saccharomyces pastorianus
gtgatagccacgtagatgcattatt

SEQ ID NO: 67948 - DNA, 25 bp, Saccharomyces pastorianus
aaggaattgcttggtgtaaacactc

SEQ ID NO: 67949 - DNA, 25 bp, Saccharomyces pastorianus
gtaattgaaactgtcctaggtagga

SEQ ID NO: 67950 - DNA, 25 bp, Saccharomyces pastorianus
atgcattattggttgatatctcgtc

SEQ ID NO: 67951 - DNA, 25 bp, Saccharomyces pastorianus
aacagagttttaccgtgatagccac

SEQ ID NO: 67952 - DNA, 25 bp, Saccharomyces pastorianus
gagagtcacaaggttttgcgtattt

SEQ ID NO: 67953 - DNA, 25 bp, Saccharomyces pastorianus
ccgcatctttcctggcataatgaat

SEQ ID NO: 67954 - DNA, 25 bp, Saccharomyces pastorianus
aagtaccatgaagccgtacgacaag

SEQ ID NO: 67955 - DNA, 25 bp, Saccharomyces pastorianus
cgattctggcagtcgacaatttgaa

SEQ ID NO: 67956 - DNA, 25 bp, Saccharomyces pastorianus
agatcatactttctataggcctaaa

SEQ ID NO: 67957 - DNA, 25 bp, Saccharomyces pastorianus
tccgaatatggagtacctgtcgata

SEQ ID NO: 67958 - DNA, 25 bp, Saccharomyces pastorianus
agatcaacgatcaacgattctggca

SEQ ID NO: 67959 - DNA, 25 bp, Saccharomyces pastorianus
agtacctgtcgatataacactcagt

SEQ ID NO: 67960 - DNA, 25 bp, Saccharomyces pastorianus
gggtatacgactcaaggtcgcagat

SEQ ID NO: 67961 - DNA, 25 bp, Saccharomyces pastorianus
gatatcttaacagtattttccgaat

SEQ ID NO: 67962 - DNA, 25 bp, Saccharomyces pastorianus
ggtagggcccttaagatagatcata

SEQ ID NO: 67963 - DNA, 25 bp, Saccharomyces pastorianus
gctgttccaaccaccattgttacta

SEQ ID NO: 67964 - DNA, 25 bp, Saccharomyces pastorianus
aagtgcaacatctcaagccgtcgct

SEQ ID NO: 67965 - DNA, 25 bp, Saccharomyces pastorianus
tggtgtgtctccagtcgttacatca

SEQ ID NO: 67966 - DNA, 25 bp, Saccharomyces pastorianus
ccatctgtagctaccggttcaaacg

SEQ ID NO: 67967 - DNA, 25 bp, Saccharomyces pastorianus
gaaagcgaaaacactgcttccccat

SEQ ID NO: 67968 - DNA, 25 bp, Saccharomyces pastorianus
actctgttccttctgtttcaagtac

SEQ ID NO: 67969 - DNA, 25 bp, Saccharomyces pastorianus
ggttacatcaccaagtcagttccaa

SEQ ID NO: 67970 - DNA, 25 bp, Saccharomyces pastorianus
cgccggtacaaacgctgctggtgaa

SEQ ID NO: 67971 - DNA, 25 bp, Saccharomyces pastorianus
gaaattacatctacatgctctgcta

SEQ ID NO: 67972 - DNA, 25 bp, Saccharomyces pastorianus
agaactacgaaactgtcgccactgc

SEQ ID NO: 67973 - DNA, 25 bp, Saccharomyces pastorianus
gtacgtatcaaggtgctgcaagcat

SEQ ID NO: 67974 - DNA, 25 bp, Saccharomyces pastorianus
taagcacccgcattctaactttgta

SEQ ID NO: 67975 - DNA, 25 bp, Saccharomyces pastorianus
gacggatgggcaaccttcttggaaa

SEQ ID NO: 67976 - DNA, 25 bp, Saccharomyces pastorianus
ggccggcatacaacagttcctgaaa

SEQ ID NO: 67977 - DNA, 25 bp, Saccharomyces pastorianus
gagtcacactgcaaacttgtgccag

SEQ ID NO: 67978 - DNA, 25 bp, Saccharomyces pastorianus
actacaaacgcgcttggtccaagat

SEQ ID NO: 67979 - DNA, 25 bp, Saccharomyces pastorianus
ggtccctacgtgttccaagatgaag

SEQ ID NO: 67980 - DNA, 25 bp, Saccharomyces pastorianus
taacgtgactttgtgtctaccagaa

SEQ ID NO: 67981 - DNA, 25 bp, Saccharomyces pastorianus
gaccacactcggattgaatacgcca

SEQ ID NO: 67982 - DNA, 25 bp, Saccharomyces pastorianus
gaaacttcacaacatcgcatggccg

SEQ ID NO: 67983 - DNA, 25 bp, Saccharomyces pastorianus
gatgaacaccctagacatgttgtct

SEQ ID NO: 67984 - DNA, 25 bp, Saccharomyces pastorianus
aggctggcccgtttggtactttcat

SEQ ID NO: 67985 - DNA, 25 bp, Saccharomyces pastorianus
attcacctgaggcttggaacccttg

SEQ ID NO: 67986 - DNA, 25 bp, Saccharomyces pastorianus
acctgaggcttggaacccttggcgg

SEQ ID NO: 67987 - DNA, 25 bp, Saccharomyces pastorianus
cacctgaggcttggaacccttggcg

SEQ ID NO: 67988 - DNA, 25 bp, Saccharomyces pastorianus
ggcttggaacccttggcggtggtgg

SEQ ID NO: 67989 - DNA, 25 bp, Saccharomyces pastorianus
tgaggcttggaacccttggcggtgg

SEQ ID NO: 67990 - DNA, 25 bp, Saccharomyces pastorianus
gtggtgatctccacggtgccgtcgt

SEQ ID NO: 67991 - DNA, 25 bp, Saccharomyces pastorianus
cctgaggcttggaacccttggcggt

SEQ ID NO: 67992 - DNA, 25 bp, Saccharomyces pastorianus
tggtgatctccacggtgccgtcgtc

SEQ ID NO: 67993 - DNA, 25 bp, Saccharomyces pastorianus
tgattcacctgaggcttggaaccct

SEQ ID NO: 67994 - DNA, 25 bp, Saccharomyces pastorianus
atgattcacctgaggcttggaaccc

SEQ ID NO: 67995 - DNA, 25 bp, Saccharomyces pastorianus
tcacctgaggcttggaacccttggc

SEQ ID NO: 67996 - DNA, 25 bp, Saccharomyces pastorianus
ccaaagatgcatagttcaactgatt

SEQ ID NO: 67997 - DNA, 25 bp, Saccharomyces pastorianus
ctgattgaacatactatcgaaatga

SEQ ID NO: 67998 - DNA, 25 bp, Saccharomyces pastorianus
aagatgcatagttcaactgattgaa

SEQ ID NO: 67999 - DNA, 25 bp, Saccharomyces pastorianus
gatgcatagttcaactgattgaaca

SEQ ID NO: 68000 - DNA, 25 bp, Saccharomyces pastorianus
ttgaacatactatcgaaatgaagat

SEQ ID NO: 68001 - DNA, 25 bp, Saccharomyces pastorianus
aactgattgaacatactatcgaaat

SEQ ID NO: 68002 - DNA, 25 bp, Saccharomyces pastorianus
aaagatgcatagttcaactgattga

SEQ ID NO: 68003 - DNA, 25 bp, Saccharomyces pastorianus
aaccaaagatgcatagttcaactga

SEQ ID NO: 68004 - DNA, 25 bp, Saccharomyces pastorianus
tcaactgattgaacatactatcgaa

SEQ ID NO: 68005 - DNA, 25 bp, Saccharomyces pastorianus
accaaagatgcatagttcaactgat

SEQ ID NO: 68006 - DNA, 25 bp, Saccharomyces pastorianus
gattgaacatactatcgaaatgaag

SEQ ID NO: 68007 - DNA, 25 bp, Saccharomyces pastorianus
gacttgcacaagacctttatcgatt

SEQ ID NO: 68008 - DNA, 25 bp, Saccharomyces pastorianus
aaatcaaggctattccgagcgggaa

SEQ ID NO: 68009 - DNA, 25 bp, Saccharomyces pastorianus
ttttgacacgttgaggatccccatc

SEQ ID NO: 68010 - DNA, 25 bp, Saccharomyces pastorianus
ggatttgttcgttatggacgctcaa

SEQ ID NO: 68011 - DNA, 25 bp, Saccharomyces pastorianus
aaactgggaattcctcctgactgtg

SEQ ID NO: 68012 - DNA, 25 bp, Saccharomyces pastorianus
caaactttggactacttgcgtgctc

SEQ ID NO: 68013 - DNA, 25 bp, Saccharomyces pastorianus
ggaccctgtgaccatgaaacctata

SEQ ID NO: 68014 - DNA, 25 bp, Saccharomyces pastorianus
ttatccgaacacatgcgccgtgata

SEQ ID NO: 68015 - DNA, 25 bp, Saccharomyces pastorianus
gacgcaggtgctataatccatacgc

SEQ ID NO: 68016 - DNA, 25 bp, Saccharomyces pastorianus
aaatgctgtggtgtgctctttgatc

SEQ ID NO: 68017 - DNA, 25 bp, Saccharomyces pastorianus
cactccactgtttgtagcatgctat

SEQ ID NO: 68018 - DNA, 25 bp, Saccharomyces pastorianus
acctttctgagggttctgaacgtat

SEQ ID NO: 68019 - DNA, 25 bp, Saccharomyces pastorianus
gtgctggcgccatcggtagtaaatg

SEQ ID NO: 68020 - DNA, 25 bp, Saccharomyces pastorianus
ttgcaagcattagagcgccttttat

SEQ ID NO: 68021 - DNA, 25 bp, Saccharomyces pastorianus
ctttgatagaaaccggactcctgcc

SEQ ID NO: 68022 - DNA, 25 bp, Saccharomyces pastorianus
gctattcaaggcttggcccatcaat

SEQ ID NO: 68023 - DNA, 25 bp, Saccharomyces pastorianus
taccgttccgttgttgatatttcca

SEQ ID NO: 68024 - DNA, 25 bp, Saccharomyces pastorianus
gttgatatttccagccgatctatta

SEQ ID NO: 68025 - DNA, 25 bp, Saccharomyces pastorianus
agcgccttttattatctccgacgaa

SEQ ID NO: 68026 - DNA, 25 bp, Saccharomyces pastorianus
actcctgccgatttttgaattggat

SEQ ID NO: 68027 - DNA, 25 bp, Saccharomyces pastorianus
caatgcctcaatccttgcaacgaat

SEQ ID NO: 68028 - DNA, 25 bp, Saccharomyces pastorianus
gatgaaatgtcgtgtgctggcgcca

SEQ ID NO: 68029 - DNA, 25 bp, Saccharomyces pastorianus
ccgggctgcagggaattctaccaat

SEQ ID NO: 68030 - DNA, 25 bp, Saccharomyces pastorianus
tgttcatcaagtggacggtggattg

SEQ ID NO: 68031 - DNA, 25 bp, Saccharomyces pastorianus
tttacagatggaacagcttagacaa

SEQ ID NO: 68032 - DNA, 25 bp, Saccharomyces pastorianus
caagacagtaacaaccctattggtt

SEQ ID NO: 68033 - DNA, 25 bp, Saccharomyces pastorianus
aagcgaaattctggccgggctgcag

SEQ ID NO: 68034 - DNA, 25 bp, Saccharomyces pastorianus
caggtgtttgatattcttttctcat

SEQ ID NO: 68035 - DNA, 25 bp, Saccharomyces pastorianus
ggtcgtggacagtttacaagacagt

SEQ ID NO: 68036 - DNA, 25 bp, Saccharomyces pastorianus
tacctaggttctttggtcgtggaca

SEQ ID NO: 68037 - DNA, 25 bp, Saccharomyces pastorianus
gacttcgggacagccttatacggaa

SEQ ID NO: 68038 - DNA, 25 bp, Saccharomyces pastorianus
cagccttatacggaaacttacctag

SEQ ID NO: 68039 - DNA, 25 bp, Saccharomyces pastorianus
ttttctcattgacttcgggacagcc

SEQ ID NO: 68040 - DNA, 25 bp, Saccharomyces pastorianus
gatcaaaacgttcccgaaggtcgct

SEQ ID NO: 68041 - DNA, 25 bp, Saccharomyces pastorianus
ataagtccaggacgttggccttcgt

SEQ ID NO: 68042 - DNA, 25 bp, Saccharomyces pastorianus
gacgtgttgaagctgttgaccattt

SEQ ID NO: 68043 - DNA, 25 bp, Saccharomyces pastorianus
acgttttgctgcctcagatgtctaa

SEQ ID NO: 68044 - DNA, 25 bp, Saccharomyces pastorianus
aaaattccaactccaatgcgcttaa

SEQ ID NO: 68045 - DNA, 25 bp, Saccharomyces pastorianus
atcttgtctttgaatgctctctcca

SEQ ID NO: 68046 - DNA, 25 bp, Saccharomyces pastorianus
gtactacccgcgagaacagaatatt

SEQ ID NO: 68047 - DNA, 25 bp, Saccharomyces pastorianus
gagtttctcctgagctgcacgtttt

SEQ ID NO: 68048 - DNA, 25 bp, Saccharomyces pastorianus
gttgacgatgactttgcccaggaga

SEQ ID NO: 68049 - DNA, 25 bp, Saccharomyces pastorianus
tcagcgtgtgtgagaccatcttgtc

SEQ ID NO: 68050 - DNA, 25 bp, Saccharomyces pastorianus
tgcatacgtggtcgagctgaactca

SEQ ID NO: 68051 - DNA, 25 bp, Saccharomyces pastorianus
gcagcctccggaatgcttgacgagt

SEQ ID NO: 68052 - DNA, 25 bp, Saccharomyces pastorianus
tgaaagcggtgttcccttcctggga

SEQ ID NO: 68053 - DNA, 25 bp, Saccharomyces pastorianus
ggcaaggacgaaaccggccagcgtt

SEQ ID NO: 68054 - DNA, 25 bp, Saccharomyces pastorianus
ggacgagtcgctattaaaacctgag

SEQ ID NO: 68055 - DNA, 25 bp, Saccharomyces pastorianus
gagttttcccgtcatgtgatgggcc

SEQ ID NO: 68056 - DNA, 25 bp, Saccharomyces pastorianus
agtgttggagccatcgaggccgttc

SEQ ID NO: 68057 - DNA, 25 bp, Saccharomyces pastorianus
cacgtggccttgtttttgtgggcaa

SEQ ID NO: 68058 - DNA, 25 bp, Saccharomyces pastorianus
agaaggtatggtccttgccgccaaa

SEQ ID NO: 68059 - DNA, 25 bp, Saccharomyces pastorianus
attaatcctgcgttggtggacgaga

SEQ ID NO: 68060 - DNA, 25 bp, Saccharomyces pastorianus
tattcgagttgaaaggccaccctta

SEQ ID NO: 68061 - DNA, 25 bp, Saccharomyces pastorianus
gaagtacacgagagacaccgccatc

SEQ ID NO: 68062 - DNA, 25 bp, Saccharomyces pastorianus
agaatgcaggtcaacaagtacgtgt

SEQ ID NO: 68063 - DNA, 25 bp, Saccharomyces pastorianus
aacgatatcgtgtgcaatttctggg

SEQ ID NO: 68064 - DNA, 25 bp, Saccharomyces pastorianus
gatcgtgtgttcactgggcgcgagt

SEQ ID NO: 68065 - DNA, 25 bp, Saccharomyces pastorianus
acagcgtggcagtgcgcagaatgca

SEQ ID NO: 68066 - DNA, 25 bp, Saccharomyces pastorianus
cagagcgtggtgtcgcgtggacaga

SEQ ID NO: 68067 - DNA, 25 bp, Saccharomyces pastorianus
cgagtgtgatgagtgagtttgccca

SEQ ID NO: 68068 - DNA, 25 bp, Saccharomyces pastorianus
gagtcgtggctgtttttgaagatgt

SEQ ID NO: 68069 - DNA, 25 bp, Saccharomyces pastorianus
tgatgagtgagtttgcccagagcgt

SEQ ID NO: 68070 - DNA, 25 bp, Saccharomyces pastorianus
ggcagtgcgcagaatgcaggtcaac

SEQ ID NO: 68071 - DNA, 25 bp, Saccharomyces pastorianus
ttgaagatgtttgcgcaggacagcg

SEQ ID NO: 68072 - DNA, 25 bp, Saccharomyces pastorianus
acagagggtgtttgacgtgaacgat

SEQ ID NO: 68073 - DNA, 25 bp, Saccharomyces pastorianus
actttcaatgcatccaaactctctg

SEQ ID NO: 68074 - DNA, 25 bp, Saccharomyces pastorianus
aaactacacgagcttttcaattgca

SEQ ID NO: 68075 - DNA, 25 bp, Saccharomyces pastorianus
gaggtaccatggttcaaatcggcat

SEQ ID NO: 68076 - DNA, 25 bp, Saccharomyces pastorianus
gtttggtgccagtgacgtcgtcttt

SEQ ID NO: 68077 - DNA, 25 bp, Saccharomyces pastorianus
gagcttgtgttgagcctttatcggt

SEQ ID NO: 68078 - DNA, 25 bp, Saccharomyces pastorianus
attgtctttgagtgttccggagcag

SEQ ID NO: 68079 - DNA, 25 bp, Saccharomyces pastorianus
gagcaggccttgttgggttattaac

SEQ ID NO: 68080 - DNA, 25 bp, Saccharomyces pastorianus
aagctggctggagtccactttggaa

SEQ ID NO: 68081 - DNA, 25 bp, Saccharomyces pastorianus
attttggcgccactcatactttcaa

SEQ ID NO: 68082 - DNA, 25 bp, Saccharomyces pastorianus
gtttggtgattaccgcgacgcagta

SEQ ID NO: 68083 - DNA, 25 bp, Saccharomyces pastorianus
agatgcttgcattgacgctggtctc

SEQ ID NO: 68084 - DNA, 25 bp, Saccharomyces pastorianus
gatgcactacatttcaactgttatt

SEQ ID NO: 68085 - DNA, 25 bp, Saccharomyces pastorianus
tcaaagaagtctatgtggcttttgc

SEQ ID NO: 68086 - DNA, 25 bp, Saccharomyces pastorianus
actgattgcaaatggttctttgatc

SEQ ID NO: 68087 - DNA, 25 bp, Saccharomyces pastorianus
aacttctctagttctctatcttcaa

SEQ ID NO: 68088 - DNA, 25 bp, Saccharomyces pastorianus
gtggcttttgccattgaatgctgaa

SEQ ID NO: 68089 - DNA, 25 bp, Saccharomyces pastorianus
tctagttctctatcttcaaagaagt

SEQ ID NO: 68090 - DNA, 25 bp, Saccharomyces pastorianus
aaaaatgtaagagttgcaccaatga

SEQ ID NO: 68091 - DNA, 25 bp, Saccharomyces pastorianus
aagttggcgctaatggatgggacca

SEQ ID NO: 68092 - DNA, 25 bp, Saccharomyces pastorianus
ttttttgacggaactgattgcaaat

SEQ ID NO: 68093 - DNA, 25 bp, Saccharomyces pastorianus
ggaacacaagatgcactacatttca

SEQ ID NO: 68094 - DNA, 25 bp, Saccharomyces pastorianus
atttcaactgttattagcgagcaag

SEQ ID NO: 68095 - DNA, 25 bp, Saccharomyces pastorianus
gatgcactacatttcaactgttatt

SEQ ID NO: 68096 - DNA, 25 bp, Saccharomyces pastorianus
tcaaagaagtctatgtggcttttgc

SEQ ID NO: 68097 - DNA, 25 bp, Saccharomyces pastorianus
actgattgcaaatggttctttgatc

SEQ ID NO: 68098 - DNA, 25 bp, Saccharomyces pastorianus
aacttctctagttctctatcttcaa

SEQ ID NO: 68099 - DNA, 25 bp, Saccharomyces pastorianus
gtggcttttgccattgaatgctgaa

SEQ ID NO: 68100 - DNA, 25 bp, Saccharomyces pastorianus
tctagttctctatcttcaaagaagt

SEQ ID NO: 68101 - DNA, 25 bp, Saccharomyces pastorianus
aaaaatgtaagagttgcaccaatga

SEQ ID NO: 68102 - DNA, 25 bp, Saccharomyces pastorianus
aagttggcgctaatggatgggacca

SEQ ID NO: 68103 - DNA, 25 bp, Saccharomyces pastorianus
ttttttgacggaactgattgcaaat

SEQ ID NO: 68104 - DNA, 25 bp, Saccharomyces pastorianus
ggaacacaagatgcactacatttca

SEQ ID NO: 68105 - DNA, 25 bp, Saccharomyces pastorianus
atttcaactgttattagcgagcaag

SEQ ID NO: 68106 - DNA, 25 bp, Saccharomyces pastorianus
tttgtctattccgaagcagaaccga

SEQ ID NO: 68107 - DNA, 25 bp, Saccharomyces pastorianus
gaaagtaccctgaacattatgaaga

SEQ ID NO: 68108 - DNA, 25 bp, Saccharomyces pastorianus
aggtgaacactatggaatcagctcc

SEQ ID NO: 68109 - DNA, 25 bp, Saccharomyces pastorianus
tatggcacacggtccttgcggtgaa

SEQ ID NO: 68110 - DNA, 25 bp, Saccharomyces pastorianus
aggaagttcaacacgagggcgctta

SEQ ID NO: 68111 - DNA, 25 bp, Saccharomyces pastorianus
gcccttgtttgggaggtatggcaca

SEQ ID NO: 68112 - DNA, 25 bp, Saccharomyces pastorianus
aatcagccttttcatgctttgtcta

SEQ ID NO: 68113 - DNA, 25 bp, Saccharomyces pastorianus
gatcaattgggattgcccttgtttg

SEQ ID NO: 68114 - DNA, 25 bp, Saccharomyces pastorianus
atgggtgctaccgaagaggaagttc

SEQ ID NO: 68115 - DNA, 25 bp, Saccharomyces pastorianus
acgagggcgcttacaacccagatac

SEQ ID NO: 68116 - DNA, 25 bp, Saccharomyces pastorianus
gaatcagctcctaatgtctcaagtg

SEQ ID NO: 68117 - DNA, 25 bp, Saccharomyces pastorianus
aacaaggcgtttgatggcctcgtcc

SEQ ID NO: 68118 - DNA, 25 bp, Saccharomyces pastorianus
atggctggtgctttgtatttcataa

SEQ ID NO: 68119 - DNA, 25 bp, Saccharomyces pastorianus
atgcttcgcaatatagtcgctagaa

SEQ ID NO: 68120 - DNA, 25 bp, Saccharomyces pastorianus
ggaagcctctctttgcttcaaggaa

SEQ ID NO: 68121 - DNA, 25 bp, Saccharomyces pastorianus
tcgtcccctcaatttggtaaaagct

SEQ ID NO: 68122 - DNA, 25 bp, Saccharomyces pastorianus
tttcataacgcccaacaggaagcct

SEQ ID NO: 68123 - DNA, 25 bp, Saccharomyces pastorianus
agacacaggccgtcgattcaggtgg

SEQ ID NO: 68124 - DNA, 25 bp, Saccharomyces pastorianus
aaaccgctgaggaagaaatttcgag

SEQ ID NO: 68125 - DNA, 25 bp, Saccharomyces pastorianus
ctaagcaagagaagacagcaggttt

SEQ ID NO: 68126 - DNA, 25 bp, Saccharomyces pastorianus
gtcgctagaaatgcgtgcagacaca

SEQ ID NO: 68127 - DNA, 25 bp, Saccharomyces pastorianus
gaagagcaatcacctgacaacggaa

SEQ ID NO: 68128 - DNA, 25 bp, Saccharomyces pastorianus
ctctaccatcgttttcaccatatta

SEQ ID NO: 68129 - DNA, 25 bp, Saccharomyces pastorianus
atattaccgcagacgacctatactt

SEQ ID NO: 68130 - DNA, 25 bp, Saccharomyces pastorianus
agctatcactgtcgctgcagataca

SEQ ID NO: 68131 - DNA, 25 bp, Saccharomyces pastorianus
atgatcagcgcgtggtggacaaaca

SEQ ID NO: 68132 - DNA, 25 bp, Saccharomyces pastorianus
tggtcgctacgtatccagagctaca

SEQ ID NO: 68133 - DNA, 25 bp, Saccharomyces pastorianus
ccgtgaagtccgttctggctatgaa

SEQ ID NO: 68134 - DNA, 25 bp, Saccharomyces pastorianus
aagcattatggctcatcaccgtagc

SEQ ID NO: 68135 - DNA, 25 bp, Saccharomyces pastorianus
tattgacaatcatcttcgctttctc

SEQ ID NO: 68136 - DNA, 25 bp, Saccharomyces pastorianus
gttgggagctactataatcgccgtt

SEQ ID NO: 68137 - DNA, 25 bp, Saccharomyces pastorianus
gccctatacgcttgtgttggtttat

SEQ ID NO: 68138 - DNA, 25 bp, Saccharomyces pastorianus
aacgtgggcagctttcgtattagca

SEQ ID NO: 68139 - DNA, 25 bp, Saccharomyces pastorianus
tgaaagcgggccacctgttgccaaa

SEQ ID NO: 68140 - DNA, 25 bp, Saccharomyces pastorianus
ggacacagtgatcataacctcaggt

SEQ ID NO: 68141 - DNA, 25 bp, Saccharomyces pastorianus
gaaccgctacagttgatcgttttaa

SEQ ID NO: 68142 - DNA, 25 bp, Saccharomyces pastorianus
gatgcaccacagagacacgttcaga

SEQ ID NO: 68143 - DNA, 25 bp, Saccharomyces pastorianus
gttcagagtcatatacagcagcagc

SEQ ID NO: 68144 - DNA, 25 bp, Saccharomyces pastorianus
gatcatgttaagacagctctcccac

SEQ ID NO: 68145 - DNA, 25 bp, Saccharomyces pastorianus
ccaccgcctgaatttgactttagca

SEQ ID NO: 68146 - DNA, 25 bp, Saccharomyces pastorianus
aagtgggcgctatcacgattaacag

SEQ ID NO: 68147 - DNA, 25 bp, Saccharomyces pastorianus
aaatgtttctgatttcacctccagc

SEQ ID NO: 68148 - DNA, 25 bp, Saccharomyces pastorianus
ctgcatctcatgcttcggaggtgga

SEQ ID NO: 68149 - DNA, 25 bp, Saccharomyces pastorianus
tctcaacatgttatggctgcatctc

SEQ ID NO: 68150 - DNA, 25 bp, Saccharomyces pastorianus
acctcatgttttctttagttctcca

SEQ ID NO: 68151 - DNA, 25 bp, Saccharomyces pastorianus
aaaagggtcgcccactcaatgactg

SEQ ID NO: 68152 - DNA, 25 bp, Saccharomyces pastorianus
gaagcatcctccgatttacaactta

SEQ ID NO: 68153 - DNA, 25 bp, Saccharomyces pastorianus
atttggcccactgtcgaccgaagaa

SEQ ID NO: 68154 - DNA, 25 bp, Saccharomyces pastorianus
tgccattcaggcgtcatccaaagtg

SEQ ID NO: 68155 - DNA, 25 bp, Saccharomyces pastorianus
ttatggattctggtcacactgtaca

SEQ ID NO: 68156 - DNA, 25 bp, Saccharomyces pastorianus
tctgggctcccatacatgtgataaa

SEQ ID NO: 68157 - DNA, 25 bp, Saccharomyces pastorianus
gcagctagatatgctacctcatgtt

SEQ ID NO: 68158 - DNA, 25 bp, Saccharomyces pastorianus
gaaagatttatctcccttacttgcc

SEQ ID NO: 68159 - DNA, 25 bp, Saccharomyces pastorianus
atggattatcccagctatttggccc

SEQ ID NO: 68160 - DNA, 25 bp, Saccharomyces pastorianus
ggaaccaatgtactgctaccgatga

SEQ ID NO: 68161 - DNA, 25 bp, Saccharomyces pastorianus
ttattctcttacaccaacggaccga

SEQ ID NO: 68162 - DNA, 25 bp, Saccharomyces pastorianus
ttttcatgcatgacgagaccgctag

SEQ ID NO: 68163 - DNA, 25 bp, Saccharomyces pastorianus
tgtagcgtcacattgtgcgttcacg

SEQ ID NO: 68164 - DNA, 25 bp, Saccharomyces pastorianus
gagaccgctagaaattgttcctctt

SEQ ID NO: 68165 - DNA, 25 bp, Saccharomyces pastorianus
ttgcggccagttcggtaaccaagag

SEQ ID NO: 68166 - DNA, 25 bp, Saccharomyces pastorianus
agatcccgtttacaaattcttgaag

SEQ ID NO: 68167 - DNA, 25 bp, Saccharomyces pastorianus
ttccccatcttgcacaaggtttgtt

SEQ ID NO: 68168 - DNA, 25 bp, Saccharomyces pastorianus
gtgcgttcacgcctcagtataaaga

SEQ ID NO: 68169 - DNA, 25 bp, Saccharomyces pastorianus
agcggcctggagatcatagccttcc

SEQ ID NO: 68170 - DNA, 25 bp, Saccharomyces pastorianus
aatggcccaaagcaagatcccgttt

SEQ ID NO: 68171 - DNA, 25 bp, Saccharomyces pastorianus
cgagatggcaatcagttcccctttg

SEQ ID NO: 68172 - DNA, 25 bp, Saccharomyces pastorianus
tataggcgcccatttaagaagacag

SEQ ID NO: 68173 - DNA, 25 bp, Saccharomyces pastorianus
gatttgtggttcttattcctcggat

SEQ ID NO: 68174 - DNA, 25 bp, Saccharomyces pastorianus
gaacccgagttcaacgtcttcagta

SEQ ID NO: 68175 - DNA, 25 bp, Saccharomyces pastorianus
ttcggcgcagttcagtgtattgtct

SEQ ID NO: 68176 - DNA, 25 bp, Saccharomyces pastorianus
ggttctacccttggcaatttcaatc

SEQ ID NO: 68177 - DNA, 25 bp, Saccharomyces pastorianus
gatgaacaagacaccgccaatgaca

SEQ ID NO: 68178 - DNA, 25 bp, Saccharomyces pastorianus
aaataccaatacatcgctttcggcg

SEQ ID NO: 68179 - DNA, 25 bp, Saccharomyces pastorianus
agtgcttatggtacggtgggcttat

SEQ ID NO: 68180 - DNA, 25 bp, Saccharomyces pastorianus
tcgtccccaaaatcgtttataggcg

SEQ ID NO: 68181 - DNA, 25 bp, Saccharomyces pastorianus
ggactaccatacactttggatcgtg

SEQ ID NO: 68182 - DNA, 25 bp, Saccharomyces pastorianus
atgctgatgatgtacgtctcggttc

SEQ ID NO: 68183 - DNA, 25 bp, Saccharomyces pastorianus
tttctcaaactgatgcgccagacgt

SEQ ID NO: 68184 - DNA, 25 bp, Saccharomyces pastorianus
aaactcttgattttgatggcgacac

SEQ ID NO: 68185 - DNA, 25 bp, Saccharomyces pastorianus
ataggtttctgcgaatctgcaagaa

SEQ ID NO: 68186 - DNA, 25 bp, Saccharomyces pastorianus
gacagaccgtcattagatatacctt

SEQ ID NO: 68187 - DNA, 25 bp, Saccharomyces pastorianus
ttctcgggcgcaaatactctaactg

SEQ ID NO: 68188 - DNA, 25 bp, Saccharomyces pastorianus
tacctcctgccgtgaataaccaaat

SEQ ID NO: 68189 - DNA, 25 bp, Saccharomyces pastorianus
cggcgatcctttaaatatacctcct

SEQ ID NO: 68190 - DNA, 25 bp, Saccharomyces pastorianus
gggcactttcaatcatagtccttat

SEQ ID NO: 68191 - DNA, 25 bp, Saccharomyces pastorianus
gatggcgacactttcgatcataagg

SEQ ID NO: 68192 - DNA, 25 bp, Saccharomyces pastorianus
tggacatcctttttcaggtcacttc

SEQ ID NO: 68193 - DNA, 25 bp, Saccharomyces pastorianus
ggtcacttcaggatctgtatgggac

SEQ ID NO: 68194 - DNA, 25 bp, Saccharomyces pastorianus
ttcagcctcttgcaaggcttgcgaa

SEQ ID NO: 68195 - DNA, 25 bp, Saccharomyces pastorianus
gatgcatctatttccaatcctttca

SEQ ID NO: 68196 - DNA, 25 bp, Saccharomyces pastorianus
gcacaacaccgatagctttgccaaa

SEQ ID NO: 68197 - DNA, 25 bp, Saccharomyces pastorianus
gatctagagctctccaaagatgcat

SEQ ID NO: 68198 - DNA, 25 bp, Saccharomyces pastorianus
cattgccctcttctttgacttataa

SEQ ID NO: 68199 - DNA, 25 bp, Saccharomyces pastorianus
gtaccgagactcatacaattttctg

SEQ ID NO: 68200 - DNA, 25 bp, Saccharomyces pastorianus
gaggacgcactgaagccacagcaaa

SEQ ID NO: 68201 - DNA, 25 bp, Saccharomyces pastorianus
atggtaattgcgacggtgccgaagc

SEQ ID NO: 68202 - DNA, 25 bp, Saccharomyces pastorianus
gaggaagaatcgtttagaccgcaaa

SEQ ID NO: 68203 - DNA, 25 bp, Saccharomyces pastorianus
agagatgaacccactaatccttctt

SEQ ID NO: 68204 - DNA, 25 bp, Saccharomyces pastorianus
agatgctctatggttacgttccaga

SEQ ID NO: 68205 - DNA, 25 bp, Saccharomyces pastorianus
gatgatgctacatctttcagccagc

SEQ ID NO: 68206 - DNA, 25 bp, Saccharomyces pastorianus
ggacacatttatcttacatctatta

SEQ ID NO: 68207 - DNA, 25 bp, Saccharomyces pastorianus
tcccgggcaatcttcataaacctga

SEQ ID NO: 68208 - DNA, 25 bp, Saccharomyces pastorianus
gagatgtttataccaccatatcgaa

SEQ ID NO: 68209 - DNA, 25 bp, Saccharomyces pastorianus
ggaaaaatcccttgtacttagcaat

SEQ ID NO: 68210 - DNA, 25 bp, Saccharomyces pastorianus
aggaccgtagggatgtttacactat

SEQ ID NO: 68211 - DNA, 25 bp, Saccharomyces pastorianus
tgatttccgtcttcccatatacaag

SEQ ID NO: 68212 - DNA, 25 bp, Saccharomyces pastorianus
gaataccgaatgatttccgtcttcc

SEQ ID NO: 68213 - DNA, 25 bp, Saccharomyces pastorianus
tagtgaccacttactacggacgtga

SEQ ID NO: 68214 - DNA, 25 bp, Saccharomyces pastorianus
aatttccctaatctgtactaccact

SEQ ID NO: 68215 - DNA, 25 bp, Saccharomyces pastorianus
aaacgtcacttggttgaacagtcgt

SEQ ID NO: 68216 - DNA, 25 bp, Saccharomyces pastorianus
gcccctggatatggatccggcgcaa

SEQ ID NO: 68217 - DNA, 25 bp, Saccharomyces pastorianus
ggccaagagcttgagttcgaaagac

SEQ ID NO: 68218 - DNA, 25 bp, Saccharomyces pastorianus
agaggattgctggtattttagtatg

SEQ ID NO: 68219 - DNA, 25 bp, Saccharomyces pastorianus
gcgaagaaatacaaccccttctacg

SEQ ID NO: 68220 - DNA, 25 bp, Saccharomyces pastorianus
gaaagacaaaatcaggagggccaca

SEQ ID NO: 68221 - DNA, 25 bp, Saccharomyces pastorianus
gagggccacacaacaaaggcgaaga

SEQ ID NO: 68222 - DNA, 25 bp, Saccharomyces pastorianus
ttctctgagcccctggatatggatc

SEQ ID NO: 68223 - DNA, 25 bp, Saccharomyces pastorianus
ttctacgtaccatcgaaggtagtgc

SEQ ID NO: 68224 - DNA, 25 bp, Saccharomyces pastorianus
ggaaatggtcagtaaagcaggtgtc

SEQ ID NO: 68225 - DNA, 25 bp, Saccharomyces pastorianus
tccggcgcaaggtgaagacgtaatt

SEQ ID NO: 68226 - DNA, 25 bp, Saccharomyces pastorianus
agagtacatcgcattctctgagccc

SEQ ID NO: 68227 - DNA, 25 bp, Saccharomyces pastorianus
gctggtcccgttgattttttctatg

SEQ ID NO: 68228 - DNA, 25 bp, Saccharomyces pastorianus
gtagccatagcaagatcttctccaa

SEQ ID NO: 68229 - DNA, 25 bp, Saccharomyces pastorianus
tttttctatgatcacgttgacgtac

SEQ ID NO: 68230 - DNA, 25 bp, Saccharomyces pastorianus
agttttcaagatttcctgtcgatga

SEQ ID NO: 68231 - DNA, 25 bp, Saccharomyces pastorianus
ggacctgggcgatgacagttttcaa

SEQ ID NO: 68232 - DNA, 25 bp, Saccharomyces pastorianus
agattccaagctgtatggcgagcgg

SEQ ID NO: 68233 - DNA, 25 bp, Saccharomyces pastorianus
atggcaaatgacgtcaacccactgc

SEQ ID NO: 68234 - DNA, 25 bp, Saccharomyces pastorianus
aaaggctccggctagattccaagct

SEQ ID NO: 68235 - DNA, 25 bp, Saccharomyces pastorianus
gagcgtgaactgtttgagcacttaa

SEQ ID NO: 68236 - DNA, 25 bp, Saccharomyces pastorianus
gatgaacgcaaacctagacaaactg

SEQ ID NO: 68237 - DNA, 25 bp, Saccharomyces pastorianus
cccactgctcgccaagatgaacaaa

SEQ ID NO: 68238 - DNA, 25 bp, Saccharomyces pastorianus
gcgtcatgcctatttcaataccagg

SEQ ID NO: 68239 - DNA, 25 bp, Saccharomyces pastorianus
ttcgacgctaagagcgcttcgcatt

SEQ ID NO: 68240 - DNA, 25 bp, Saccharomyces pastorianus
tcgttgcccaacttactaggattga

SEQ ID NO: 68241 - DNA, 25 bp, Saccharomyces pastorianus
aggtttatcttgacccctgagaaga

SEQ ID NO: 68242 - DNA, 25 bp, Saccharomyces pastorianus
tgggcttgcgttttggttcgaacag

SEQ ID NO: 68243 - DNA, 25 bp, Saccharomyces pastorianus
aattcatggataaggccccgttcag

SEQ ID NO: 68244 - DNA, 25 bp, Saccharomyces pastorianus
ttaaggttgacgtatgacccgcaaa

SEQ ID NO: 68245 - DNA, 25 bp, Saccharomyces pastorianus
ggaactttcgcagtggtcgttaaca

SEQ ID NO: 68246 - DNA, 25 bp, Saccharomyces pastorianus
gacaatagagtgtgcttccagacaa

SEQ ID NO: 68247 - DNA, 25 bp, Saccharomyces pastorianus
ttaaatgacggagccaccgacttcg

SEQ ID NO: 68248 - DNA, 25 bp, Saccharomyces pastorianus
aaagggctcgctttggatgaagcaa

SEQ ID NO: 68249 - DNA, 25 bp, Saccharomyces pastorianus
gcgcttgtttctgcagagtcagcta

SEQ ID NO: 68250 - DNA, 25 bp, Saccharomyces pastorianus
gcaaacgctgcgcaagtgggaactc

SEQ ID NO: 68251 - DNA, 25 bp, Saccharomyces pastorianus
atcgactacgacagctggcggcgca

SEQ ID NO: 68252 - DNA, 25 bp, Saccharomyces pastorianus
gagacgaagctcagcgaagccgccg

SEQ ID NO: 68253 - DNA, 25 bp, Saccharomyces pastorianus
tcaggtccccgatcacgacgatgat

SEQ ID NO: 68254 - DNA, 25 bp, Saccharomyces pastorianus
gaagcgatttactcgcacagccgca

SEQ ID NO: 68255 - DNA, 25 bp, Saccharomyces pastorianus
gagaaggcgcgcagcccattgcgta

SEQ ID NO: 68256 - DNA, 25 bp, Saccharomyces pastorianus
acgaaatcgacgacgcggacctgat

SEQ ID NO: 68257 - DNA, 25 bp, Saccharomyces pastorianus
agggcaagttgttccgcaccaggga

SEQ ID NO: 68258 - DNA, 25 bp, Saccharomyces pastorianus
tcagctatcaagacgggatccaccc

SEQ ID NO: 68259 - DNA, 25 bp, Saccharomyces pastorianus
gcaccagggaaatggcgcgcttgtt

SEQ ID NO: 68260 - DNA, 25 bp, Saccharomyces pastorianus
tgtatgctttcttggtttatttcta

SEQ ID NO: 68261 - DNA, 25 bp, Saccharomyces pastorianus
gtatgctttcttggtttatttctac

SEQ ID NO: 68262 - DNA, 25 bp, Saccharomyces pastorianus
atttctacttcacctctaaaagaat

SEQ ID NO: 68263 - DNA, 25 bp, Saccharomyces pastorianus
acttcacctctaaaagaatactgtg

SEQ ID NO: 68264 - DNA, 25 bp, Saccharomyces pastorianus
tatttctacttcacctctaaaagaa

SEQ ID NO: 68265 - DNA, 25 bp, Saccharomyces pastorianus
gtgtatgctttcttggtttatttct

SEQ ID NO: 68266 - DNA, 25 bp, Saccharomyces pastorianus
tctacttcacctctaaaagaatact

SEQ ID NO: 68267 - DNA, 25 bp, Saccharomyces pastorianus
atgtgtatgctttcttggtttattt

SEQ ID NO: 68268 - DNA, 25 bp, Saccharomyces pastorianus
tgtgtatgctttcttggtttatttc

SEQ ID NO: 68269 - DNA, 25 bp, Saccharomyces pastorianus
tacttcacctctaaaagaatactgt

SEQ ID NO: 68270 - DNA, 25 bp, Saccharomyces pastorianus
tatgctttcttggtttatttctact

SEQ ID NO: 68271 - DNA, 25 bp, Saccharomyces pastorianus
atgttggatttgttagacccttcta

SEQ ID NO: 68272 - DNA, 25 bp, Saccharomyces pastorianus
gagtatctattctaccttaatcccc

SEQ ID NO: 68273 - DNA, 25 bp, Saccharomyces pastorianus
tatttgccctcacagcctaatgaaa

SEQ ID NO: 68274 - DNA, 25 bp, Saccharomyces pastorianus
atggctgcagaacaagactcgtact

SEQ ID NO: 68275 - DNA, 25 bp, Saccharomyces pastorianus
tgagctccatttcctaagtcctagt

SEQ ID NO: 68276 - DNA, 25 bp, Saccharomyces pastorianus
gatgctaagcaatatgtccaccgta

SEQ ID NO: 68277 - DNA, 25 bp, Saccharomyces pastorianus
gaacctagccaaatatcgcgtgcga

SEQ ID NO: 68278 - DNA, 25 bp, Saccharomyces pastorianus
gaagaaggtcgccttatttgccctc

SEQ ID NO: 68279 - DNA, 25 bp, Saccharomyces pastorianus
aagtcctagtttcacaccatttacg

SEQ ID NO: 68280 - DNA, 25 bp, Saccharomyces pastorianus
aagtgtttgctaagggcgcctttct

SEQ ID NO: 68281 - DNA, 25 bp, Saccharomyces pastorianus
ctcttgtttccaccggcatgaataa

SEQ ID NO: 68282 - DNA, 25 bp, Saccharomyces pastorianus
tctagaccccgaagcaatccgagag

SEQ ID NO: 68283 - DNA, 25 bp, Saccharomyces pastorianus
agcaatccgagagcttacgcagaaa

SEQ ID NO: 68284 - DNA, 25 bp, Saccharomyces pastorianus
tcagcttgtcgatctcgtggaggcc

SEQ ID NO: 68285 - DNA, 25 bp, Saccharomyces pastorianus
cgatctcgtggaggccggtctagac

SEQ ID NO: 68286 - DNA, 25 bp, Saccharomyces pastorianus
tgtcgatctcgtggaggccggtcta

SEQ ID NO: 68287 - DNA, 25 bp, Saccharomyces pastorianus
gtctagaccccgaagcaatccgaga

SEQ ID NO: 68288 - DNA, 25 bp, Saccharomyces pastorianus
aatccgagagcttacgcagaaatgg

SEQ ID NO: 68289 - DNA, 25 bp, Saccharomyces pastorianus
cttgtcgatctcgtggaggccggtc

SEQ ID NO: 68290 - DNA, 25 bp, Saccharomyces pastorianus
atcagcttgtcgatctcgtggaggc

SEQ ID NO: 68291 - DNA, 25 bp, Saccharomyces pastorianus
tccgagagcttacgcagaaatggag

SEQ ID NO: 68292 - DNA, 25 bp, Saccharomyces pastorianus
gcaatccgagagcttacgcagaaat

SEQ ID NO: 68293 - DNA, 25 bp, Saccharomyces pastorianus
ccaggaagtggaaccgttagtagat

SEQ ID NO: 68294 - DNA, 25 bp, Saccharomyces pastorianus
gaaattcattcagtatttggaacaa

SEQ ID NO: 68295 - DNA, 25 bp, Saccharomyces pastorianus
acaccagcagctgaaggatgctatg

SEQ ID NO: 68296 - DNA, 25 bp, Saccharomyces pastorianus
gaaaactcgaggtcggtttatactg

SEQ ID NO: 68297 - DNA, 25 bp, Saccharomyces pastorianus
cgaggtcggtttatactgaggaaat

SEQ ID NO: 68298 - DNA, 25 bp, Saccharomyces pastorianus
atgctatgagcgaacttggcgcggt

SEQ ID NO: 68299 - DNA, 25 bp, Saccharomyces pastorianus
cgccacggaatttgtccaggaagtg

SEQ ID NO: 68300 - DNA, 25 bp, Saccharomyces pastorianus
gaacttggcgcggttgctcccaagt

SEQ ID NO: 68301 - DNA, 25 bp, Saccharomyces pastorianus
agatttcccggatttacaccagcag

SEQ ID NO: 68302 - DNA, 25 bp, Saccharomyces pastorianus
actgttcttactcatcgtggtctac

SEQ ID NO: 68303 - DNA, 25 bp, Saccharomyces pastorianus
cgtggtctacattatttcctaaata

SEQ ID NO: 68304 - DNA, 25 bp, Saccharomyces pastorianus
gcgatgacttgctatccgtggacaa

SEQ ID NO: 68305 - DNA, 25 bp, Saccharomyces pastorianus
tataaacgactacgatacacaagga

SEQ ID NO: 68306 - DNA, 25 bp, Saccharomyces pastorianus
aagtgctttagctgatatcgaggga

SEQ ID NO: 68307 - DNA, 25 bp, Saccharomyces pastorianus
attttagcatcgttaaccgctcctg

SEQ ID NO: 68308 - DNA, 25 bp, Saccharomyces pastorianus
taaccgctcctgttcagtttgataa

SEQ ID NO: 68309 - DNA, 25 bp, Saccharomyces pastorianus
tcttgggtaaagacggcgatgactt

SEQ ID NO: 68310 - DNA, 25 bp, Saccharomyces pastorianus
attcaattgaagataccgacgccga

SEQ ID NO: 68311 - DNA, 25 bp, Saccharomyces pastorianus
gagtgtcggtttagatgagattcat

SEQ ID NO: 68312 - DNA, 25 bp, Saccharomyces pastorianus
gtgaaaacagtaactctatgtggag

SEQ ID NO: 68313 - DNA, 25 bp, Saccharomyces pastorianus
gataccgacgccgacattttagcat

SEQ ID NO: 68314 - DNA, 25 bp, Saccharomyces pastorianus
acagagtatggtagaagcagcagct

SEQ ID NO: 68315 - DNA, 25 bp, Saccharomyces pastorianus
aagaagcttctgaaactccgaccgg

SEQ ID NO: 68316 - DNA, 25 bp, Saccharomyces pastorianus
tggaagacgattcaccatcccatac

SEQ ID NO: 68317 - DNA, 25 bp, Saccharomyces pastorianus
gctgcggattggtacgaggtcccca

SEQ ID NO: 68318 - DNA, 25 bp, Saccharomyces pastorianus
gtcagcggacatgataccgccatta

SEQ ID NO: 68319 - DNA, 25 bp, Saccharomyces pastorianus
cagcaataatgctacccttaatggg

SEQ ID NO: 68320 - DNA, 25 bp, Saccharomyces pastorianus
cgttgccattaagcgtcagcggaca

SEQ ID NO: 68321 - DNA, 25 bp, Saccharomyces pastorianus
gagctcaaactccagacatcaaaaa

SEQ ID NO: 68322 - DNA, 25 bp, Saccharomyces pastorianus
gaagatgaatatatgctacccacaa

SEQ ID NO: 68323 - DNA, 25 bp, Saccharomyces pastorianus
gagtactaatggacatgctgcggat

SEQ ID NO: 68324 - DNA, 25 bp, Saccharomyces pastorianus
agaaaggcgcccattggctatcttg

SEQ ID NO: 68325 - DNA, 25 bp, Saccharomyces pastorianus
gaggtccccaaagttcctttatctg

SEQ ID NO: 68326 - DNA, 25 bp, Saccharomyces pastorianus
aacatctcccagtaagcaacagcca

SEQ ID NO: 68327 - DNA, 25 bp, Saccharomyces pastorianus
tctgagtgacgtatcggattccgac

SEQ ID NO: 68328 - DNA, 25 bp, Saccharomyces pastorianus
ggaactgaatcctctgattaccaag

SEQ ID NO: 68329 - DNA, 25 bp, Saccharomyces pastorianus
gaatttaaaacagtcaccgcctcct

SEQ ID NO: 68330 - DNA, 25 bp, Saccharomyces pastorianus
aataatacaactgccttttcctctc

SEQ ID NO: 68331 - DNA, 25 bp, Saccharomyces pastorianus
aaaatctactacaacatctcccagt

SEQ ID NO: 68332 - DNA, 25 bp, Saccharomyces pastorianus
cagtgatagtgagacgagttccgat

SEQ ID NO: 68333 - DNA, 25 bp, Saccharomyces pastorianus
ccgcctcctatgctagggacaacaa

SEQ ID NO: 68334 - DNA, 25 bp, Saccharomyces pastorianus
gattttgtcaaactaacagcccaga

SEQ ID NO: 68335 - DNA, 25 bp, Saccharomyces pastorianus
ttttcctctcgcgataacagcaata

SEQ ID NO: 68336 - DNA, 25 bp, Saccharomyces pastorianus
caaggccaaggcgatttagtctaat

SEQ ID NO: 68337 - DNA, 25 bp, Saccharomyces pastorianus
cttccgctcaaccagtagtagtgac

SEQ ID NO: 68338 - DNA, 25 bp, Saccharomyces pastorianus
atgatattcatatccttccgctcaa

SEQ ID NO: 68339 - DNA, 25 bp, Saccharomyces pastorianus
taaactcggacgaaaccgtcgctca

SEQ ID NO: 68340 - DNA, 25 bp, Saccharomyces pastorianus
gctgctgctaaagatcctaaactcg

SEQ ID NO: 68341 - DNA, 25 bp, Saccharomyces pastorianus
aaagctcaaacttcctgtgcgctga

SEQ ID NO: 68342 - DNA, 25 bp, Saccharomyces pastorianus
gtcacggcgccaaagccagtatagg

SEQ ID NO: 68343 - DNA, 25 bp, Saccharomyces pastorianus
acaaacgttgtctcgcaaagctcaa

SEQ ID NO: 68344 - DNA, 25 bp, Saccharomyces pastorianus
agatctatcagacttcggtttcgaa

SEQ ID NO: 68345 - DNA, 25 bp, Saccharomyces pastorianus
gtcgctcaaggtgtgcatacgcatg

SEQ ID NO: 68346 - DNA, 25 bp, Saccharomyces pastorianus
gtgacaagcagctgcaatgcgacga

SEQ ID NO: 68347 - DNA, 25 bp, Saccharomyces pastorianus
gtactcgccgtactcataatatcgt

SEQ ID NO: 68348 - DNA, 25 bp, Saccharomyces pastorianus
gcagccgatttccagcattagcaaa

SEQ ID NO: 68349 - DNA, 25 bp, Saccharomyces pastorianus
gaatcaccaactgcagccaggatga

SEQ ID NO: 68350 - DNA, 25 bp, Saccharomyces pastorianus
aactacaacatttcggctctagctc

SEQ ID NO: 68351 - DNA, 25 bp, Saccharomyces pastorianus
aaaaatcaacacaccgcagccgatt

SEQ ID NO: 68352 - DNA, 25 bp, Saccharomyces pastorianus
aagcggatgattcctcgccatgcaa

SEQ ID NO: 68353 - DNA, 25 bp, Saccharomyces pastorianus
ttgtcaccaccgaattcacacatca

SEQ ID NO: 68354 - DNA, 25 bp, Saccharomyces pastorianus
tgctggtgatctcgacggttcttca

SEQ ID NO: 68355 - DNA, 25 bp, Saccharomyces pastorianus
tgaatgtttcaagccctctcgataa

SEQ ID NO: 68356 - DNA, 25 bp, Saccharomyces pastorianus
aaggtgctaccatcaatcggtcaat

SEQ ID NO: 68357 - DNA, 25 bp, Saccharomyces pastorianus
gtcaatctcgacaacatcaccggtt

SEQ ID NO: 68358 - DNA, 25 bp, Saccharomyces pastorianus
acatcatcaacaagtcaccggcaga

SEQ ID NO: 68359 - DNA, 25 bp, Saccharomyces pastorianus
ggacttgggcaagatccctttcaaa

SEQ ID NO: 68360 - DNA, 25 bp, Saccharomyces pastorianus
actgcgggcattttttctgtgggtc

SEQ ID NO: 68361 - DNA, 25 bp, Saccharomyces pastorianus
gagaattacaagtcacctgtggtca

SEQ ID NO: 68362 - DNA, 25 bp, Saccharomyces pastorianus
aaaggcccggctagctaaacagatt

SEQ ID NO: 68363 - DNA, 25 bp, Saccharomyces pastorianus
ttcggccctcaggtccggatgagaa

SEQ ID NO: 68364 - DNA, 25 bp, Saccharomyces pastorianus
ggtaagtacactctgacggtcaacg

SEQ ID NO: 68365 - DNA, 25 bp, Saccharomyces pastorianus
ggacttccagcctgatgtttgtaaa

SEQ ID NO: 68366 - DNA, 25 bp, Saccharomyces pastorianus
ctgtggtcacaaactgcgggcattt

SEQ ID NO: 68367 - DNA, 25 bp, Saccharomyces pastorianus
atgagaagccggtcgctagcgatca

SEQ ID NO: 68368 - DNA, 25 bp, Saccharomyces pastorianus
gaccacggtgcttatggacttccag

SEQ ID NO: 68369 - DNA, 25 bp, Saccharomyces pastorianus
gatgacttcgttgacagtatcccct

SEQ ID NO: 68370 - DNA, 25 bp, Saccharomyces pastorianus
gtctgccttgagtggactgttcgca

SEQ ID NO: 68371 - DNA, 25 bp, Saccharomyces pastorianus
ctatgttgttttcagttcgagcttg

SEQ ID NO: 68372 - DNA, 25 bp, Saccharomyces pastorianus
gaaagtgaattggacgccgctaaat

SEQ ID NO: 68373 - DNA, 25 bp, Saccharomyces pastorianus
ttcgagcttgaacaaccacggtacg

SEQ ID NO: 68374 - DNA, 25 bp, Saccharomyces pastorianus
ctgttcgcacagttgattcatgagc

SEQ ID NO: 68375 - DNA, 25 bp, Saccharomyces pastorianus
gctaagctagttgccgatatcacaa

SEQ ID NO: 68376 - DNA, 25 bp, Saccharomyces pastorianus
acggtacggcaaatatcaggatctt

SEQ ID NO: 68377 - DNA, 25 bp, Saccharomyces pastorianus
gatgttggttcattcaaatcgacac

SEQ ID NO: 68378 - DNA, 25 bp, Saccharomyces pastorianus
aatcgacactatttgttgctcctgt

SEQ ID NO: 68379 - DNA, 25 bp, Saccharomyces pastorianus
acagcagcgatttatttaggtgact

SEQ ID NO: 68380 - DNA, 25 bp, Saccharomyces pastorianus
aacataccaccccttacttagagtg

SEQ ID NO: 68381 - DNA, 25 bp, Saccharomyces pastorianus
attaggtcgctgtttgtcgctgcat

SEQ ID NO: 68382 - DNA, 25 bp, Saccharomyces pastorianus
ggtctaatcacagccagtttttcca

SEQ ID NO: 68383 - DNA, 25 bp, Saccharomyces pastorianus
gaagctcctctttaacagggtcaca

SEQ ID NO: 68384 - DNA, 25 bp, Saccharomyces pastorianus
gaagggatcatcataccatagggtc

SEQ ID NO: 68385 - DNA, 25 bp, Saccharomyces pastorianus
gtcgctgcatgctgagttattacct

SEQ ID NO: 68386 - DNA, 25 bp, Saccharomyces pastorianus
aatagaaagatacagccgcgccaac

SEQ ID NO: 68387 - DNA, 25 bp, Saccharomyces pastorianus
gaagccatcgctaccagggacaaga

SEQ ID NO: 68388 - DNA, 25 bp, Saccharomyces pastorianus
gaaggtcctgtctttctggaaggga

SEQ ID NO: 68389 - DNA, 25 bp, Saccharomyces pastorianus
atcagagtgattcctttggcccgaa

SEQ ID NO: 68390 - DNA, 25 bp, Saccharomyces pastorianus
gtgaaggctcgtatactttcttaca

SEQ ID NO: 68391 - DNA, 25 bp, Saccharomyces pastorianus
tattaccgggacaatatcagcccca

SEQ ID NO: 68392 - DNA, 25 bp, Saccharomyces pastorianus
actgaatcaagtaagtgccaccatt

SEQ ID NO: 68393 - DNA, 25 bp, Saccharomyces pastorianus
agtgtataccatcggtttccttgat

SEQ ID NO: 68394 - DNA, 25 bp, Saccharomyces pastorianus
aaagctaacccagatgcggatattt

SEQ ID NO: 68395 - DNA, 25 bp, Saccharomyces pastorianus
taccaaatgacctcctacaactgat

SEQ ID NO: 68396 - DNA, 25 bp, Saccharomyces pastorianus
agaaatgtttctctggacaaccagg

SEQ ID NO: 68397 - DNA, 25 bp, Saccharomyces pastorianus
tagagaacccaaatgtcgctttatt

SEQ ID NO: 68398 - DNA, 25 bp, Saccharomyces pastorianus
attgcggatatagtcgaccctgata

SEQ ID NO: 68399 - DNA, 25 bp, Saccharomyces pastorianus
gaatccacgtactataggcggttat

SEQ ID NO: 68400 - DNA, 25 bp, Saccharomyces pastorianus
gtacgtccatgtagcgacatgttca

SEQ ID NO: 68401 - DNA, 25 bp, Saccharomyces pastorianus
tgcggatatttttattctgggcgaa

SEQ ID NO: 68402 - DNA, 25 bp, Saccharomyces pastorianus
gcattatatattcgtttcatcagca

SEQ ID NO: 68403 - DNA, 25 bp, Saccharomyces pastorianus
gcaacttcttggcagtaccatcgaa

SEQ ID NO: 68404 - DNA, 25 bp, Saccharomyces pastorianus
aagagactcccatgaagctgctggt

SEQ ID NO: 68405 - DNA, 25 bp, Saccharomyces pastorianus
atgccatgctccaaaatccttactt

SEQ ID NO: 68406 - DNA, 25 bp, Saccharomyces pastorianus
gacacttttttactgattctgggta

SEQ ID NO: 68407 - DNA, 25 bp, Saccharomyces pastorianus
atttgtgggcgtgtagtcggtctaa

SEQ ID NO: 68408 - DNA, 25 bp, Saccharomyces pastorianus
gccttcaaaggcttttcgccgagat

SEQ ID NO: 68409 - DNA, 25 bp, Saccharomyces pastorianus
aagctgctggtcgagttcatgccat

SEQ ID NO: 68410 - DNA, 25 bp, Saccharomyces pastorianus
cagaggaccaaacgcttgaagccat

SEQ ID NO: 68411 - DNA, 25 bp, Saccharomyces pastorianus
tgggtatcctttctattcgcaaaac

SEQ ID NO: 68412 - DNA, 25 bp, Saccharomyces pastorianus
attggaggcgcttgatgcagtttta

SEQ ID NO: 68413 - DNA, 25 bp, Saccharomyces pastorianus
acagcagctctgttgtagatctaca

SEQ ID NO: 68414 - DNA, 25 bp, Saccharomyces pastorianus
ggacgtggcaacaatggcggctact

SEQ ID NO: 68415 - DNA, 25 bp, Saccharomyces pastorianus
acgtacaacaatcgcggcggtcgtg

SEQ ID NO: 68416 - DNA, 25 bp, Saccharomyces pastorianus
gaggattcggtagaggtacgtacaa

SEQ ID NO: 68417 - DNA, 25 bp, Saccharomyces pastorianus
gcggtcgtggcggacgtggcaacaa

SEQ ID NO: 68418 - DNA, 25 bp, Saccharomyces pastorianus
ataacggtggtatgaacggagcttc

SEQ ID NO: 68419 - DNA, 25 bp, Saccharomyces pastorianus
gacgcggtaactatagcaataacgg

SEQ ID NO: 68420 - DNA, 25 bp, Saccharomyces pastorianus
cgtggcaacaatggcggctactcca

SEQ ID NO: 68421 - DNA, 25 bp, Saccharomyces pastorianus
aggtacgtacaacaatcgcggcggt

SEQ ID NO: 68422 - DNA, 25 bp, Saccharomyces pastorianus
gtaactatagcaataacggtggtat

SEQ ID NO: 68423 - DNA, 25 bp, Saccharomyces pastorianus
gtacgtacaacaatcgcggcggtcg

SEQ ID NO: 68424 - DNA, 25 bp, Saccharomyces pastorianus
acggtggtatgaacggagcttcaag

SEQ ID NO: 68425 - DNA, 25 bp, Saccharomyces pastorianus
aaataacagatatcgcggaggtgct

SEQ ID NO: 68426 - DNA, 25 bp, Saccharomyces pastorianus
gcttcagatttacaatccaccgata

SEQ ID NO: 68427 - DNA, 25 bp, Saccharomyces pastorianus
gggcacaacagcaacgacttttcaa

SEQ ID NO: 68428 - DNA, 25 bp, Saccharomyces pastorianus
aagattggtactccagcttcagatt

SEQ ID NO: 68429 - DNA, 25 bp, Saccharomyces pastorianus
aactcagagtcgacggcagatgcca

SEQ ID NO: 68430 - DNA, 25 bp, Saccharomyces pastorianus
aagtactcccttaagcaagattggt

SEQ ID NO: 68431 - DNA, 25 bp, Saccharomyces pastorianus
gataaaatccaatcggacgcctcag

SEQ ID NO: 68432 - DNA, 25 bp, Saccharomyces pastorianus
gcggaggtgctaacagcggcaatta

SEQ ID NO: 68433 - DNA, 25 bp, Saccharomyces pastorianus
ggacgcctcaggtggtaatggcata

SEQ ID NO: 68434 - DNA, 25 bp, Saccharomyces pastorianus
aaaacctttgagctattcggaagtg

SEQ ID NO: 68435 - DNA, 25 bp, Saccharomyces pastorianus
gaatcgcggtggtaattcttacaac

SEQ ID NO: 68436 - DNA, 25 bp, Saccharomyces pastorianus
gcactcaccgtgtttggcgacaaca

SEQ ID NO: 68437 - DNA, 25 bp, Saccharomyces pastorianus
gcgacaacacacgtgcgcggcggtt

SEQ ID NO: 68438 - DNA, 25 bp, Saccharomyces pastorianus
aaagcgccggtttgatatatgtctg

SEQ ID NO: 68439 - DNA, 25 bp, Saccharomyces pastorianus
ggctgctgacaaactcactgtgcga

SEQ ID NO: 68440 - DNA, 25 bp, Saccharomyces pastorianus
gaactacacgttgcacaaggccgac

SEQ ID NO: 68441 - DNA, 25 bp, Saccharomyces pastorianus
aaccggctgccgtggaaggcgaaca

SEQ ID NO: 68442 - DNA, 25 bp, Saccharomyces pastorianus
tgagtcgctcgagtttcagcgtgca

SEQ ID NO: 68443 - DNA, 25 bp, Saccharomyces pastorianus
gatctacctctacgaggtgcacgtg

SEQ ID NO: 68444 - DNA, 25 bp, Saccharomyces pastorianus
acactcgggtgcatgaactacacgt

SEQ ID NO: 68445 - DNA, 25 bp, Saccharomyces pastorianus
tgggcgcgtttgtctccttcatgta

SEQ ID NO: 68446 - DNA, 25 bp, Saccharomyces pastorianus
gcatgtgcgacgactttttcggcgt

SEQ ID NO: 68447 - DNA, 25 bp, Saccharomyces pastorianus
agaactgccggactcactgagagag

SEQ ID NO: 68448 - DNA, 25 bp, Saccharomyces pastorianus
acagacgaactaccggaaatcccat

SEQ ID NO: 68449 - DNA, 25 bp, Saccharomyces pastorianus
gatgaggaccagatcgatgacctta

SEQ ID NO: 68450 - DNA, 25 bp, Saccharomyces pastorianus
gatgaacgagtaactgatttcccaa

SEQ ID NO: 68451 - DNA, 25 bp, Saccharomyces pastorianus
aatttcagatcccagaactgccgga

SEQ ID NO: 68452 - DNA, 25 bp, Saccharomyces pastorianus
accttatgggtcagtttgtggagtc

SEQ ID NO: 68453 - DNA, 25 bp, Saccharomyces pastorianus
tcagcccctatacgcacaagaaatt

SEQ ID NO: 68454 - DNA, 25 bp, Saccharomyces pastorianus
gacgcaaacaaagacgatccgctta

SEQ ID NO: 68455 - DNA, 25 bp, Saccharomyces pastorianus
gatccgcttagaatacccacagtgt

SEQ ID NO: 68456 - DNA, 25 bp, Saccharomyces pastorianus
aagccttatttcgtgtagattacca

SEQ ID NO: 68457 - DNA, 25 bp, Saccharomyces pastorianus
gaaatcccatcctataactactatc

SEQ ID NO: 68458 - DNA, 25 bp, Saccharomyces pastorianus
gtgtcaccatcaatgatcacaaatg

SEQ ID NO: 68459 - DNA, 25 bp, Saccharomyces pastorianus
gtctctaaatctatgggctatttgg

SEQ ID NO: 68460 - DNA, 25 bp, Saccharomyces pastorianus
atgggctatttggaatacccttctt

SEQ ID NO: 68461 - DNA, 25 bp, Saccharomyces pastorianus
gctatttggaatacccttctttgac

SEQ ID NO: 68462 - DNA, 25 bp, Saccharomyces pastorianus
gatcacaaatgaccatgtctctaaa

SEQ ID NO: 68463 - DNA, 25 bp, Saccharomyces pastorianus
gaccatgtctctaaatctatgggct

SEQ ID NO: 68464 - DNA, 25 bp, Saccharomyces pastorianus
ggatgtgtcaccatcaatgatcaca

SEQ ID NO: 68465 - DNA, 25 bp, Saccharomyces pastorianus
atctatgggctatttggaataccct

SEQ ID NO: 68466 - DNA, 25 bp, Saccharomyces pastorianus
catgtctctaaatctatgggctatt

SEQ ID NO: 68467 - DNA, 25 bp, Saccharomyces pastorianus
aatgatcacaaatgaccatgtctct

SEQ ID NO: 68468 - DNA, 25 bp, Saccharomyces pastorianus
gggctatttggaatacccttctttg

SEQ ID NO: 68469 - DNA, 25 bp, Saccharomyces pastorianus
atggtgacttttttgtcaaacttat

SEQ ID NO: 68470 - DNA, 25 bp, Saccharomyces pastorianus
gaatcctggtgaagtatcgtttaaa

SEQ ID NO: 68471 - DNA, 25 bp, Saccharomyces pastorianus
aatagaatgcggaacaagagataac

SEQ ID NO: 68472 - DNA, 25 bp, Saccharomyces pastorianus
aaataaggctatgaatcctggtgaa

SEQ ID NO: 68473 - DNA, 25 bp, Saccharomyces pastorianus
attcgataatgtagaggccacactt

SEQ ID NO: 68474 - DNA, 25 bp, Saccharomyces pastorianus
tagaggccacacttaatgaggcaaa

SEQ ID NO: 68475 - DNA, 25 bp, Saccharomyces pastorianus
gagtctaatagacagaatcttattg

SEQ ID NO: 68476 - DNA, 25 bp, Saccharomyces pastorianus
gaagagcaaacaacatgacgacggc

SEQ ID NO: 68477 - DNA, 25 bp, Saccharomyces pastorianus
gtatcgtttaaatctctgaggcaat

SEQ ID NO: 68478 - DNA, 25 bp, Saccharomyces pastorianus
aacgagggtagaactattcgataat

SEQ ID NO: 68479 - DNA, 25 bp, Saccharomyces pastorianus
aaatctctgaggcaatgcaggaaaa

SEQ ID NO: 68480 - DNA, 25 bp, Saccharomyces pastorianus
gcggccatatttatctaaagctaca

SEQ ID NO: 68481 - DNA, 25 bp, Saccharomyces pastorianus
ctgataagtattcgagcggccatat

SEQ ID NO: 68482 - DNA, 25 bp, Saccharomyces pastorianus
gaaataaatgcctcaatgcgctatc

SEQ ID NO: 68483 - DNA, 25 bp, Saccharomyces pastorianus
gtttggtttcatgctgataagtatt

SEQ ID NO: 68484 - DNA, 25 bp, Saccharomyces pastorianus
gactgcttaccgctatgcaaatctg

SEQ ID NO: 68485 - DNA, 25 bp, Saccharomyces pastorianus
gtaccgcacgaagtatacatgactg

SEQ ID NO: 68486 - DNA, 25 bp, Saccharomyces pastorianus
aaaacaatcgatgatgtaccgcacg

SEQ ID NO: 68487 - DNA, 25 bp, Saccharomyces pastorianus
accgctatgcaaatctgaatctatt

SEQ ID NO: 68488 - DNA, 25 bp, Saccharomyces pastorianus
attcgagcggccatatttatctaaa

SEQ ID NO: 68489 - DNA, 25 bp, Saccharomyces pastorianus
aaatgcctcaatgcgctatcctaat

SEQ ID NO: 68490 - DNA, 25 bp, Saccharomyces pastorianus
gtatacatgactgcttaccgctatg

SEQ ID NO: 68491 - DNA, 25 bp, Saccharomyces pastorianus
aagcttctccacctttatcgaataa

SEQ ID NO: 68492 - DNA, 25 bp, Saccharomyces pastorianus
aagtgactcccaaaacgtagcgcat

SEQ ID NO: 68493 - DNA, 25 bp, Saccharomyces pastorianus
atcggctacacaaaccattccaatt

SEQ ID NO: 68494 - DNA, 25 bp, Saccharomyces pastorianus
aagactagcagagatccgccaagaa

SEQ ID NO: 68495 - DNA, 25 bp, Saccharomyces pastorianus
aggcgctatcttgcataatggtaat

SEQ ID NO: 68496 - DNA, 25 bp, Saccharomyces pastorianus
gtagagcatttttcacaagacctta

SEQ ID NO: 68497 - DNA, 25 bp, Saccharomyces pastorianus
ggtacaaattcgaagctctgctaat

SEQ ID NO: 68498 - DNA, 25 bp, Saccharomyces pastorianus
ggaatacagctatctcttttgatct

SEQ ID NO: 68499 - DNA, 25 bp, Saccharomyces pastorianus
aagaaattcctttatgtggcccaat

SEQ ID NO: 68500 - DNA, 25 bp, Saccharomyces pastorianus
gaatgtggctgatttaccgaagaaa

SEQ ID NO: 68501 - DNA, 25 bp, Saccharomyces pastorianus
cattccaattgcaccagaaccatta

SEQ ID NO: 68502 - DNA, 25 bp, Saccharomyces pastorianus
tcccacggttcctttactatagatg

SEQ ID NO: 68503 - DNA, 25 bp, Saccharomyces pastorianus
aaccccatggttaatatgcagcctt

SEQ ID NO: 68504 - DNA, 25 bp, Saccharomyces pastorianus
acaacagtttcatgtgccacagcag

SEQ ID NO: 68505 - DNA, 25 bp, Saccharomyces pastorianus
gacagactagccagcttggtccaaa

SEQ ID NO: 68506 - DNA, 25 bp, Saccharomyces pastorianus
ggacaatacggccatacgacagact

SEQ ID NO: 68507 - DNA, 25 bp, Saccharomyces pastorianus
actgccgcgcaaaaaacctctaaat

SEQ ID NO: 68508 - DNA, 25 bp, Saccharomyces pastorianus
tgctacttccggaatgcatgcgtac

SEQ ID NO: 68509 - DNA, 25 bp, Saccharomyces pastorianus
ttccctccatcgcatagtaacagta

SEQ ID NO: 68510 - DNA, 25 bp, Saccharomyces pastorianus
aagttctagcgcgactcctaatata

SEQ ID NO: 68511 - DNA, 25 bp, Saccharomyces pastorianus
ataatgatcctactgtcggtttccc

SEQ ID NO: 68512 - DNA, 25 bp, Saccharomyces pastorianus
gtataccgcccaataacaacaacgt

SEQ ID NO: 68513 - DNA, 25 bp, Saccharomyces pastorianus
aagctaatcgaaatgtgtcggaaag

SEQ ID NO: 68514 - DNA, 25 bp, Saccharomyces pastorianus
aataacgagattacagcgcagcaat

SEQ ID NO: 68515 - DNA, 25 bp, Saccharomyces pastorianus
cgccggtaattacgataagaccaag

SEQ ID NO: 68516 - DNA, 25 bp, Saccharomyces pastorianus
tacgcagttttcaaccttcaaggtc

SEQ ID NO: 68517 - DNA, 25 bp, Saccharomyces pastorianus
gcagttttcaaccttcaaggtcatt

SEQ ID NO: 68518 - DNA, 25 bp, Saccharomyces pastorianus
gcaaccgcaatcagaacctcaacct

SEQ ID NO: 68519 - DNA, 25 bp, Saccharomyces pastorianus
gaccaagaacaggaactttgcagtc

SEQ ID NO: 68520 - DNA, 25 bp, Saccharomyces pastorianus
aggaactttgcagtcgataatacaa

SEQ ID NO: 68521 - DNA, 25 bp, Saccharomyces pastorianus
gattacagcgcagcaatacgcagtt

SEQ ID NO: 68522 - DNA, 25 bp, Saccharomyces pastorianus
taatgatttacattcaccaccacca

SEQ ID NO: 68523 - DNA, 25 bp, Saccharomyces pastorianus
gcagcaatacgcagttttcaacctt

SEQ ID NO: 68524 - DNA, 25 bp, Saccharomyces pastorianus
gtgggccctagattcgtttggacaa

SEQ ID NO: 68525 - DNA, 25 bp, Saccharomyces pastorianus
gcatccacacgtcacgaacggtaga

SEQ ID NO: 68526 - DNA, 25 bp, Saccharomyces pastorianus
taactacgccaatggatgtcgtcaa

SEQ ID NO: 68527 - DNA, 25 bp, Saccharomyces pastorianus
tataatgttgctcctgtaccagatg

SEQ ID NO: 68528 - DNA, 25 bp, Saccharomyces pastorianus
cgtggcactttcgaactctatttta

SEQ ID NO: 68529 - DNA, 25 bp, Saccharomyces pastorianus
aaagcatattcggtgtcgcatccac

SEQ ID NO: 68530 - DNA, 25 bp, Saccharomyces pastorianus
gctactttggctagagacctaccgt

SEQ ID NO: 68531 - DNA, 25 bp, Saccharomyces pastorianus
gagcctacggacagtttaccaatct

SEQ ID NO: 68532 - DNA, 25 bp, Saccharomyces pastorianus
agacctaccgtttagtgcattacag

SEQ ID NO: 68533 - DNA, 25 bp, Saccharomyces pastorianus
gagggagcactaggcttcttcagcg

SEQ ID NO: 68534 - DNA, 25 bp, Saccharomyces pastorianus
gaggagttgtctatctccaacgaaa

SEQ ID NO: 68535 - DNA, 25 bp, Saccharomyces pastorianus
ggcatattaacgacactatcacaca

SEQ ID NO: 68536 - DNA, 25 bp, Saccharomyces pastorianus
ctatcacacacttaagtgcgggatt

SEQ ID NO: 68537 - DNA, 25 bp, Saccharomyces pastorianus
gcgatgcattcactagatacagtca

SEQ ID NO: 68538 - DNA, 25 bp, Saccharomyces pastorianus
ggctgccatgttaggctcgttccca

SEQ ID NO: 68539 - DNA, 25 bp, Saccharomyces pastorianus
ggaccatgatcgaagattggcatat

SEQ ID NO: 68540 - DNA, 25 bp, Saccharomyces pastorianus
attcggagggcggattaagccccat

SEQ ID NO: 68541 - DNA, 25 bp, Saccharomyces pastorianus
gtgcgggatttctgggtgattttat

SEQ ID NO: 68542 - DNA, 25 bp, Saccharomyces pastorianus
taagccccatatggcattgcgtcat

SEQ ID NO: 68543 - DNA, 25 bp, Saccharomyces pastorianus
attatacggtggatacatggctgcc

SEQ ID NO: 68544 - DNA, 25 bp, Saccharomyces pastorianus
aaactagacaacaaggtgcgccgaa

SEQ ID NO: 68545 - DNA, 25 bp, Saccharomyces pastorianus
gcattgcgtcatttctggtgggatt

SEQ ID NO: 68546 - DNA, 25 bp, Saccharomyces pastorianus
atgacgcctatatttgaactgacca

SEQ ID NO: 68547 - DNA, 25 bp, Saccharomyces pastorianus
aacggatttttggatcgtggctcaa

SEQ ID NO: 68548 - DNA, 25 bp, Saccharomyces pastorianus
attaaggctcggtcttatcgaagaa

SEQ ID NO: 68549 - DNA, 25 bp, Saccharomyces pastorianus
gtgtctatgtggtacaatgcgtcat

SEQ ID NO: 68550 - DNA, 25 bp, Saccharomyces pastorianus
gtgacaacgcttccaactattttat

SEQ ID NO: 68551 - DNA, 25 bp, Saccharomyces pastorianus
ggacgtcgttattgcatctgaacca

SEQ ID NO: 68552 - DNA, 25 bp, Saccharomyces pastorianus
gaggcagtgccattacctatgacgc

SEQ ID NO: 68553 - DNA, 25 bp, Saccharomyces pastorianus
aagaactcacatgcaaaccgccatt

SEQ ID NO: 68554 - DNA, 25 bp, Saccharomyces pastorianus
gctgttggtgacgaggtgctactct

SEQ ID NO: 68555 - DNA, 25 bp, Saccharomyces pastorianus
aggtgctactcttcaacggtgttat

SEQ ID NO: 68556 - DNA, 25 bp, Saccharomyces pastorianus
caaaatgcgggttcttgtttctaag

SEQ ID NO: 68557 - DNA, 25 bp, Saccharomyces pastorianus
atatcgggagatcttcttaggcaat

SEQ ID NO: 68558 - DNA, 25 bp, Saccharomyces pastorianus
gcaccttacctctctgctaggatag

SEQ ID NO: 68559 - DNA, 25 bp, Saccharomyces pastorianus
gaacaattccggtgtctcacaagat

SEQ ID NO: 68560 - DNA, 25 bp, Saccharomyces pastorianus
atttggatctaccactaatcctcca

SEQ ID NO: 68561 - DNA, 25 bp, Saccharomyces pastorianus
tagtgctgtttggaactgctcgttt

SEQ ID NO: 68562 - DNA, 25 bp, Saccharomyces pastorianus
taatcctccatttctgaccaagtac

SEQ ID NO: 68563 - DNA, 25 bp, Saccharomyces pastorianus
gttttcatccaagttatctgcgttt

SEQ ID NO: 68564 - DNA, 25 bp, Saccharomyces pastorianus
tacactagccgagttttcatccaag

SEQ ID NO: 68565 - DNA, 25 bp, Saccharomyces pastorianus
aggatagccctagttctcaggagat

SEQ ID NO: 68566 - DNA, 25 bp, Saccharomyces pastorianus
aagattcggccctagcgaacaaaca

SEQ ID NO: 68567 - DNA, 25 bp, Saccharomyces pastorianus
tgaatacttgattgggcgtgcaccc

SEQ ID NO: 68568 - DNA, 25 bp, Saccharomyces pastorianus
gggtcttgaataatcctggtgaaac

SEQ ID NO: 68569 - DNA, 25 bp, Saccharomyces pastorianus
atggcccatctgctgattttaaaga

SEQ ID NO: 68570 - DNA, 25 bp, Saccharomyces pastorianus
cattaggtcccgtttttgattcaga

SEQ ID NO: 68571 - DNA, 25 bp, Saccharomyces pastorianus
ggtgaactagcgacttacaactgta

SEQ ID NO: 68572 - DNA, 25 bp, Saccharomyces pastorianus
cagagctttggtatcgttatcggta

SEQ ID NO: 68573 - DNA, 25 bp, Saccharomyces pastorianus
ggaaatacactttcttaacctggca

SEQ ID NO: 68574 - DNA, 25 bp, Saccharomyces pastorianus
tccaccacctccagtactaagtaaa

SEQ ID NO: 68575 - DNA, 25 bp, Saccharomyces pastorianus
gaaatatccgggtcaagggtcttga

SEQ ID NO: 68576 - DNA, 25 bp, Saccharomyces pastorianus
gaaacaatttcttctccaacgacaa

SEQ ID NO: 68577 - DNA, 25 bp, Saccharomyces pastorianus
cgtactacatatatggcccatctgc

SEQ ID NO: 68578 - DNA, 25 bp, Saccharomyces pastorianus
ggcaattgcaccctagaaacatcag

SEQ ID NO: 68579 - DNA, 25 bp, Saccharomyces pastorianus
gtttcagtcccgatacgttagattt

SEQ ID NO: 68580 - DNA, 25 bp, Saccharomyces pastorianus
ggacatagacgattcatctttgttt

SEQ ID NO: 68581 - DNA, 25 bp, Saccharomyces pastorianus
tatttctttctcttccattagtcaa

SEQ ID NO: 68582 - DNA, 25 bp, Saccharomyces pastorianus
actatcttagagtccgtttcagtcc

SEQ ID NO: 68583 - DNA, 25 bp, Saccharomyces pastorianus
gtcgaagacacaaacctatccatga

SEQ ID NO: 68584 - DNA, 25 bp, Saccharomyces pastorianus
caacattatcaattcacccttcgag

SEQ ID NO: 68585 - DNA, 25 bp, Saccharomyces pastorianus
atctgatattcttttccaactgcta

SEQ ID NO: 68586 - DNA, 25 bp, Saccharomyces pastorianus
gtcaattctggctagttggagacta

SEQ ID NO: 68587 - DNA, 25 bp, Saccharomyces pastorianus
atacgtcgcataattgggagcttta

SEQ ID NO: 68588 - DNA, 25 bp, Saccharomyces pastorianus
aatcattacgtctgatacgtcgcat

SEQ ID NO: 68589 - DNA, 25 bp, Saccharomyces pastorianus
aacgagttcggtgagttgctgatga

SEQ ID NO: 68590 - DNA, 25 bp, Saccharomyces pastorianus
tggccaccatgatctccgacataga

SEQ ID NO: 68591 - DNA, 25 bp, Saccharomyces pastorianus
gacatagacaccactctagcagatg

SEQ ID NO: 68592 - DNA, 25 bp, Saccharomyces pastorianus
ggatagacaccacgacactttcgat

SEQ ID NO: 68593 - DNA, 25 bp, Saccharomyces pastorianus
atggaactcaaatcaagcaggcctt

SEQ ID NO: 68594 - DNA, 25 bp, Saccharomyces pastorianus
gcttactaccgcataaccatgagag

SEQ ID NO: 68595 - DNA, 25 bp, Saccharomyces pastorianus
ggacactactatataacccgatgaa

SEQ ID NO: 68596 - DNA, 25 bp, Saccharomyces pastorianus
gagaactcacagtcgccttgattat

SEQ ID NO: 68597 - DNA, 25 bp, Saccharomyces pastorianus
tttacttaagtccagcagtgcagtt

SEQ ID NO: 68598 - DNA, 25 bp, Saccharomyces pastorianus
tgaaagttcttcgtgcttactaccg

SEQ ID NO: 68599 - DNA, 25 bp, Saccharomyces pastorianus
gttcacactaacgactacctcaata

SEQ ID NO: 68600 - DNA, 25 bp, Saccharomyces pastorianus
ttatcctgggtgtgtggcttctgca

SEQ ID NO: 68601 - DNA, 25 bp, Saccharomyces pastorianus
tgagggaaataggacgccctttgca

SEQ ID NO: 68602 - DNA, 25 bp, Saccharomyces pastorianus
gacgacagcgaggagttcgtacctt

SEQ ID NO: 68603 - DNA, 25 bp, Saccharomyces pastorianus
gaggttcattcatcggcgaatccac

SEQ ID NO: 68604 - DNA, 25 bp, Saccharomyces pastorianus
gcgaatccaccgatacttcaatttt

SEQ ID NO: 68605 - DNA, 25 bp, Saccharomyces pastorianus
atatcctagcgaaacatatgttctt

SEQ ID NO: 68606 - DNA, 25 bp, Saccharomyces pastorianus
gccctttgcagatccacagatgaga

SEQ ID NO: 68607 - DNA, 25 bp, Saccharomyces pastorianus
agattgctgtctttgatttcactgg

SEQ ID NO: 68608 - DNA, 25 bp, Saccharomyces pastorianus
atctgatgggtgtaacgggtgctta

SEQ ID NO: 68609 - DNA, 25 bp, Saccharomyces pastorianus
aagagtatctggtagccaagcaaag

SEQ ID NO: 68610 - DNA, 25 bp, Saccharomyces pastorianus
gatacttttcagtgtcaaaactcag

SEQ ID NO: 68611 - DNA, 25 bp, Saccharomyces pastorianus
gttcgtaccttttagtgcataccta

SEQ ID NO: 68612 - DNA, 25 bp, Saccharomyces pastorianus
atggcgatagcatggctttcacctt

SEQ ID NO: 68613 - DNA, 25 bp, Saccharomyces pastorianus
ggtctcgtccaaatctgctatagta

SEQ ID NO: 68614 - DNA, 25 bp, Saccharomyces pastorianus
acggcatgacgaacggtgtcaccat

SEQ ID NO: 68615 - DNA, 25 bp, Saccharomyces pastorianus
ggcatcgtacgcaagttgttggtta

SEQ ID NO: 68616 - DNA, 25 bp, Saccharomyces pastorianus
tatccaaccatcaagcttggtctcg

SEQ ID NO: 68617 - DNA, 25 bp, Saccharomyces pastorianus
gctttcacctttgataacgaccact

SEQ ID NO: 68618 - DNA, 25 bp, Saccharomyces pastorianus
ggtgaacttagcactcacggcttaa

SEQ ID NO: 68619 - DNA, 25 bp, Saccharomyces pastorianus
gaccacttgaccctcgaaaatgatc

SEQ ID NO: 68620 - DNA, 25 bp, Saccharomyces pastorianus
ttacgatcatcaactggcaagactt

SEQ ID NO: 68621 - DNA, 25 bp, Saccharomyces pastorianus
gtatcatgtcttgggcatcgtacgc

SEQ ID NO: 68622 - DNA, 25 bp, Saccharomyces pastorianus
tctccgtcagattacttcctggtag

SEQ ID NO: 68623 - DNA, 25 bp, Saccharomyces pastorianus
atctctgcattacttatttcactgg

SEQ ID NO: 68624 - DNA, 25 bp, Saccharomyces pastorianus
tttcactggtgggacaagctttcat

SEQ ID NO: 68625 - DNA, 25 bp, Saccharomyces pastorianus
tccagcattccagcaattttttcca

SEQ ID NO: 68626 - DNA, 25 bp, Saccharomyces pastorianus
tttttccacctacattgatccagag

SEQ ID NO: 68627 - DNA, 25 bp, Saccharomyces pastorianus
gtggcgggaagttattttgctccaa

SEQ ID NO: 68628 - DNA, 25 bp, Saccharomyces pastorianus
agcatttatggtcgcgtctatatta

SEQ ID NO: 68629 - DNA, 25 bp, Saccharomyces pastorianus
atatctttttgacgtccagcattcc

SEQ ID NO: 68630 - DNA, 25 bp, Saccharomyces pastorianus
cacccattgtgttagctgctcttta

SEQ ID NO: 68631 - DNA, 25 bp, Saccharomyces pastorianus
ccgcccacgaactctggtatatttt

SEQ ID NO: 68632 - DNA, 25 bp, Saccharomyces pastorianus
aaactaggacttccaatcgcggttg

SEQ ID NO: 68633 - DNA, 25 bp, Saccharomyces pastorianus
gttgatgcctttaattggagccata

SEQ ID NO: 68634 - DNA, 25 bp, Saccharomyces pastorianus
ggtactacaataggctcgaacagtg

SEQ ID NO: 68635 - DNA, 25 bp, Saccharomyces pastorianus
tgtcccgtattcgaagaacgtcttt

SEQ ID NO: 68636 - DNA, 25 bp, Saccharomyces pastorianus
gcatcactgacgttatgcgtttcat

SEQ ID NO: 68637 - DNA, 25 bp, Saccharomyces pastorianus
gcgtttcatgtgttatacttctaag

SEQ ID NO: 68638 - DNA, 25 bp, Saccharomyces pastorianus
aagcaactgtacatttcgggtccga

SEQ ID NO: 68639 - DNA, 25 bp, Saccharomyces pastorianus
gatttaatccaattactcccgattg

SEQ ID NO: 68640 - DNA, 25 bp, Saccharomyces pastorianus
atatcacccgtacctaatttgtgca

SEQ ID NO: 68641 - DNA, 25 bp, Saccharomyces pastorianus
tatcctttcaggactgcatcactga

SEQ ID NO: 68642 - DNA, 25 bp, Saccharomyces pastorianus
ggaatttctgttatcctttcaggac

SEQ ID NO: 68643 - DNA, 25 bp, Saccharomyces pastorianus
aagctcagacgtcttttctattata

SEQ ID NO: 68644 - DNA, 25 bp, Saccharomyces pastorianus
ataggttgaaaagctgtcccgtatt

SEQ ID NO: 68645 - DNA, 25 bp, Saccharomyces pastorianus
gtatttccctcttacaaacggcaat

SEQ ID NO: 68646 - DNA, 25 bp, Saccharomyces pastorianus
gccatccagatttcacaagaccatt

SEQ ID NO: 68647 - DNA, 25 bp, Saccharomyces pastorianus
taccttcacacgtacctcaaatttt

SEQ ID NO: 68648 - DNA, 25 bp, Saccharomyces pastorianus
acctgttagggttctgcgatgatgt

SEQ ID NO: 68649 - DNA, 25 bp, Saccharomyces pastorianus
agtggctccagtctctgaaatcgta

SEQ ID NO: 68650 - DNA, 25 bp, Saccharomyces pastorianus
gatgtagccagtctagtagccaaga

SEQ ID NO: 68651 - DNA, 25 bp, Saccharomyces pastorianus
aatctagaattaccactgtgtccgt

SEQ ID NO: 68652 - DNA, 25 bp, Saccharomyces pastorianus
ctgtgtccgtactgctaccagaaga

SEQ ID NO: 68653 - DNA, 25 bp, Saccharomyces pastorianus
tgacattctttggtgaagccctgcc

SEQ ID NO: 68654 - DNA, 25 bp, Saccharomyces pastorianus
gtgcaatgccatggttcatttgcca

SEQ ID NO: 68655 - DNA, 25 bp, Saccharomyces pastorianus
acttggaatcgtacgcaggcattga

SEQ ID NO: 68656 - DNA, 25 bp, Saccharomyces pastorianus
gattctgttgacgtttccattaagg

SEQ ID NO: 68657 - DNA, 25 bp, Saccharomyces pastorianus
tcatgacttctgctgctgattcgga

SEQ ID NO: 68658 - DNA, 25 bp, Saccharomyces pastorianus
gatgcttctttcttgtgatattccc

SEQ ID NO: 68659 - DNA, 25 bp, Saccharomyces pastorianus
gatattcccaagtcggtcgttgatc

SEQ ID NO: 68660 - DNA, 25 bp, Saccharomyces pastorianus
gatctgtctactttggtctattcat

SEQ ID NO: 68661 - DNA, 25 bp, Saccharomyces pastorianus
taattttcaagggtatcggcggcaa

SEQ ID NO: 68662 - DNA, 25 bp, Saccharomyces pastorianus
ggctgtctgacgttgctgtaatttt

SEQ ID NO: 68663 - DNA, 25 bp, Saccharomyces pastorianus
ggtcgttgatcacaccaatggttct

SEQ ID NO: 68664 - DNA, 25 bp, Saccharomyces pastorianus
gatcatactcgatcgggctgtctga

SEQ ID NO: 68665 - DNA, 25 bp, Saccharomyces pastorianus
aggattctcctgttgatttgttcat

SEQ ID NO: 68666 - DNA, 25 bp, Saccharomyces pastorianus
agaacgaggctccattcatgacttc

SEQ ID NO: 68667 - DNA, 25 bp, Saccharomyces pastorianus
gaatccccaatattccaccaaatat

SEQ ID NO: 68668 - DNA, 25 bp, Saccharomyces pastorianus
aagattgcagcaacagcaggcccaa

SEQ ID NO: 68669 - DNA, 25 bp, Saccharomyces pastorianus
gaacaacgtagcttattgcaggaag

SEQ ID NO: 68670 - DNA, 25 bp, Saccharomyces pastorianus
aacggcatcccgcaaaatggcaata

SEQ ID NO: 68671 - DNA, 25 bp, Saccharomyces pastorianus
ggaggtctacaagattcatcagcaa

SEQ ID NO: 68672 - DNA, 25 bp, Saccharomyces pastorianus
tcagcagcggaaacgccaacggcat

SEQ ID NO: 68673 - DNA, 25 bp, Saccharomyces pastorianus
aagcccaggcccaagcgaatagtaa

SEQ ID NO: 68674 - DNA, 25 bp, Saccharomyces pastorianus
agcagatgcaggctcctaacacaaa

SEQ ID NO: 68675 - DNA, 25 bp, Saccharomyces pastorianus
tgcgctggcccaacaaaagctattg

SEQ ID NO: 68676 - DNA, 25 bp, Saccharomyces pastorianus
aacacttggcagcaagtcactgcgc

SEQ ID NO: 68677 - DNA, 25 bp, Saccharomyces pastorianus
gatgaaagtggctcccattcctaaa

SEQ ID NO: 68678 - DNA, 25 bp, Saccharomyces pastorianus
tactgcctcacctgaagactaacaa

SEQ ID NO: 68679 - DNA, 25 bp, Saccharomyces pastorianus
gatgatcctgtctttactactgcaa

SEQ ID NO: 68680 - DNA, 25 bp, Saccharomyces pastorianus
tactcccactggactattccatgtt

SEQ ID NO: 68681 - DNA, 25 bp, Saccharomyces pastorianus
taacccgttgcctttcatcaaaact

SEQ ID NO: 68682 - DNA, 25 bp, Saccharomyces pastorianus
aaaggatgtcgataccgaactctta

SEQ ID NO: 68683 - DNA, 25 bp, Saccharomyces pastorianus
gaatcgctcactcctggcgggaatg

SEQ ID NO: 68684 - DNA, 25 bp, Saccharomyces pastorianus
agaggtgagcaattccagctgatca

SEQ ID NO: 68685 - DNA, 25 bp, Saccharomyces pastorianus
ggtcctgcccactattgcaaaatat

SEQ ID NO: 68686 - DNA, 25 bp, Saccharomyces pastorianus
tactctttatacactaacccgttgc

SEQ ID NO: 68687 - DNA, 25 bp, Saccharomyces pastorianus
gatcaaattagtactgcctcacctg

SEQ ID NO: 68688 - DNA, 25 bp, Saccharomyces pastorianus
tattccatgttaggcgaggtcctgc

SEQ ID NO: 68689 - DNA, 25 bp, Saccharomyces pastorianus
gaccgaacatcgtcttgtatggcga

SEQ ID NO: 68690 - DNA, 25 bp, Saccharomyces pastorianus
agatcccggacttcttcaagacgca

SEQ ID NO: 68691 - DNA, 25 bp, Saccharomyces pastorianus
tgtatggcgagaaccacccgtcggg

SEQ ID NO: 68692 - DNA, 25 bp, Saccharomyces pastorianus
gaaggctcaaaaggacccgatcaac

SEQ ID NO: 68693 - DNA, 25 bp, Saccharomyces pastorianus
taagcaggacaatccacgaccgtgg

SEQ ID NO: 68694 - DNA, 25 bp, Saccharomyces pastorianus
aatccggacctcttgatcattatgg

SEQ ID NO: 68695 - DNA, 25 bp, Saccharomyces pastorianus
agattcattcggactgcgaccggtg

SEQ ID NO: 68696 - DNA, 25 bp, Saccharomyces pastorianus
gtcgatggcgtgaaacaactggtta

SEQ ID NO: 68697 - DNA, 25 bp, Saccharomyces pastorianus
gagctgatcacgcagggcctgaacc

SEQ ID NO: 68698 - DNA, 25 bp, Saccharomyces pastorianus
aggaaactactgtctccggagaact

SEQ ID NO: 68699 - DNA, 25 bp, Saccharomyces pastorianus
ggcatcatcgactaccagattcatt

SEQ ID NO: 68700 - DNA, 25 bp, Saccharomyces pastorianus
tctgtttctctttctgaaccggtat

SEQ ID NO: 68701 - DNA, 25 bp, Saccharomyces pastorianus
gaacgcgtatcaatttaggccccaa

SEQ ID NO: 68702 - DNA, 25 bp, Saccharomyces pastorianus
gtagggaccttgtgtgacgatgctc

SEQ ID NO: 68703 - DNA, 25 bp, Saccharomyces pastorianus
gctcgataacggatcagtctgccag

SEQ ID NO: 68704 - DNA, 25 bp, Saccharomyces pastorianus
ggtggccgtccaaaatctaattcct

SEQ ID NO: 68705 - DNA, 25 bp, Saccharomyces pastorianus
cggcttcttattttccttcaaacag

SEQ ID NO: 68706 - DNA, 25 bp, Saccharomyces pastorianus
gacgatgctccgaacttttctggct

SEQ ID NO: 68707 - DNA, 25 bp, Saccharomyces pastorianus
aagaagcacgtcgtgtctctgtttc

SEQ ID NO: 68708 - DNA, 25 bp, Saccharomyces pastorianus
gcactactatgaactctcttactga

SEQ ID NO: 68709 - DNA, 25 bp, Saccharomyces pastorianus
tacagcatctacgttcgccaactta

SEQ ID NO: 68710 - DNA, 25 bp, Saccharomyces pastorianus
atctaattcctccatctttaccaag

SEQ ID NO: 68711 - DNA, 25 bp, Saccharomyces pastorianus
taaacttctggtacgcactatgcac

SEQ ID NO: 68712 - DNA, 25 bp, Saccharomyces pastorianus
gatttccggccgtttatttaatgcg

SEQ ID NO: 68713 - DNA, 25 bp, Saccharomyces pastorianus
tgttgaccgacgagttctggaccaa

SEQ ID NO: 68714 - DNA, 25 bp, Saccharomyces pastorianus
agcataaccgttcccttagacaaag

SEQ ID NO: 68715 - DNA, 25 bp, Saccharomyces pastorianus
agagaggcgtctcttccacaggagc

SEQ ID NO: 68716 - DNA, 25 bp, Saccharomyces pastorianus
agacaggaactagatccgctgccga

SEQ ID NO: 68717 - DNA, 25 bp, Saccharomyces pastorianus
atgggatatgcctgtccaacgatat

SEQ ID NO: 68718 - DNA, 25 bp, Saccharomyces pastorianus
acaccacgcgcctttgaacagagag

SEQ ID NO: 68719 - DNA, 25 bp, Saccharomyces pastorianus
accaatccgagttttccactatgtt

SEQ ID NO: 68720 - DNA, 25 bp, Saccharomyces pastorianus
aagacttgtcgatgggcacggcgat

SEQ ID NO: 68721 - DNA, 25 bp, Saccharomyces pastorianus
gaccactgtaccttcacagggtgat

SEQ ID NO: 68722 - DNA, 25 bp, Saccharomyces pastorianus
actgactgcacgatatcatggcggc

SEQ ID NO: 68723 - DNA, 25 bp, Saccharomyces pastorianus
aaatggcttcttcacggacggagtc

SEQ ID NO: 68724 - DNA, 25 bp, Saccharomyces pastorianus
tcttggttcatattcggtctcttta

SEQ ID NO: 68725 - DNA, 25 bp, Saccharomyces pastorianus
gacagcccatgcgaatacgagtact

SEQ ID NO: 68726 - DNA, 25 bp, Saccharomyces pastorianus
gtgagcaccattctttcgacaaggg

SEQ ID NO: 68727 - DNA, 25 bp, Saccharomyces pastorianus
gaaacggtctccatttttcaaagcg

SEQ ID NO: 68728 - DNA, 25 bp, Saccharomyces pastorianus
ttcggtctctttatagcttgcttac

SEQ ID NO: 68729 - DNA, 25 bp, Saccharomyces pastorianus
gcttgcttactgctttctattacat

SEQ ID NO: 68730 - DNA, 25 bp, Saccharomyces pastorianus
atgggtttgtattcgcaagtcctcg

SEQ ID NO: 68731 - DNA, 25 bp, Saccharomyces pastorianus
tttgcatggcgttttcttggttcat

SEQ ID NO: 68732 - DNA, 25 bp, Saccharomyces pastorianus
gaatcagaagcacctctagccaata

SEQ ID NO: 68733 - DNA, 25 bp, Saccharomyces pastorianus
gatcgatgtttggaatatgccccaa

SEQ ID NO: 68734 - DNA, 25 bp, Saccharomyces pastorianus
cagtgaattcatccccattattagt

SEQ ID NO: 68735 - DNA, 25 bp, Saccharomyces pastorianus
agaacaggcgtttttgtcacgctag

SEQ ID NO: 68736 - DNA, 25 bp, Saccharomyces pastorianus
gataagaacagtgatctccgccttg

SEQ ID NO: 68737 - DNA, 25 bp, Saccharomyces pastorianus
gctaagcattctttcgtcgacaaca

SEQ ID NO: 68738 - DNA, 25 bp, Saccharomyces pastorianus
atgatggtaacactactgccaccac

SEQ ID NO: 68739 - DNA, 25 bp, Saccharomyces pastorianus
ttaaccctcaaaaattcgtcgcaag

SEQ ID NO: 68740 - DNA, 25 bp, Saccharomyces pastorianus
gatctccgccttgacacagtgaatt

SEQ ID NO: 68741 - DNA, 25 bp, Saccharomyces pastorianus
attattagttcattgctcagccgga

SEQ ID NO: 68742 - DNA, 25 bp, Saccharomyces pastorianus
gttggattcttgtggcgtggatata

SEQ ID NO: 68743 - DNA, 25 bp, Saccharomyces pastorianus
gtcacgctagatttcttgctaagca

SEQ ID NO: 68744 - DNA, 25 bp, Saccharomyces pastorianus
atttggacgaccctagcatacgacg

SEQ ID NO: 68745 - DNA, 25 bp, Saccharomyces pastorianus
atgacctcccctgttatatcagaaa

SEQ ID NO: 68746 - DNA, 25 bp, Saccharomyces pastorianus
ctcaaatgcccgcatatagaggtga

SEQ ID NO: 68747 - DNA, 25 bp, Saccharomyces pastorianus
tgtccaacctttctcaaaactcggt

SEQ ID NO: 68748 - DNA, 25 bp, Saccharomyces pastorianus
gacgaccctagcatacgacgtaaca

SEQ ID NO: 68749 - DNA, 25 bp, Saccharomyces pastorianus
gtgcacagatttggacgaccctagc

SEQ ID NO: 68750 - DNA, 25 bp, Saccharomyces pastorianus
aaactcggtcaaaccgtgcacagat

SEQ ID NO: 68751 - DNA, 25 bp, Saccharomyces pastorianus
gtgaaactataaacttgtccaacct

SEQ ID NO: 68752 - DNA, 25 bp, Saccharomyces pastorianus
gaacaagcaagaacgcctgctcaaa

SEQ ID NO: 68753 - DNA, 25 bp, Saccharomyces pastorianus
gcctgctcaaatgcccgcatataga

SEQ ID NO: 68754 - DNA, 25 bp, Saccharomyces pastorianus
aaccatttacaggtcgaacaagcaa

SEQ ID NO: 68755 - DNA, 25 bp, Saccharomyces pastorianus
aagtctttcgaatcgctgaagcgac

SEQ ID NO: 68756 - DNA, 25 bp, Saccharomyces pastorianus
agtttcagatcttgggctcgcggta

SEQ ID NO: 68757 - DNA, 25 bp, Saccharomyces pastorianus
tgcacgggacctctgatgataatgt

SEQ ID NO: 68758 - DNA, 25 bp, Saccharomyces pastorianus
aagcgactctttgttatgcacggga

SEQ ID NO: 68759 - DNA, 25 bp, Saccharomyces pastorianus
gacatgcatatttttcccgattcag

SEQ ID NO: 68760 - DNA, 25 bp, Saccharomyces pastorianus
gtatgactccatctacaccgaaagg

SEQ ID NO: 68761 - DNA, 25 bp, Saccharomyces pastorianus
aatacacaatggctgttgcaccagt

SEQ ID NO: 68762 - DNA, 25 bp, Saccharomyces pastorianus
tcgtacggtggctttgttagtttga

SEQ ID NO: 68763 - DNA, 25 bp, Saccharomyces pastorianus
gtctgttgcttcaggattggatgca

SEQ ID NO: 68764 - DNA, 25 bp, Saccharomyces pastorianus
tatcagacaccacaacgctcaaaag

SEQ ID NO: 68765 - DNA, 25 bp, Saccharomyces pastorianus
gggattggccaattatgacatgcat

SEQ ID NO: 68766 - DNA, 25 bp, Saccharomyces pastorianus
gtaaagcatatgacagaccctgata

SEQ ID NO: 68767 - DNA, 25 bp, Saccharomyces pastorianus
gaggcccaattaactagaacggatg

SEQ ID NO: 68768 - DNA, 25 bp, Saccharomyces pastorianus
gaaaggtccctcgaagatttattga

SEQ ID NO: 68769 - DNA, 25 bp, Saccharomyces pastorianus
gagcataacctacaaaatccgaata

SEQ ID NO: 68770 - DNA, 25 bp, Saccharomyces pastorianus
atccatgcctaaaaagccgcttatc

SEQ ID NO: 68771 - DNA, 25 bp, Saccharomyces pastorianus
aaagccgcttatctctacacgaaaa

SEQ ID NO: 68772 - DNA, 25 bp, Saccharomyces pastorianus
ttactttgtcggaaccattggcgga

SEQ ID NO: 68773 - DNA, 25 bp, Saccharomyces pastorianus
gtttcagatgcacaaacttctggta

SEQ ID NO: 68774 - DNA, 25 bp, Saccharomyces pastorianus
gcggatttgttaggagaggcccaat

SEQ ID NO: 68775 - DNA, 25 bp, Saccharomyces pastorianus
aaacaagcgattgttccgaagcaat

SEQ ID NO: 68776 - DNA, 25 bp, Saccharomyces pastorianus
tgctactttggcaatgaaactcacc

SEQ ID NO: 68777 - DNA, 25 bp, Saccharomyces pastorianus
gattatgttcatcgcatcttgcacg

SEQ ID NO: 68778 - DNA, 25 bp, Saccharomyces pastorianus
tcttttaccatctctgaacagtgct

SEQ ID NO: 68779 - DNA, 25 bp, Saccharomyces pastorianus
gatcagccaagaaatctctctggga

SEQ ID NO: 68780 - DNA, 25 bp, Saccharomyces pastorianus
ggttgatcgattagttcctgtttat

SEQ ID NO: 68781 - DNA, 25 bp, Saccharomyces pastorianus
atggctcggcgcactatgtatagat

SEQ ID NO: 68782 - DNA, 25 bp, Saccharomyces pastorianus
tactggttccagctttctatgataa

SEQ ID NO: 68783 - DNA, 25 bp, Saccharomyces pastorianus
gaatgctgacttgcttcttttacca

SEQ ID NO: 68784 - DNA, 25 bp, Saccharomyces pastorianus
acaatttttaaatggctcggcgcac

SEQ ID NO: 68785 - DNA, 25 bp, Saccharomyces pastorianus
ggtatcaggatacggccgtccatta

SEQ ID NO: 68786 - DNA, 25 bp, Saccharomyces pastorianus
aaaaggccagcacgattatgttcat

SEQ ID NO: 68787 - DNA, 25 bp, Saccharomyces pastorianus
gccgtccattaacccaagcagaaat

SEQ ID NO: 68788 - DNA, 25 bp, Saccharomyces pastorianus
tcagctctcacaaaaatcgtctcat

SEQ ID NO: 68789 - DNA, 25 bp, Saccharomyces pastorianus
gaaaaagtcagctctcacaaaaatc

SEQ ID NO: 68790 - DNA, 25 bp, Saccharomyces pastorianus
ctcacaaaaatcgtctcataccgga

SEQ ID NO: 68791 - DNA, 25 bp, Saccharomyces pastorianus
cgaaaaagtcagctctcacaaaaat

SEQ ID NO: 68792 - DNA, 25 bp, Saccharomyces pastorianus
aagtcagctctcacaaaaatcgtct

SEQ ID NO: 68793 - DNA, 25 bp, Saccharomyces pastorianus
gcgaaaaagtcagctctcacaaaaa

SEQ ID NO: 68794 - DNA, 25 bp, Saccharomyces pastorianus
ggcgaaaaagtcagctctcacaaaa

SEQ ID NO: 68795 - DNA, 25 bp, Saccharomyces pastorianus
tctcacaaaaatcgtctcataccgg

SEQ ID NO: 68796 - DNA, 25 bp, Saccharomyces pastorianus
aaaagtcagctctcacaaaaatcgt

SEQ ID NO: 68797 - DNA, 25 bp, Saccharomyces pastorianus
tcacaaaaatcgtctcataccggaa

SEQ ID NO: 68798 - DNA, 25 bp, Saccharomyces pastorianus
gtcagctctcacaaaaatcgtctca

SEQ ID NO: 68799 - DNA, 25 bp, Saccharomyces pastorianus
gtaataaccgctaaggacgattcca

SEQ ID NO: 68800 - DNA, 25 bp, Saccharomyces pastorianus
gtaagcaaccttcgttcaaagtcca

SEQ ID NO: 68801 - DNA, 25 bp, Saccharomyces pastorianus
gaccttgtgatcgatatacttccag

SEQ ID NO: 68802 - DNA, 25 bp, Saccharomyces pastorianus
agaagtgtttctggcggcacgagca

SEQ ID NO: 68803 - DNA, 25 bp, Saccharomyces pastorianus
aaaagttacctcaccggcacctatg

SEQ ID NO: 68804 - DNA, 25 bp, Saccharomyces pastorianus
gttgactgttggtagctcacgtgac

SEQ ID NO: 68805 - DNA, 25 bp, Saccharomyces pastorianus
atagcatgcttgattcctctactgc

SEQ ID NO: 68806 - DNA, 25 bp, Saccharomyces pastorianus
tttcacgaacgtggctagcaacgaa

SEQ ID NO: 68807 - DNA, 25 bp, Saccharomyces pastorianus
tatacttccagacagttgtgcaggg

SEQ ID NO: 68808 - DNA, 25 bp, Saccharomyces pastorianus
actgccgatgcattttccaagatga

SEQ ID NO: 68809 - DNA, 25 bp, Saccharomyces pastorianus
gtagcgtatttcatagaccttgtga

SEQ ID NO: 68810 - DNA, 25 bp, Saccharomyces pastorianus
tatcgtatcggaacacatcgggcgt

SEQ ID NO: 68811 - DNA, 25 bp, Saccharomyces pastorianus
tgtgcatttgccaagattcgctcgc

SEQ ID NO: 68812 - DNA, 25 bp, Saccharomyces pastorianus
gcgggcgtcccgaaattagagtatg

SEQ ID NO: 68813 - DNA, 25 bp, Saccharomyces pastorianus
gattcgctcgcctgctagaaaaata

SEQ ID NO: 68814 - DNA, 25 bp, Saccharomyces pastorianus
ccagctggccgtttgactttcaaaa

SEQ ID NO: 68815 - DNA, 25 bp, Saccharomyces pastorianus
agggctcaccttagaaatcttctca

SEQ ID NO: 68816 - DNA, 25 bp, Saccharomyces pastorianus
aaggctttgtgctgtcatatttcga

SEQ ID NO: 68817 - DNA, 25 bp, Saccharomyces pastorianus
gaatttcttgtatcattgtcccatg

SEQ ID NO: 68818 - DNA, 25 bp, Saccharomyces pastorianus
atatttcgaagcacgatctgcctcc

SEQ ID NO: 68819 - DNA, 25 bp, Saccharomyces pastorianus
aaatattctccattggacccagctg

SEQ ID NO: 68820 - DNA, 25 bp, Saccharomyces pastorianus
tctgcctcctgctcaagtagtatat

SEQ ID NO: 68821 - DNA, 25 bp, Saccharomyces pastorianus
tcattgctaccataccgacagatac

SEQ ID NO: 68822 - DNA, 25 bp, Saccharomyces pastorianus
ctctttgaaatcagcttcgtccttg

SEQ ID NO: 68823 - DNA, 25 bp, Saccharomyces pastorianus
gtggtcatcatcacctaacgaagat

SEQ ID NO: 68824 - DNA, 25 bp, Saccharomyces pastorianus
ttcgtccttggcctgttattactac

SEQ ID NO: 68825 - DNA, 25 bp, Saccharomyces pastorianus
gacccggcggttggcgacaataata

SEQ ID NO: 68826 - DNA, 25 bp, Saccharomyces pastorianus
aagattcatctgtgctggtcaccag

SEQ ID NO: 68827 - DNA, 25 bp, Saccharomyces pastorianus
tacagccggctttggacatcattgc

SEQ ID NO: 68828 - DNA, 25 bp, Saccharomyces pastorianus
atcggaatctggtttcctacagccg

SEQ ID NO: 68829 - DNA, 25 bp, Saccharomyces pastorianus
ggtcaccagccatctatatatttta

SEQ ID NO: 68830 - DNA, 25 bp, Saccharomyces pastorianus
gggataccgctattggatactaatg

SEQ ID NO: 68831 - DNA, 25 bp, Saccharomyces pastorianus
agagttcgtgatatgacccggcggt

SEQ ID NO: 68832 - DNA, 25 bp, Saccharomyces pastorianus
gaagacctggttgccacagttgata

SEQ ID NO: 68833 - DNA, 25 bp, Saccharomyces pastorianus
ggttgtttcctcgatggacgctgct

SEQ ID NO: 68834 - DNA, 25 bp, Saccharomyces pastorianus
tccgccatttcacctacagagatga

SEQ ID NO: 68835 - DNA, 25 bp, Saccharomyces pastorianus
attttgagccagttttctccagcta

SEQ ID NO: 68836 - DNA, 25 bp, Saccharomyces pastorianus
tgaggagcccctatggatattaaat

SEQ ID NO: 68837 - DNA, 25 bp, Saccharomyces pastorianus
tcaaagtttgggatctccgtgcggt

SEQ ID NO: 68838 - DNA, 25 bp, Saccharomyces pastorianus
gtctctagaatcgaattttccgcca

SEQ ID NO: 68839 - DNA, 25 bp, Saccharomyces pastorianus
aaatcatgttgctttgccgtatcgc

SEQ ID NO: 68840 - DNA, 25 bp, Saccharomyces pastorianus
gacgctgctgttggtccgaattcca

SEQ ID NO: 68841 - DNA, 25 bp, Saccharomyces pastorianus
ggagttccaaggtacgatagccgat

SEQ ID NO: 68842 - DNA, 25 bp, Saccharomyces pastorianus
atcgccctttgttgataccttattc

SEQ ID NO: 68843 - DNA, 25 bp, Saccharomyces pastorianus
gaaaggccaacggtctagatgattt

SEQ ID NO: 68844 - DNA, 25 bp, Saccharomyces pastorianus
attactggagaacccttgtcaatta

SEQ ID NO: 68845 - DNA, 25 bp, Saccharomyces pastorianus
gaatacctctgctgacgatggaaag

SEQ ID NO: 68846 - DNA, 25 bp, Saccharomyces pastorianus
acttctggcgtaaacctgactggta

SEQ ID NO: 68847 - DNA, 25 bp, Saccharomyces pastorianus
ttaaacgcaaagacgctggaccaaa

SEQ ID NO: 68848 - DNA, 25 bp, Saccharomyces pastorianus
aatgctacttcggtaatcccaaaca

SEQ ID NO: 68849 - DNA, 25 bp, Saccharomyces pastorianus
aattgtcgaaacttcagcaccacct

SEQ ID NO: 68850 - DNA, 25 bp, Saccharomyces pastorianus
gaacacgctatactacgacgagaaa

SEQ ID NO: 68851 - DNA, 25 bp, Saccharomyces pastorianus
gtcaataccgaaaattctccaccac

SEQ ID NO: 68852 - DNA, 25 bp, Saccharomyces pastorianus
ggagggcctaaaccagcaagtacaa

SEQ ID NO: 68853 - DNA, 25 bp, Saccharomyces pastorianus
tcgggccccatcaataatactgtac

SEQ ID NO: 68854 - DNA, 25 bp, Saccharomyces pastorianus
aatttgttggcggttgtgatgttat

SEQ ID NO: 68855 - DNA, 25 bp, Saccharomyces pastorianus
gaattttcagagtggcctactatac

SEQ ID NO: 68856 - DNA, 25 bp, Saccharomyces pastorianus
tactccagaatttccaaaatgtggg

SEQ ID NO: 68857 - DNA, 25 bp, Saccharomyces pastorianus
tgatccagttaaatttgcggcttat

SEQ ID NO: 68858 - DNA, 25 bp, Saccharomyces pastorianus
ttataaggtcatgctcacccatctt

SEQ ID NO: 68859 - DNA, 25 bp, Saccharomyces pastorianus
cctactataccccagctgtatgtaa

SEQ ID NO: 68860 - DNA, 25 bp, Saccharomyces pastorianus
ggaaaccaaggtgttgatccagtta

SEQ ID NO: 68861 - DNA, 25 bp, Saccharomyces pastorianus
tgccccagtggttctcttcatgaaa

SEQ ID NO: 68862 - DNA, 25 bp, Saccharomyces pastorianus
aagacgctattgaatctgccccagt

SEQ ID NO: 68863 - DNA, 25 bp, Saccharomyces pastorianus
gtatggcacgttcaggtgaattagc

SEQ ID NO: 68864 - DNA, 25 bp, Saccharomyces pastorianus
acccttcttcgtcatcaaactcgaa

SEQ ID NO: 68865 - DNA, 25 bp, Saccharomyces pastorianus
tgaacactgggaaaaactttcaccg

SEQ ID NO: 68866 - DNA, 25 bp, Saccharomyces pastorianus
gcacacatttcattacttccaaaag

SEQ ID NO: 68867 - DNA, 25 bp, Saccharomyces pastorianus
tcaccgaccatttcaaaacaacttg

SEQ ID NO: 68868 - DNA, 25 bp, Saccharomyces pastorianus
gaaaacactgctcgcatatttgccc

SEQ ID NO: 68869 - DNA, 25 bp, Saccharomyces pastorianus
acggagatactgttctcggaagcaa

SEQ ID NO: 68870 - DNA, 25 bp, Saccharomyces pastorianus
gtggtataaattcatttcacgatgg

SEQ ID NO: 68871 - DNA, 25 bp, Saccharomyces pastorianus
aacggtgttgacattaaggctttca

SEQ ID NO: 68872 - DNA, 25 bp, Saccharomyces pastorianus
gctcgcatatttgcccgattttaaa

SEQ ID NO: 68873 - DNA, 25 bp, Saccharomyces pastorianus
acaacttgtatgctgtttagtcgat

SEQ ID NO: 68874 - DNA, 25 bp, Saccharomyces pastorianus
gaataacctctgagcttagcttgaa

SEQ ID NO: 68875 - DNA, 25 bp, Saccharomyces pastorianus
aggctttcaaaagtgggcacacatt

SEQ ID NO: 68876 - DNA, 25 bp, Saccharomyces pastorianus
atatcccactatactcatcaacaat

SEQ ID NO: 68877 - DNA, 25 bp, Saccharomyces pastorianus
aaagtcttcgtaggcttatatgaac

SEQ ID NO: 68878 - DNA, 25 bp, Saccharomyces pastorianus
gaatcaacttttctaagggaagatc

SEQ ID NO: 68879 - DNA, 25 bp, Saccharomyces pastorianus
aggcttatatgaacgcgttggttta

SEQ ID NO: 68880 - DNA, 25 bp, Saccharomyces pastorianus
ttttattccgtgcaaagatttcagc

SEQ ID NO: 68881 - DNA, 25 bp, Saccharomyces pastorianus
gaagatcagtttccaaagcttaatg

SEQ ID NO: 68882 - DNA, 25 bp, Saccharomyces pastorianus
gaatccctactggacgtgcagaagt

SEQ ID NO: 68883 - DNA, 25 bp, Saccharomyces pastorianus
ataggcggttcttcaaacaagttag

SEQ ID NO: 68884 - DNA, 25 bp, Saccharomyces pastorianus
atatcttgaagaatccctactggac

SEQ ID NO: 68885 - DNA, 25 bp, Saccharomyces pastorianus
ggcattgaaatctgtaaaaccttta

SEQ ID NO: 68886 - DNA, 25 bp, Saccharomyces pastorianus
cgaagattatcacacgaaggttata

SEQ ID NO: 68887 - DNA, 25 bp, Saccharomyces pastorianus
agtgactggaaagccatgtcctata

SEQ ID NO: 68888 - DNA, 25 bp, Saccharomyces pastorianus
gaaggtgtcactttgatgccacctg

SEQ ID NO: 68889 - DNA, 25 bp, Saccharomyces pastorianus
acttgcctgaccttgtactgtatta

SEQ ID NO: 68890 - DNA, 25 bp, Saccharomyces pastorianus
gaaatcgtaccacaaaaccgttgat

SEQ ID NO: 68891 - DNA, 25 bp, Saccharomyces pastorianus
atttgaggaagtccccttcagacct

SEQ ID NO: 68892 - DNA, 25 bp, Saccharomyces pastorianus
ggagcgttgtgttttgctacttgcc

SEQ ID NO: 68893 - DNA, 25 bp, Saccharomyces pastorianus
ggtttctcgctatgcgcttgaaaga

SEQ ID NO: 68894 - DNA, 25 bp, Saccharomyces pastorianus
acggcctgtggtttcaaaacctcat

SEQ ID NO: 68895 - DNA, 25 bp, Saccharomyces pastorianus
tactgtattacacaccgccgatgaa

SEQ ID NO: 68896 - DNA, 25 bp, Saccharomyces pastorianus
tctggagcaagactctttgttcccc

SEQ ID NO: 68897 - DNA, 25 bp, Saccharomyces pastorianus
taccaaaagttcatctatccgttag

SEQ ID NO: 68898 - DNA, 25 bp, Saccharomyces pastorianus
gactccttttcggagacctggtcta

SEQ ID NO: 68899 - DNA, 25 bp, Saccharomyces pastorianus
atattccctcaacatgttttcaagt

SEQ ID NO: 68900 - DNA, 25 bp, Saccharomyces pastorianus
agaccaggaacctcttgtcatcgta

SEQ ID NO: 68901 - DNA, 25 bp, Saccharomyces pastorianus
agtgcgatgcgtgcgacgaactgat

SEQ ID NO: 68902 - DNA, 25 bp, Saccharomyces pastorianus
taacaagcggcctacggatttggta

SEQ ID NO: 68903 - DNA, 25 bp, Saccharomyces pastorianus
cttgtcatcgtagttggcacttcgc

SEQ ID NO: 68904 - DNA, 25 bp, Saccharomyces pastorianus
gaatctttattctgacgcgtttgca

SEQ ID NO: 68905 - DNA, 25 bp, Saccharomyces pastorianus
taagctgagcgaagaccctatcaag

SEQ ID NO: 68906 - DNA, 25 bp, Saccharomyces pastorianus
gacgcgtttgcagaacaactcgttg

SEQ ID NO: 68907 - DNA, 25 bp, Saccharomyces pastorianus
gatactccgggctcaaactgtaatc

SEQ ID NO: 68908 - DNA, 25 bp, Saccharomyces pastorianus
aattgtcttctttggcgaggacctg

SEQ ID NO: 68909 - DNA, 25 bp, Saccharomyces pastorianus
accatcgggattgtcgtttgctaca

SEQ ID NO: 68910 - DNA, 25 bp, Saccharomyces pastorianus
gcacttctacctaaacaccgacgaa

SEQ ID NO: 68911 - DNA, 25 bp, Saccharomyces pastorianus
ttgctacatgaacttggtcttccct

SEQ ID NO: 68912 - DNA, 25 bp, Saccharomyces pastorianus
aagacatcgtcgctgcccaaaagga

SEQ ID NO: 68913 - DNA, 25 bp, Saccharomyces pastorianus
ttggtcttccctcaacaattggctc

SEQ ID NO: 68914 - DNA, 25 bp, Saccharomyces pastorianus
ttctcatgagcaccatcgggattgt

SEQ ID NO: 68915 - DNA, 25 bp, Saccharomyces pastorianus
tcctgcaatcaagcttctcatgagc

SEQ ID NO: 68916 - DNA, 25 bp, Saccharomyces pastorianus
gtcgctgcccaaaaggagactaagt

SEQ ID NO: 68917 - DNA, 25 bp, Saccharomyces pastorianus
ctggttttccctgattcagagtttg

SEQ ID NO: 68918 - DNA, 25 bp, Saccharomyces pastorianus
gggattgtcgtttgctacatgaact

SEQ ID NO: 68919 - DNA, 25 bp, Saccharomyces pastorianus
gattcagagtttgcacttctaccta

SEQ ID NO: 68920 - DNA, 25 bp, Saccharomyces pastorianus
gattcaaaaggtggacttcaaagca

SEQ ID NO: 68921 - DNA, 25 bp, Saccharomyces pastorianus
caaaaggtggacttcaaagcacaaa

SEQ ID NO: 68922 - DNA, 25 bp, Saccharomyces pastorianus
aaggtggacttcaaagcacaaagat

SEQ ID NO: 68923 - DNA, 25 bp, Saccharomyces pastorianus
atgtggtcagaaataacttggagaa

SEQ ID NO: 68924 - DNA, 25 bp, Saccharomyces pastorianus
aggtggacttcaaagcacaaagata

SEQ ID NO: 68925 - DNA, 25 bp, Saccharomyces pastorianus
gaaagattcaaaaggtggacttcaa

SEQ ID NO: 68926 - DNA, 25 bp, Saccharomyces pastorianus
aaaggtggacttcaaagcacaaaga

SEQ ID NO: 68927 - DNA, 25 bp, Saccharomyces pastorianus
aagattcaaaaggtggacttcaaag

SEQ ID NO: 68928 - DNA, 25 bp, Saccharomyces pastorianus
attcaaaaggtggacttcaaagcac

SEQ ID NO: 68929 - DNA, 25 bp, Saccharomyces pastorianus
ttcaaaaggtggacttcaaagcaca

SEQ ID NO: 68930 - DNA, 25 bp, Saccharomyces pastorianus
aaaaggtggacttcaaagcacaaag

SEQ ID NO: 68931 - DNA, 25 bp, Saccharomyces pastorianus
gttacgtcctatggaatttcgagca

SEQ ID NO: 68932 - DNA, 25 bp, Saccharomyces pastorianus
ttctgaagatcctccccagttgcag

SEQ ID NO: 68933 - DNA, 25 bp, Saccharomyces pastorianus
ccgttacgtcctatggaatttcgag

SEQ ID NO: 68934 - DNA, 25 bp, Saccharomyces pastorianus
gaagatcctccccagttgcagtact

SEQ ID NO: 68935 - DNA, 25 bp, Saccharomyces pastorianus
agtaacctttttgcatggaaacaca

SEQ ID NO: 68936 - DNA, 25 bp, Saccharomyces pastorianus
acctttttgcatggaaacacaaatg

SEQ ID NO: 68937 - DNA, 25 bp, Saccharomyces pastorianus
ctccccagttgcagtactgcaaagt

SEQ ID NO: 68938 - DNA, 25 bp, Saccharomyces pastorianus
aagatcctccccagttgcagtactg

SEQ ID NO: 68939 - DNA, 25 bp, Saccharomyces pastorianus
atcctccccagttgcagtactgcaa

SEQ ID NO: 68940 - DNA, 25 bp, Saccharomyces pastorianus
atggaaacacaaatgctcccacccc

SEQ ID NO: 68941 - DNA, 25 bp, Saccharomyces pastorianus
tgcagtactgcaaagtaaccttttt

SEQ ID NO: 68942 - DNA, 25 bp, Saccharomyces pastorianus
tttctgttttggtagccacttcgtt

SEQ ID NO: 68943 - DNA, 25 bp, Saccharomyces pastorianus
ttgatagttttgatagccacctctg

SEQ ID NO: 68944 - DNA, 25 bp, Saccharomyces pastorianus
ttggtagccacttcgttggccacct

SEQ ID NO: 68945 - DNA, 25 bp, Saccharomyces pastorianus
gatagccacctctgttgttttggta

SEQ ID NO: 68946 - DNA, 25 bp, Saccharomyces pastorianus
gccacctctgttgttttggtagtta

SEQ ID NO: 68947 - DNA, 25 bp, Saccharomyces pastorianus
aaattcgacattggaaggaggttga

SEQ ID NO: 68948 - DNA, 25 bp, Saccharomyces pastorianus
atagttttgatagccacctctgttg

SEQ ID NO: 68949 - DNA, 25 bp, Saccharomyces pastorianus
gagaattggttggaggacctatctt

SEQ ID NO: 68950 - DNA, 25 bp, Saccharomyces pastorianus
gacatatcactctaaaattcgacat

SEQ ID NO: 68951 - DNA, 25 bp, Saccharomyces pastorianus
gttggaggacctatcttgagaatca

SEQ ID NO: 68952 - DNA, 25 bp, Saccharomyces pastorianus
ggacctatcttgagaatcattttga

SEQ ID NO: 68953 - DNA, 25 bp, Saccharomyces pastorianus
agacaagggccttatcagccgttgg

SEQ ID NO: 68954 - DNA, 25 bp, Saccharomyces pastorianus
gatcttccaggaatttctgcgggat

SEQ ID NO: 68955 - DNA, 25 bp, Saccharomyces pastorianus
aaagttccactacttagcgcagata

SEQ ID NO: 68956 - DNA, 25 bp, Saccharomyces pastorianus
gttggcgggcattactcgcagcaac

SEQ ID NO: 68957 - DNA, 25 bp, Saccharomyces pastorianus
ttcgtgtcgcagctattgttctatt

SEQ ID NO: 68958 - DNA, 25 bp, Saccharomyces pastorianus
gaacgatccggatttctaccagatt

SEQ ID NO: 68959 - DNA, 25 bp, Saccharomyces pastorianus
ggacgcgctgctgaggatcgaacac

SEQ ID NO: 68960 - DNA, 25 bp, Saccharomyces pastorianus
gatccgcgctactacgtggtgggta

SEQ ID NO: 68961 - DNA, 25 bp, Saccharomyces pastorianus
agggtcaaggagtacgtgccgtcaa

SEQ ID NO: 68962 - DNA, 25 bp, Saccharomyces pastorianus
ttctaccagattagcgatgccgcgg

SEQ ID NO: 68963 - DNA, 25 bp, Saccharomyces pastorianus
gctgacctgctggagccaacaaagt

SEQ ID NO: 68964 - DNA, 25 bp, Saccharomyces pastorianus
acaacggagctagttacattagacg

SEQ ID NO: 68965 - DNA, 25 bp, Saccharomyces pastorianus
tggatcccgttgtgacctcagtaga

SEQ ID NO: 68966 - DNA, 25 bp, Saccharomyces pastorianus
aggttgcagaacttgtcactacaga

SEQ ID NO: 68967 - DNA, 25 bp, Saccharomyces pastorianus
agatgtggcaactgagctggagaca

SEQ ID NO: 68968 - DNA, 25 bp, Saccharomyces pastorianus
gacactggatgagctgacgccggtt

SEQ ID NO: 68969 - DNA, 25 bp, Saccharomyces pastorianus
aagtgacagtagagcttgaagcaga

SEQ ID NO: 68970 - DNA, 25 bp, Saccharomyces pastorianus
ggcaacggagctagttacattggat

SEQ ID NO: 68971 - DNA, 25 bp, Saccharomyces pastorianus
gaagcagagctggtcacgtcagaag

SEQ ID NO: 68972 - DNA, 25 bp, Saccharomyces pastorianus
agaactaatggttgtgaccggagta

SEQ ID NO: 68973 - DNA, 25 bp, Saccharomyces pastorianus
ttgtgacctcagtagatgggacact

SEQ ID NO: 68974 - DNA, 25 bp, Saccharomyces pastorianus
attgaactaatgatcgtggctggag

SEQ ID NO: 68975 - DNA, 25 bp, Saccharomyces pastorianus
gataggtgggtaccccaaatgctcc

SEQ ID NO: 68976 - DNA, 25 bp, Saccharomyces pastorianus
tggccttttaccgtctgttgatgaa

SEQ ID NO: 68977 - DNA, 25 bp, Saccharomyces pastorianus
gacatagcttctctggtcgttcgag

SEQ ID NO: 68978 - DNA, 25 bp, Saccharomyces pastorianus
gtcggtgccgacatagcttctctgg

SEQ ID NO: 68979 - DNA, 25 bp, Saccharomyces pastorianus
caacgagcgagataggtgggtaccc

SEQ ID NO: 68980 - DNA, 25 bp, Saccharomyces pastorianus
gatcatctatgtattcactttttta

SEQ ID NO: 68981 - DNA, 25 bp, Saccharomyces pastorianus
tctggtcgttcgagttggcctttta

SEQ ID NO: 68982 - DNA, 25 bp, Saccharomyces pastorianus
gtcagtattgacgtcgatctcattg

SEQ ID NO: 68983 - DNA, 25 bp, Saccharomyces pastorianus
tacgcgtaatacaaatttctcaaac

SEQ ID NO: 68984 - DNA, 25 bp, Saccharomyces pastorianus
acgtcgatctcattgtcggtgccga

SEQ ID NO: 68985 - DNA, 25 bp, Saccharomyces pastorianus
accccaaatgctccgtcagtattga

SEQ ID NO: 68986 - DNA, 25 bp, Saccharomyces pastorianus
gaatccatcaggactttcgccaaaa

SEQ ID NO: 68987 - DNA, 25 bp, Saccharomyces pastorianus
aaatgctcaaactagacggtcttcc

SEQ ID NO: 68988 - DNA, 25 bp, Saccharomyces pastorianus
gttgggtcacaaatcctcggtggaa

SEQ ID NO: 68989 - DNA, 25 bp, Saccharomyces pastorianus
gcttcaaccgcgatgtttagtgact

SEQ ID NO: 68990 - DNA, 25 bp, Saccharomyces pastorianus
aatctggctgcgttgcatgacaagg

SEQ ID NO: 68991 - DNA, 25 bp, Saccharomyces pastorianus
gcagcacactgtagcctcgaagact

SEQ ID NO: 68992 - DNA, 25 bp, Saccharomyces pastorianus
atgctcgacataagcttcatcgcca

SEQ ID NO: 68993 - DNA, 25 bp, Saccharomyces pastorianus
aatgtgcgatggcaggcttctcata

SEQ ID NO: 68994 - DNA, 25 bp, Saccharomyces pastorianus
aggcttctcatagcaatctggctgc

SEQ ID NO: 68995 - DNA, 25 bp, Saccharomyces pastorianus
ttcgccaaaacaccctttcaatatg

SEQ ID NO: 68996 - DNA, 25 bp, Saccharomyces pastorianus
aagttatcccagactacacttctgc

SEQ ID NO: 68997 - DNA, 25 bp, Saccharomyces pastorianus
gaatcacgtctaactgatactataa

SEQ ID NO: 68998 - DNA, 25 bp, Saccharomyces pastorianus
gagagctctttgatgatttccaaga

SEQ ID NO: 68999 - DNA, 25 bp, Saccharomyces pastorianus
gaacgaggctcttgacctggtttcc

SEQ ID NO: 69000 - DNA, 25 bp, Saccharomyces pastorianus
gtacaaataccggaacgaggctctt

SEQ ID NO: 69001 - DNA, 25 bp, Saccharomyces pastorianus
agccttctatctttggagagctctt

SEQ ID NO: 69002 - DNA, 25 bp, Saccharomyces pastorianus
aatggaaagccttctatctttggag

SEQ ID NO: 69003 - DNA, 25 bp, Saccharomyces pastorianus
gataaagagaatgccgaatcgttcg

SEQ ID NO: 69004 - DNA, 25 bp, Saccharomyces pastorianus
gaatcgttcgaatcacgtctaactg

SEQ ID NO: 69005 - DNA, 25 bp, Saccharomyces pastorianus
tgaacttacaacaggatttcgataa

SEQ ID NO: 69006 - DNA, 25 bp, Saccharomyces pastorianus
caaacgttgccaaattacaagagtt

SEQ ID NO: 69007 - DNA, 25 bp, Saccharomyces pastorianus
tgtaaggagagattggtcgccagaa

SEQ ID NO: 69008 - DNA, 25 bp, Saccharomyces pastorianus
atgacggctttggaaacacagaacc

SEQ ID NO: 69009 - DNA, 25 bp, Saccharomyces pastorianus
attgaaaacccattcgccgatgata

SEQ ID NO: 69010 - DNA, 25 bp, Saccharomyces pastorianus
gaacgctcataaagccaattcctca

SEQ ID NO: 69011 - DNA, 25 bp, Saccharomyces pastorianus
tcctcaagagacgactttacatttg

SEQ ID NO: 69012 - DNA, 25 bp, Saccharomyces pastorianus
ataaagccaattcctcaagagacga

SEQ ID NO: 69013 - DNA, 25 bp, Saccharomyces pastorianus
gccgatgatactaggaacgctcata

SEQ ID NO: 69014 - DNA, 25 bp, Saccharomyces pastorianus
tggaaacacagaaccgtttattgaa

SEQ ID NO: 69015 - DNA, 25 bp, Saccharomyces pastorianus
gtttattgaaaacccattcgccgat

SEQ ID NO: 69016 - DNA, 25 bp, Saccharomyces pastorianus
ttcgccgatgatactaggaacgctc

SEQ ID NO: 69017 - DNA, 25 bp, Saccharomyces pastorianus
aacccattcgccgatgatactagga

SEQ ID NO: 69018 - DNA, 25 bp, Saccharomyces pastorianus
ggatttgaaaatgacggctttggaa

SEQ ID NO: 69019 - DNA, 25 bp, Saccharomyces pastorianus
agagttccattgctcatcagcacca

SEQ ID NO: 69020 - DNA, 25 bp, Saccharomyces pastorianus
tgaccctgtccgttggacccaaacg

SEQ ID NO: 69021 - DNA, 25 bp, Saccharomyces pastorianus
gtccaaccaggcacctgctgcaggg

SEQ ID NO: 69022 - DNA, 25 bp, Saccharomyces pastorianus
cggccagagttccattgctcatcag

SEQ ID NO: 69023 - DNA, 25 bp, Saccharomyces pastorianus
acgtgtgtcgaccacgaccgttgtg

SEQ ID NO: 69024 - DNA, 25 bp, Saccharomyces pastorianus
gcacgctatcttcgacactttactc

SEQ ID NO: 69025 - DNA, 25 bp, Saccharomyces pastorianus
aggacggacctctgcggcgtgtcca

SEQ ID NO: 69026 - DNA, 25 bp, Saccharomyces pastorianus
tttactctcacctgccaggacggac

SEQ ID NO: 69027 - DNA, 25 bp, Saccharomyces pastorianus
tcgatgggcgtccaaccaggcacct

SEQ ID NO: 69028 - DNA, 25 bp, Saccharomyces pastorianus
aaacgcatacacacagctcatcact

SEQ ID NO: 69029 - DNA, 25 bp, Saccharomyces pastorianus
acgaccgttgtgtcccagccgcatg

SEQ ID NO: 69030 - DNA, 25 bp, Saccharomyces pastorianus
accactgtttcttcaaagtcttaca

SEQ ID NO: 69031 - DNA, 25 bp, Saccharomyces pastorianus
tcactgtgatgacaacggctgcaat

SEQ ID NO: 69032 - DNA, 25 bp, Saccharomyces pastorianus
gaccgtcacttctgaggctcctaag

SEQ ID NO: 69033 - DNA, 25 bp, Saccharomyces pastorianus
ggctgcaatgttaagaccgtcactt

SEQ ID NO: 69034 - DNA, 25 bp, Saccharomyces pastorianus
aaggaaacttcagtcaccactgcca

SEQ ID NO: 69035 - DNA, 25 bp, Saccharomyces pastorianus
actgtaacgacaacggctgtaccgt

SEQ ID NO: 69036 - DNA, 25 bp, Saccharomyces pastorianus
actgtcacccactgtaacgacaacg

SEQ ID NO: 69037 - DNA, 25 bp, Saccharomyces pastorianus
actggtgtcactgcaaccactgttt

SEQ ID NO: 69038 - DNA, 25 bp, Saccharomyces pastorianus
ccactaccattgctccaaaatcata

SEQ ID NO: 69039 - DNA, 25 bp, Saccharomyces pastorianus
taccatcactgtcactcactgtgat

SEQ ID NO: 69040 - DNA, 25 bp, Saccharomyces pastorianus
aaagtcttacactaccatcactgtc

SEQ ID NO: 69041 - DNA, 25 bp, Saccharomyces pastorianus
ataggccaccggcatcatctggcca

SEQ ID NO: 69042 - DNA, 25 bp, Saccharomyces pastorianus
caccgtgggtaagattactgctcta

SEQ ID NO: 69043 - DNA, 25 bp, Saccharomyces pastorianus
atctggccatgctttcacaaacgcg

SEQ ID NO: 69044 - DNA, 25 bp, Saccharomyces pastorianus
gattactgctctattgaccagttta

SEQ ID NO: 69045 - DNA, 25 bp, Saccharomyces pastorianus
atgtccgttctctgcagcaccatag

SEQ ID NO: 69046 - DNA, 25 bp, Saccharomyces pastorianus
ctggccagctttaaaggcgccttta

SEQ ID NO: 69047 - DNA, 25 bp, Saccharomyces pastorianus
ctttgctgcgctggccagctttaaa

SEQ ID NO: 69048 - DNA, 25 bp, Saccharomyces pastorianus
aaggcgcctttagatcattcaatga

SEQ ID NO: 69049 - DNA, 25 bp, Saccharomyces pastorianus
agcaccataggttgtcgactctttg

SEQ ID NO: 69050 - DNA, 25 bp, Saccharomyces pastorianus
ataggttgtcgactctttgctgcgc

SEQ ID NO: 69051 - DNA, 25 bp, Saccharomyces pastorianus
acaaacgcgccaacgccaagtgtaa

SEQ ID NO: 69052 - DNA, 25 bp, Saccharomyces pastorianus
aaaccaccaattctaacgcaactgc

SEQ ID NO: 69053 - DNA, 25 bp, Saccharomyces pastorianus
aactgcgctaatggctattggtaac

SEQ ID NO: 69054 - DNA, 25 bp, Saccharomyces pastorianus
ggtaacaactcatactcccaaaagg

SEQ ID NO: 69055 - DNA, 25 bp, Saccharomyces pastorianus
tgggagctccacgtcaaatttgaat

SEQ ID NO: 69056 - DNA, 25 bp, Saccharomyces pastorianus
cggttactaatgaccaactcgctaa

SEQ ID NO: 69057 - DNA, 25 bp, Saccharomyces pastorianus
gaattccagtcccaatgttaaagtg

SEQ ID NO: 69058 - DNA, 25 bp, Saccharomyces pastorianus
tcgagtttgctgatgggagctccac

SEQ ID NO: 69059 - DNA, 25 bp, Saccharomyces pastorianus
aattcatccgaattgtccactccta

SEQ ID NO: 69060 - DNA, 25 bp, Saccharomyces pastorianus
gacggtagcggtaacggcacttccg

SEQ ID NO: 69061 - DNA, 25 bp, Saccharomyces pastorianus
aattctatcattaacgtgtcactgc

SEQ ID NO: 69062 - DNA, 25 bp, Saccharomyces pastorianus
gaccaactcgctaattttcgaccgg

SEQ ID NO: 69063 - DNA, 25 bp, Saccharomyces pastorianus
atgttgtcacgctggtcgacttgaa

SEQ ID NO: 69064 - DNA, 25 bp, Saccharomyces pastorianus
tgccggaattgcctgatgacataat

SEQ ID NO: 69065 - DNA, 25 bp, Saccharomyces pastorianus
gccgtatatcaatcttgctccggat

SEQ ID NO: 69066 - DNA, 25 bp, Saccharomyces pastorianus
gattacagatacatgcccgatccgg

SEQ ID NO: 69067 - DNA, 25 bp, Saccharomyces pastorianus
gaatttgctcgcgtggaactgaaaa

SEQ ID NO: 69068 - DNA, 25 bp, Saccharomyces pastorianus
ggttcgtcatttgcacatatcttcc

SEQ ID NO: 69069 - DNA, 25 bp, Saccharomyces pastorianus
ggacaggctcttccacagtgaagtt

SEQ ID NO: 69070 - DNA, 25 bp, Saccharomyces pastorianus
aacgtcccactcatcgagttggtga

SEQ ID NO: 69071 - DNA, 25 bp, Saccharomyces pastorianus
ggtgaccaacccagattttagtgat

SEQ ID NO: 69072 - DNA, 25 bp, Saccharomyces pastorianus
gggcgaaaccgattcactgctggag

SEQ ID NO: 69073 - DNA, 25 bp, Saccharomyces pastorianus
ttatcagtggcgtggcggcatcaat

SEQ ID NO: 69074 - DNA, 25 bp, Saccharomyces pastorianus
aatgaatgacgtggacgtggtcaat

SEQ ID NO: 69075 - DNA, 25 bp, Saccharomyces pastorianus
ggttgatttgcctctacattgaaag

SEQ ID NO: 69076 - DNA, 25 bp, Saccharomyces pastorianus
ggtcgataccaatagtaacttcaac

SEQ ID NO: 69077 - DNA, 25 bp, Saccharomyces pastorianus
tgttggaaatgaatgacgtggacgt

SEQ ID NO: 69078 - DNA, 25 bp, Saccharomyces pastorianus
aattccctggaatggttgatttgcc

SEQ ID NO: 69079 - DNA, 25 bp, Saccharomyces pastorianus
gatttgcctctacattgaaagaata

SEQ ID NO: 69080 - DNA, 25 bp, Saccharomyces pastorianus
gacgtggtcaatgggaatatcctta

SEQ ID NO: 69081 - DNA, 25 bp, Saccharomyces pastorianus
gaatatccttaattccctggaatgg

SEQ ID NO: 69082 - DNA, 25 bp, Saccharomyces pastorianus
gaatggttgatttgcctctacattg

SEQ ID NO: 69083 - DNA, 25 bp, Saccharomyces pastorianus
ctggaatggttgatttgcctctaca

SEQ ID NO: 69084 - DNA, 25 bp, Saccharomyces pastorianus
tccctggaatggttgatttgcctct

SEQ ID NO: 69085 - DNA, 25 bp, Saccharomyces pastorianus
ctgtggctcagaatctcgtttggaa

SEQ ID NO: 69086 - DNA, 25 bp, Saccharomyces pastorianus
ctttttgtggtgttctgataggcga

SEQ ID NO: 69087 - DNA, 25 bp, Saccharomyces pastorianus
gcaccacccaagttatccatattca

SEQ ID NO: 69088 - DNA, 25 bp, Saccharomyces pastorianus
ggcgaaggacctttcttaacattgt

SEQ ID NO: 69089 - DNA, 25 bp, Saccharomyces pastorianus
gattggttccggatggacttctacc

SEQ ID NO: 69090 - DNA, 25 bp, Saccharomyces pastorianus
ttttgttttgcttatccttcttgtc

SEQ ID NO: 69091 - DNA, 25 bp, Saccharomyces pastorianus
tcgactgtccagcacctttttgtgg

SEQ ID NO: 69092 - DNA, 25 bp, Saccharomyces pastorianus
atttggctttatctccgtcgactgt

SEQ ID NO: 69093 - DNA, 25 bp, Saccharomyces pastorianus
gatttccttcgttcaagattggttc

SEQ ID NO: 69094 - DNA, 25 bp, Saccharomyces pastorianus
ttgatttgcaaaccctgtggctcag

SEQ ID NO: 69095 - DNA, 25 bp, Saccharomyces pastorianus
atattcaatagctgcccatttggct

SEQ ID NO: 69096 - DNA, 25 bp, Saccharomyces pastorianus
ggaaaccactgctaggcctggaatt

SEQ ID NO: 69097 - DNA, 25 bp, Saccharomyces pastorianus
ttgatggatttcaccaagcagttgg

SEQ ID NO: 69098 - DNA, 25 bp, Saccharomyces pastorianus
attcacgcagtgtatcaacttctgg

SEQ ID NO: 69099 - DNA, 25 bp, Saccharomyces pastorianus
caatggtcctgaaactgtcttagag

SEQ ID NO: 69100 - DNA, 25 bp, Saccharomyces pastorianus
aactttactgtaatcttccctgaag

SEQ ID NO: 69101 - DNA, 25 bp, Saccharomyces pastorianus
tgcccatgacacaattcgaactagt

SEQ ID NO: 69102 - DNA, 25 bp, Saccharomyces pastorianus
aaagtctttaccgatcttacgtgct

SEQ ID NO: 69103 - DNA, 25 bp, Saccharomyces pastorianus
ccgatcttacgtgctttgatttaaa

SEQ ID NO: 69104 - DNA, 25 bp, Saccharomyces pastorianus
ttccctgaagacatcaatggtcctg

SEQ ID NO: 69105 - DNA, 25 bp, Saccharomyces pastorianus
tatggatagacaggcacaacgaaat

SEQ ID NO: 69106 - DNA, 25 bp, Saccharomyces pastorianus
gaatacccaatacaagaagcgacta

SEQ ID NO: 69107 - DNA, 25 bp, Saccharomyces pastorianus
gtcactactagttggcaagagcccg

SEQ ID NO: 69108 - DNA, 25 bp, Saccharomyces pastorianus
ggatgaagaaactactgaccagcta

SEQ ID NO: 69109 - DNA, 25 bp, Saccharomyces pastorianus
acacagttgatgacggctggtcccg

SEQ ID NO: 69110 - DNA, 25 bp, Saccharomyces pastorianus
gaccagctaactccctttattagag

SEQ ID NO: 69111 - DNA, 25 bp, Saccharomyces pastorianus
agacgtctcgctgatgaagatcccg

SEQ ID NO: 69112 - DNA, 25 bp, Saccharomyces pastorianus
gacaagcgatgccaggagactcatt

SEQ ID NO: 69113 - DNA, 25 bp, Saccharomyces pastorianus
ccgaggaagttttgcccgaattgat

SEQ ID NO: 69114 - DNA, 25 bp, Saccharomyces pastorianus
caccgatacgataccgtttgaccta

SEQ ID NO: 69115 - DNA, 25 bp, Saccharomyces pastorianus
tgcgagttgtgctatgatccattca

SEQ ID NO: 69116 - DNA, 25 bp, Saccharomyces pastorianus
gaaaagtgctgtttggtcactacta

SEQ ID NO: 69117 - DNA, 25 bp, Saccharomyces pastorianus
gaaggattttttgacggcgacgaga

SEQ ID NO: 69118 - DNA, 25 bp, Saccharomyces pastorianus
gaccgatagcttgcgttatgtcttt

SEQ ID NO: 69119 - DNA, 25 bp, Saccharomyces pastorianus
aatccgttttggcatggtccgtcat

SEQ ID NO: 69120 - DNA, 25 bp, Saccharomyces pastorianus
atatccttccctatatcatcacgga

SEQ ID NO: 69121 - DNA, 25 bp, Saccharomyces pastorianus
ggtcgtttggcattaggttccttga

SEQ ID NO: 69122 - DNA, 25 bp, Saccharomyces pastorianus
cattcttgtggctgtcgaccgatag

SEQ ID NO: 69123 - DNA, 25 bp, Saccharomyces pastorianus
tttggacatccacactagcttatat

SEQ ID NO: 69124 - DNA, 25 bp, Saccharomyces pastorianus
aacttggaccctttgcaaatccgag

SEQ ID NO: 69125 - DNA, 25 bp, Saccharomyces pastorianus
gttgtaaaatccattatcgccccat

SEQ ID NO: 69126 - DNA, 25 bp, Saccharomyces pastorianus
ttatgatcttctgggttgcgtgtct

SEQ ID NO: 69127 - DNA, 25 bp, Saccharomyces pastorianus
ttgctactttgattctaaacgcccc

SEQ ID NO: 69128 - DNA, 25 bp, Saccharomyces pastorianus
acgccccagacttcacgagatttag

SEQ ID NO: 69129 - DNA, 25 bp, Saccharomyces pastorianus
aatctacggtattgatgcgaacgcc

SEQ ID NO: 69130 - DNA, 25 bp, Saccharomyces pastorianus
gtttatactgtatgtccggctttga

SEQ ID NO: 69131 - DNA, 25 bp, Saccharomyces pastorianus
gggcttttatggtgttgacaacatc

SEQ ID NO: 69132 - DNA, 25 bp, Saccharomyces pastorianus
tctggctgtgcgttcattgatgtat

SEQ ID NO: 69133 - DNA, 25 bp, Saccharomyces pastorianus
gaatcattccccaattttgacgaca

SEQ ID NO: 69134 - DNA, 25 bp, Saccharomyces pastorianus
gtctagttcgtaatgctactggtga

SEQ ID NO: 69135 - DNA, 25 bp, Saccharomyces pastorianus
tgcgaacgccaaggttgctccaaaa

SEQ ID NO: 69136 - DNA, 25 bp, Saccharomyces pastorianus
ggaaaacttattcttacctgtatgg

SEQ ID NO: 69137 - DNA, 25 bp, Saccharomyces pastorianus
gcaaggaagatacccatgagctatt

SEQ ID NO: 69138 - DNA, 25 bp, Saccharomyces pastorianus
aatgactgttttaagctctggctgt

SEQ ID NO: 69139 - DNA, 25 bp, Saccharomyces pastorianus
gacgacatccgtccgaagaacattg

SEQ ID NO: 69140 - DNA, 25 bp, Saccharomyces pastorianus
gatggtgactttcgtactgaacaac

SEQ ID NO: 69141 - DNA, 25 bp, Saccharomyces pastorianus
tcatgatgggccagctgtttaccaa

SEQ ID NO: 69142 - DNA, 25 bp, Saccharomyces pastorianus
gaggactaccaggagacgcactata

SEQ ID NO: 69143 - DNA, 25 bp, Saccharomyces pastorianus
gcagagatgccattcgtttgtccac

SEQ ID NO: 69144 - DNA, 25 bp, Saccharomyces pastorianus
ggcatcactgcctttttggagttta

SEQ ID NO: 69145 - DNA, 25 bp, Saccharomyces pastorianus
gtccaaggtgttgcagactgcggtc

SEQ ID NO: 69146 - DNA, 25 bp, Saccharomyces pastorianus
gtttgtccacgttgaggatctcaga

SEQ ID NO: 69147 - DNA, 25 bp, Saccharomyces pastorianus
aaaggagccacgttcctcatgatgg

SEQ ID NO: 69148 - DNA, 25 bp, Saccharomyces pastorianus
ggaacagtactgtttttcagcagag

SEQ ID NO: 69149 - DNA, 25 bp, Saccharomyces pastorianus
ggatctcagactctggtaacggtat

SEQ ID NO: 69150 - DNA, 25 bp, Saccharomyces pastorianus
gtcgccaagaattttcggcatcact

SEQ ID NO: 69151 - DNA, 25 bp, Saccharomyces pastorianus
gactcattcgatcaccttattagcg

SEQ ID NO: 69152 - DNA, 25 bp, Saccharomyces pastorianus
tacgggtcgctactgacacggttat

SEQ ID NO: 69153 - DNA, 25 bp, Saccharomyces pastorianus
tatgctttactgtccaactacgggt

SEQ ID NO: 69154 - DNA, 25 bp, Saccharomyces pastorianus
aggtatcgctatactggcgtttgca

SEQ ID NO: 69155 - DNA, 25 bp, Saccharomyces pastorianus
tacccgatgggaattgtcactgcag

SEQ ID NO: 69156 - DNA, 25 bp, Saccharomyces pastorianus
aagaatccctgcgattgtttctggc

SEQ ID NO: 69157 - DNA, 25 bp, Saccharomyces pastorianus
ttttagttgtttacgctgttcagca

SEQ ID NO: 69158 - DNA, 25 bp, Saccharomyces pastorianus
tcgtctgctgtcatctcataatcaa

SEQ ID NO: 69159 - DNA, 25 bp, Saccharomyces pastorianus
attagcgtgttactactgggactat

SEQ ID NO: 69160 - DNA, 25 bp, Saccharomyces pastorianus
gaccaccgggtgtattgtcaatttt

SEQ ID NO: 69161 - DNA, 25 bp, Saccharomyces pastorianus
acggttattattcgcacccatcgaa

SEQ ID NO: 69162 - DNA, 25 bp, Saccharomyces pastorianus
ttgtacgggttcagccaaacgggca

SEQ ID NO: 69163 - DNA, 25 bp, Saccharomyces pastorianus
gggcataaccgatccagaatatcta

SEQ ID NO: 69164 - DNA, 25 bp, Saccharomyces pastorianus
aagacttgggccgagtaccagttgg

SEQ ID NO: 69165 - DNA, 25 bp, Saccharomyces pastorianus
gagtagcattcaattcttcttcttt

SEQ ID NO: 69166 - DNA, 25 bp, Saccharomyces pastorianus
ggctgtgatattaccgatcccgaga

SEQ ID NO: 69167 - DNA, 25 bp, Saccharomyces pastorianus
cgattttctctacgtggctgattaa

SEQ ID NO: 69168 - DNA, 25 bp, Saccharomyces pastorianus
tagaagacttaactccttctgcggg

SEQ ID NO: 69169 - DNA, 25 bp, Saccharomyces pastorianus
tgctattgacttttcaggtgccttt

SEQ ID NO: 69170 - DNA, 25 bp, Saccharomyces pastorianus
gctcgcttttccctatgttatatga

SEQ ID NO: 69171 - DNA, 25 bp, Saccharomyces pastorianus
gtatctgtgccagaatactctgaag

SEQ ID NO: 69172 - DNA, 25 bp, Saccharomyces pastorianus
aacgcttttgttactgatggtggaa

SEQ ID NO: 69173 - DNA, 25 bp, Saccharomyces pastorianus
tgcgttgccggcacgcagtgaagaa

SEQ ID NO: 69174 - DNA, 25 bp, Saccharomyces pastorianus
tttgacatcgaggataaagcttctg

SEQ ID NO: 69175 - DNA, 25 bp, Saccharomyces pastorianus
cagcgatattccagatgcgttgccg

SEQ ID NO: 69176 - DNA, 25 bp, Saccharomyces pastorianus
taaagcttctgtggctcccgaacaa

SEQ ID NO: 69177 - DNA, 25 bp, Saccharomyces pastorianus
tcatatacggatcaggctgccgcca

SEQ ID NO: 69178 - DNA, 25 bp, Saccharomyces pastorianus
gccagcgatattccagatgcgttgc

SEQ ID NO: 69179 - DNA, 25 bp, Saccharomyces pastorianus
gatattccagatgcgttgccggcac

SEQ ID NO: 69180 - DNA, 25 bp, Saccharomyces pastorianus
aggataaagcttctgtggctcccga

SEQ ID NO: 69181 - DNA, 25 bp, Saccharomyces pastorianus
ggctcccgaacaagaacacacgtca

SEQ ID NO: 69182 - DNA, 25 bp, Saccharomyces pastorianus
agcttctgtggctcccgaacaagaa

SEQ ID NO: 69183 - DNA, 25 bp, Saccharomyces pastorianus
acggatcaggctgccgccagcgata

SEQ ID NO: 69184 - DNA, 25 bp, Saccharomyces pastorianus
aagatttgccatccttcagtgacaa

SEQ ID NO: 69185 - DNA, 25 bp, Saccharomyces pastorianus
gccttcctcgtcatctgaatttgaa

SEQ ID NO: 69186 - DNA, 25 bp, Saccharomyces pastorianus
aaggaccgtggaatcttggcagaga

SEQ ID NO: 69187 - DNA, 25 bp, Saccharomyces pastorianus
atagcgacaactccctctctaatat

SEQ ID NO: 69188 - DNA, 25 bp, Saccharomyces pastorianus
ccaccttccaccataaatcagagat

SEQ ID NO: 69189 - DNA, 25 bp, Saccharomyces pastorianus
gatttctttggcttcaacatccgtt

SEQ ID NO: 69190 - DNA, 25 bp, Saccharomyces pastorianus
tcagatggcatttcgttggtcaata

SEQ ID NO: 69191 - DNA, 25 bp, Saccharomyces pastorianus
tttagtcttgtctttaacctctcca

SEQ ID NO: 69192 - DNA, 25 bp, Saccharomyces pastorianus
atagtcacgtattccgccttgatcg

SEQ ID NO: 69193 - DNA, 25 bp, Saccharomyces pastorianus
actattccctgatttcgatagcgcc

SEQ ID NO: 69194 - DNA, 25 bp, Saccharomyces pastorianus
tacatctcctgtgtcatagtcacgt

SEQ ID NO: 69195 - DNA, 25 bp, Saccharomyces pastorianus
aaacgtcgtgcgtctccagggcggt

SEQ ID NO: 69196 - DNA, 25 bp, Saccharomyces pastorianus
ctgcgccagcaagaaaaacgtcgtg

SEQ ID NO: 69197 - DNA, 25 bp, Saccharomyces pastorianus
cgtgcgtctccagggcggtcttgca

SEQ ID NO: 69198 - DNA, 25 bp, Saccharomyces pastorianus
atgggcgattggaagggcagcgaca

SEQ ID NO: 69199 - DNA, 25 bp, Saccharomyces pastorianus
aaaacgtcgtgcgtctccagggcgg

SEQ ID NO: 69200 - DNA, 25 bp, Saccharomyces pastorianus
acgtcgtgcgtctccagggcggtct

SEQ ID NO: 69201 - DNA, 25 bp, Saccharomyces pastorianus
aagggcagcgacagctggcctgcgc

SEQ ID NO: 69202 - DNA, 25 bp, Saccharomyces pastorianus
gaaaaacgtcgtgcgtctccagggc

SEQ ID NO: 69203 - DNA, 25 bp, Saccharomyces pastorianus
gcaagaaaaacgtcgtgcgtctcca

SEQ ID NO: 69204 - DNA, 25 bp, Saccharomyces pastorianus
aagaaaaacgtcgtgcgtctccagg

SEQ ID NO: 69205 - DNA, 25 bp, Saccharomyces pastorianus
tggcctgcgccagcaagaaaaacgt

SEQ ID NO: 69206 - DNA, 25 bp, Saccharomyces pastorianus
accagccgtcgttgacgaatgctat

SEQ ID NO: 69207 - DNA, 25 bp, Saccharomyces pastorianus
gaatttcgtgttccaagtcgtcaac

SEQ ID NO: 69208 - DNA, 25 bp, Saccharomyces pastorianus
aaccctgaagttgtggagctgatgt

SEQ ID NO: 69209 - DNA, 25 bp, Saccharomyces pastorianus
gacagctgctttaatttccaaatcg

SEQ ID NO: 69210 - DNA, 25 bp, Saccharomyces pastorianus
gggactacaattatctcatgaccag

SEQ ID NO: 69211 - DNA, 25 bp, Saccharomyces pastorianus
gtgccgctatattatctggttcaac

SEQ ID NO: 69212 - DNA, 25 bp, Saccharomyces pastorianus
ctgtattggctggtgattttctctt

SEQ ID NO: 69213 - DNA, 25 bp, Saccharomyces pastorianus
ggcaacgctgctttcactaacaaga

SEQ ID NO: 69214 - DNA, 25 bp, Saccharomyces pastorianus
gaatacatccatcgatccagacaca

SEQ ID NO: 69215 - DNA, 25 bp, Saccharomyces pastorianus
agaggaaggccaaccggcaacgctg

SEQ ID NO: 69216 - DNA, 25 bp, Saccharomyces pastorianus
ccaaatcgtgtagatgtgccgctat

SEQ ID NO: 69217 - DNA, 25 bp, Saccharomyces pastorianus
ggcgagaaggccgagtactcccgtc

SEQ ID NO: 69218 - DNA, 25 bp, Saccharomyces pastorianus
acgattattatggtggtgccgccgg

SEQ ID NO: 69219 - DNA, 25 bp, Saccharomyces pastorianus
tgctaacgattattatggtggtgcc

SEQ ID NO: 69220 - DNA, 25 bp, Saccharomyces pastorianus
ctaacgattattatggtggtgccgc

SEQ ID NO: 69221 - DNA, 25 bp, Saccharomyces pastorianus
gtctgctaacgattattatggtggt

SEQ ID NO: 69222 - DNA, 25 bp, Saccharomyces pastorianus
attattatggtggtgccgccggcga

SEQ ID NO: 69223 - DNA, 25 bp, Saccharomyces pastorianus
cgattattatggtggtgccgccggc

SEQ ID NO: 69224 - DNA, 25 bp, Saccharomyces pastorianus
gagaaggccgagtactcccgtccct

SEQ ID NO: 69225 - DNA, 25 bp, Saccharomyces pastorianus
tattatggtggtgccgccggcgaga

SEQ ID NO: 69226 - DNA, 25 bp, Saccharomyces pastorianus
aacgattattatggtggtgccgccg

SEQ ID NO: 69227 - DNA, 25 bp, Saccharomyces pastorianus
gcgagaaggccgagtactcccgtcc

SEQ ID NO: 69228 - DNA, 25 bp, Saccharomyces pastorianus
aagtccgacattgcgcagggcgaga

SEQ ID NO: 69229 - DNA, 25 bp, Saccharomyces pastorianus
taagtcctcaattttctctgcatct

SEQ ID NO: 69230 - DNA, 25 bp, Saccharomyces pastorianus
ggaggtacctgcagaattcttccac

SEQ ID NO: 69231 - DNA, 25 bp, Saccharomyces pastorianus
aaaggttcatttcggtggcatacac

SEQ ID NO: 69232 - DNA, 25 bp, Saccharomyces pastorianus
tataagagaatctgcccttggcggg

SEQ ID NO: 69233 - DNA, 25 bp, Saccharomyces pastorianus
gaatctaccgccaagcttttggagt

SEQ ID NO: 69234 - DNA, 25 bp, Saccharomyces pastorianus
acactagtcattggtactcctttct

SEQ ID NO: 69235 - DNA, 25 bp, Saccharomyces pastorianus
gtttcatgaaacagcgctagtcccc

SEQ ID NO: 69236 - DNA, 25 bp, Saccharomyces pastorianus
gaaccatccggttccacgatgataa

SEQ ID NO: 69237 - DNA, 25 bp, Saccharomyces pastorianus
gataaaggccgcttgaatctaccgc

SEQ ID NO: 69238 - DNA, 25 bp, Saccharomyces pastorianus
gatactttattcgatgctttggcac

SEQ ID NO: 69239 - DNA, 25 bp, Saccharomyces pastorianus
gacgggcggtacaggtactgctact

SEQ ID NO: 69240 - DNA, 25 bp, Saccharomyces pastorianus
gtatactaaacccagacgaatgcgt

SEQ ID NO: 69241 - DNA, 25 bp, Saccharomyces pastorianus
caagagaagcatacgcctgcgacgg

SEQ ID NO: 69242 - DNA, 25 bp, Saccharomyces pastorianus
ataatttggaggacgcatgctctaa

SEQ ID NO: 69243 - DNA, 25 bp, Saccharomyces pastorianus
ttcatatggcgagctgtcgaacgtt

SEQ ID NO: 69244 - DNA, 25 bp, Saccharomyces pastorianus
gtcgaacgtttttctattggccaga

SEQ ID NO: 69245 - DNA, 25 bp, Saccharomyces pastorianus
agtcggccatggattgttttctgca

SEQ ID NO: 69246 - DNA, 25 bp, Saccharomyces pastorianus
acgaatgcgttgacttggtgctaaa

SEQ ID NO: 69247 - DNA, 25 bp, Saccharomyces pastorianus
tgttcatttgggacccgattttttg

SEQ ID NO: 69248 - DNA, 25 bp, Saccharomyces pastorianus
atgtgcaaacacctgatagcggagg

SEQ ID NO: 69249 - DNA, 25 bp, Saccharomyces pastorianus
ggtactgctactattgacgataact

SEQ ID NO: 69250 - DNA, 25 bp, Saccharomyces pastorianus
aacgatgaagctgatggctccgctg

SEQ ID NO: 69251 - DNA, 25 bp, Saccharomyces pastorianus
tggagaaaccatcctttttggacca

SEQ ID NO: 69252 - DNA, 25 bp, Saccharomyces pastorianus
gtgctacaggattttcaaccaagga

SEQ ID NO: 69253 - DNA, 25 bp, Saccharomyces pastorianus
agagccgccggcaggttacgtacca

SEQ ID NO: 69254 - DNA, 25 bp, Saccharomyces pastorianus
tattggtcgtggtgctacaggattt

SEQ ID NO: 69255 - DNA, 25 bp, Saccharomyces pastorianus
gaagctactgattttacgagacgga

SEQ ID NO: 69256 - DNA, 25 bp, Saccharomyces pastorianus
ggatgaacattccagaagctactga

SEQ ID NO: 69257 - DNA, 25 bp, Saccharomyces pastorianus
tttttggaccaagagccgccggcag

SEQ ID NO: 69258 - DNA, 25 bp, Saccharomyces pastorianus
gataccgcgaagacatcagctctaa

SEQ ID NO: 69259 - DNA, 25 bp, Saccharomyces pastorianus
ggctccgctgtgaaaacgcaatttg

SEQ ID NO: 69260 - DNA, 25 bp, Saccharomyces pastorianus
gaaagataccaaaacgataccgcga

SEQ ID NO: 69261 - DNA, 25 bp, Saccharomyces pastorianus
agcaactcttccaatgactaacgta

SEQ ID NO: 69262 - DNA, 25 bp, Saccharomyces pastorianus
ggaagatacgatgcagaatccattg

SEQ ID NO: 69263 - DNA, 25 bp, Saccharomyces pastorianus
gatagcattcttagagacccagttg

SEQ ID NO: 69264 - DNA, 25 bp, Saccharomyces pastorianus
gttcctttcaatcatgtagcaactc

SEQ ID NO: 69265 - DNA, 25 bp, Saccharomyces pastorianus
gacccagttggctatgaagatacct

SEQ ID NO: 69266 - DNA, 25 bp, Saccharomyces pastorianus
aacagcaatgagacgaattcgaaca

SEQ ID NO: 69267 - DNA, 25 bp, Saccharomyces pastorianus
ttgagttgcctgcttcattagaagt

SEQ ID NO: 69268 - DNA, 25 bp, Saccharomyces pastorianus
tagaaagctatcatcatcacttcat

SEQ ID NO: 69269 - DNA, 25 bp, Saccharomyces pastorianus
aagatgttggcctatggcaggtcaa

SEQ ID NO: 69270 - DNA, 25 bp, Saccharomyces pastorianus
actcaaatcgagctacagttgtcta

SEQ ID NO: 69271 - DNA, 25 bp, Saccharomyces pastorianus
tataccccaagcttttgagttgcct

SEQ ID NO: 69272 - DNA, 25 bp, Saccharomyces pastorianus
tgtagtatttttggcaccgttgcgt

SEQ ID NO: 69273 - DNA, 25 bp, Saccharomyces pastorianus
ttctgtcatttcagtgtccaactcc

SEQ ID NO: 69274 - DNA, 25 bp, Saccharomyces pastorianus
tgtcgcagcctcgtccaaggaagag

SEQ ID NO: 69275 - DNA, 25 bp, Saccharomyces pastorianus
gaatccaagaaagtcgacccctgtg

SEQ ID NO: 69276 - DNA, 25 bp, Saccharomyces pastorianus
aggtgcatttgctggtgactcttcg

SEQ ID NO: 69277 - DNA, 25 bp, Saccharomyces pastorianus
ggtcgtgtttacatggctagcagcc

SEQ ID NO: 69278 - DNA, 25 bp, Saccharomyces pastorianus
agattaatgtgctctttggcccagc

SEQ ID NO: 69279 - DNA, 25 bp, Saccharomyces pastorianus
cgcctatttttcgtttggtggtatg

SEQ ID NO: 69280 - DNA, 25 bp, Saccharomyces pastorianus
ggctagcagccatcgcaggtttgag

SEQ ID NO: 69281 - DNA, 25 bp, Saccharomyces pastorianus
atataccgtatcctcattatctacc

SEQ ID NO: 69282 - DNA, 25 bp, Saccharomyces pastorianus
gactcttcggcttccaggttcaaaa

SEQ ID NO: 69283 - DNA, 25 bp, Saccharomyces pastorianus
ttgtaggcacagtcaagaacccatt

SEQ ID NO: 69284 - DNA, 25 bp, Saccharomyces pastorianus
ttgtacgacgtcaacaactcaattg

SEQ ID NO: 69285 - DNA, 25 bp, Saccharomyces pastorianus
tgatttcgtcgccaagggtgttaat

SEQ ID NO: 69286 - DNA, 25 bp, Saccharomyces pastorianus
ttggctcatgccgtggtcaatgcaa

SEQ ID NO: 69287 - DNA, 25 bp, Saccharomyces pastorianus
aataacctggtcaagcaaatcgaaa

SEQ ID NO: 69288 - DNA, 25 bp, Saccharomyces pastorianus
gccttaaaatctcacggaggtgctc

SEQ ID NO: 69289 - DNA, 25 bp, Saccharomyces pastorianus
ccaaggacacccatgaacctggtta

SEQ ID NO: 69290 - DNA, 25 bp, Saccharomyces pastorianus
cttagtcgctacagtaagagcctta

SEQ ID NO: 69291 - DNA, 25 bp, Saccharomyces pastorianus
aaaggtgcattagacttggctcatg

SEQ ID NO: 69292 - DNA, 25 bp, Saccharomyces pastorianus
attgaacgcgggagcatctcatgcc

SEQ ID NO: 69293 - DNA, 25 bp, Saccharomyces pastorianus
taagccaggacaaccattaccaaag

SEQ ID NO: 69294 - DNA, 25 bp, Saccharomyces pastorianus
aaatacaacaataccttgtggaatc

SEQ ID NO: 69295 - DNA, 25 bp, Saccharomyces pastorianus
agtcaaatacaacaataccttgtgg

SEQ ID NO: 69296 - DNA, 25 bp, Saccharomyces pastorianus
gtcaaatacaacaataccttgtgga

SEQ ID NO: 69297 - DNA, 25 bp, Saccharomyces pastorianus
gcacaactaaaaagtcaaatacaac

SEQ ID NO: 69298 - DNA, 25 bp, Saccharomyces pastorianus
caaatacaacaataccttgtggaat

SEQ ID NO: 69299 - DNA, 25 bp, Saccharomyces pastorianus
aatacaacaataccttgtggaatca

SEQ ID NO: 69300 - DNA, 25 bp, Saccharomyces pastorianus
aaaagtcaaatacaacaataccttg

SEQ ID NO: 69301 - DNA, 25 bp, Saccharomyces pastorianus
aagtcaaatacaacaataccttgtg

SEQ ID NO: 69302 - DNA, 25 bp, Saccharomyces pastorianus
aaagtcaaatacaacaataccttgt

SEQ ID NO: 69303 - DNA, 25 bp, Saccharomyces pastorianus
tcaaatacaacaataccttgtggaa

SEQ ID NO: 69304 - DNA, 25 bp, Saccharomyces pastorianus
taaaaagtcaaatacaacaatacct

SEQ ID NO: 69305 - DNA, 25 bp, Saccharomyces pastorianus
ggctttgcttgttaaccctgaacta

SEQ ID NO: 69306 - DNA, 25 bp, Saccharomyces pastorianus
gcagaaactcttggcgacggtgatc

SEQ ID NO: 69307 - DNA, 25 bp, Saccharomyces pastorianus
gactgcggaaacatggctctccata

SEQ ID NO: 69308 - DNA, 25 bp, Saccharomyces pastorianus
cagaactctacgaaagggctttgct

SEQ ID NO: 69309 - DNA, 25 bp, Saccharomyces pastorianus
taccctgggccattgttatctgatg

SEQ ID NO: 69310 - DNA, 25 bp, Saccharomyces pastorianus
tgatcgggctgcaatggcgtatgat

SEQ ID NO: 69311 - DNA, 25 bp, Saccharomyces pastorianus
gagacatgtttcaaagggccgcaga

SEQ ID NO: 69312 - DNA, 25 bp, Saccharomyces pastorianus
tgccactttacaattcaatccctct

SEQ ID NO: 69313 - DNA, 25 bp, Saccharomyces pastorianus
tctccatagcttccttggcagaaac

SEQ ID NO: 69314 - DNA, 25 bp, Saccharomyces pastorianus
aactatcggacgtatgggctaccct

SEQ ID NO: 69315 - DNA, 25 bp, Saccharomyces pastorianus
aatgcctaccaacaagcgctatatc

SEQ ID NO: 69316 - DNA, 25 bp, Saccharomyces pastorianus
gccatatcgaatcaaacctctgcag

SEQ ID NO: 69317 - DNA, 25 bp, Saccharomyces pastorianus
aaatactgcttcttctatcgaggag

SEQ ID NO: 69318 - DNA, 25 bp, Saccharomyces pastorianus
agccagctaatgtacaaccgacttt

SEQ ID NO: 69319 - DNA, 25 bp, Saccharomyces pastorianus
tcctcccatggaatcgtctaacgtg

SEQ ID NO: 69320 - DNA, 25 bp, Saccharomyces pastorianus
gaattcaacgcctgagacgactaac

SEQ ID NO: 69321 - DNA, 25 bp, Saccharomyces pastorianus
taactccgagcattgaaccacgatc

SEQ ID NO: 69322 - DNA, 25 bp, Saccharomyces pastorianus
aggcaagttcaatcccttcaacaat

SEQ ID NO: 69323 - DNA, 25 bp, Saccharomyces pastorianus
aaacagaccctacagctgctgtgga

SEQ ID NO: 69324 - DNA, 25 bp, Saccharomyces pastorianus
atccatgctcaagaactctcacaag

SEQ ID NO: 69325 - DNA, 25 bp, Saccharomyces pastorianus
aagatgaatctctcgctacaacggc

SEQ ID NO: 69326 - DNA, 25 bp, Saccharomyces pastorianus
tagccctaccgaggaaactccagta

SEQ ID NO: 69327 - DNA, 25 bp, Saccharomyces pastorianus
gaactgcagcctgctgttgttgtac

SEQ ID NO: 69328 - DNA, 25 bp, Saccharomyces pastorianus
ggaactgcagcctgctgttgttgta

SEQ ID NO: 69329 - DNA, 25 bp, Saccharomyces pastorianus
actgcagcctgctgttgttgtacct

SEQ ID NO: 69330 - DNA, 25 bp, Saccharomyces pastorianus
ttgaggaactgcagcctgctgttgt

SEQ ID NO: 69331 - DNA, 25 bp, Saccharomyces pastorianus
tgcagcctgctgttgttgtacctgt

SEQ ID NO: 69332 - DNA, 25 bp, Saccharomyces pastorianus
gcagcctgctgttgttgtacctgtt

SEQ ID NO: 69333 - DNA, 25 bp, Saccharomyces pastorianus
tccagcggctgttgaggaactgcag

SEQ ID NO: 69334 - DNA, 25 bp, Saccharomyces pastorianus
agcctgctgttgttgtacctgttgc

SEQ ID NO: 69335 - DNA, 25 bp, Saccharomyces pastorianus
agcggctgttgaggaactgcagcct

SEQ ID NO: 69336 - DNA, 25 bp, Saccharomyces pastorianus
aactgcagcctgctgttgttgtacc

SEQ ID NO: 69337 - DNA, 25 bp, Saccharomyces pastorianus
gtccagcggctgttgaggaactgca

SEQ ID NO: 69338 - DNA, 25 bp, Saccharomyces pastorianus
gaactgcagcctgctgttgttgtac

SEQ ID NO: 69339 - DNA, 25 bp, Saccharomyces pastorianus
tcaccgcccggattcattttttctt

SEQ ID NO: 69340 - DNA, 25 bp, Saccharomyces pastorianus
actgcagcctgctgttgttgtacct

SEQ ID NO: 69341 - DNA, 25 bp, Saccharomyces pastorianus
ttgaggaactgcagcctgctgttgt

SEQ ID NO: 69342 - DNA, 25 bp, Saccharomyces pastorianus
tgcagcctgctgttgttgtacctgt

SEQ ID NO: 69343 - DNA, 25 bp, Saccharomyces pastorianus
gctgctgagcgggttgttccattat

SEQ ID NO: 69344 - DNA, 25 bp, Saccharomyces pastorianus
gcagcctgctgttgttgtacctgtt

SEQ ID NO: 69345 - DNA, 25 bp, Saccharomyces pastorianus
tccagcggctgttgaggaactgcag

SEQ ID NO: 69346 - DNA, 25 bp, Saccharomyces pastorianus
tccattattgtttgttcaccgcccg

SEQ ID NO: 69347 - DNA, 25 bp, Saccharomyces pastorianus
agcctgctgttgttgtacctgttgc

SEQ ID NO: 69348 - DNA, 25 bp, Saccharomyces pastorianus
gtccagcggctgttgaggaactgca

SEQ ID NO: 69349 - DNA, 25 bp, Saccharomyces pastorianus
tccaaacttggaattctaggtagat

SEQ ID NO: 69350 - DNA, 25 bp, Saccharomyces pastorianus
ctttttgtatactagcgtgctttgt

SEQ ID NO: 69351 - DNA, 25 bp, Saccharomyces pastorianus
caaacttggaattctaggtagatct

SEQ ID NO: 69352 - DNA, 25 bp, Saccharomyces pastorianus
ttgtatactagcgtgctttgtggag

SEQ ID NO: 69353 - DNA, 25 bp, Saccharomyces pastorianus
tggctttttgtatactagcgtgctt

SEQ ID NO: 69354 - DNA, 25 bp, Saccharomyces pastorianus
ttttgtatactagcgtgctttgtgg

SEQ ID NO: 69355 - DNA, 25 bp, Saccharomyces pastorianus
ggctttttgtatactagcgtgcttt

SEQ ID NO: 69356 - DNA, 25 bp, Saccharomyces pastorianus
gacattaagcggcaattccaaactt

SEQ ID NO: 69357 - DNA, 25 bp, Saccharomyces pastorianus
gctttttgtatactagcgtgctttg

SEQ ID NO: 69358 - DNA, 25 bp, Saccharomyces pastorianus
atggctttttgtatactagcgtgct

SEQ ID NO: 69359 - DNA, 25 bp, Saccharomyces pastorianus
ctagcgtgctttgtggagacattaa

SEQ ID NO: 69360 - DNA, 25 bp, Saccharomyces pastorianus
gaaacaggagcgcagcctatgcaaa

SEQ ID NO: 69361 - DNA, 25 bp, Saccharomyces pastorianus
gcaaacttccacacacaaacttcca

SEQ ID NO: 69362 - DNA, 25 bp, Saccharomyces pastorianus
gcagtatttcctatggagctcggaa

SEQ ID NO: 69363 - DNA, 25 bp, Saccharomyces pastorianus
gtatttcctatggagctcggaaaca

SEQ ID NO: 69364 - DNA, 25 bp, Saccharomyces pastorianus
aacaggagcgcagcctatgcaaaca

SEQ ID NO: 69365 - DNA, 25 bp, Saccharomyces pastorianus
gaagaagaggaacgcccgcaaactt

SEQ ID NO: 69366 - DNA, 25 bp, Saccharomyces pastorianus
acacgcaattgcagtatttcctatg

SEQ ID NO: 69367 - DNA, 25 bp, Saccharomyces pastorianus
attgcagtatttcctatggagctcg

SEQ ID NO: 69368 - DNA, 25 bp, Saccharomyces pastorianus
gcaattgcagtatttcctatggagc

SEQ ID NO: 69369 - DNA, 25 bp, Saccharomyces pastorianus
gctcggaaacaggagcgcagcctat

SEQ ID NO: 69370 - DNA, 25 bp, Saccharomyces pastorianus
cttccacacacgcaattgcagtatt

SEQ ID NO: 69371 - DNA, 25 bp, Saccharomyces pastorianus
ctaccccatttttggctacgtacag

SEQ ID NO: 69372 - DNA, 25 bp, Saccharomyces pastorianus
agtcttgaccatgggttcattcggt

SEQ ID NO: 69373 - DNA, 25 bp, Saccharomyces pastorianus
gaatctaactacgaatccatcaagg

SEQ ID NO: 69374 - DNA, 25 bp, Saccharomyces pastorianus
caggccaccgtggtttagtcttgac

SEQ ID NO: 69375 - DNA, 25 bp, Saccharomyces pastorianus
gtgtgcggaattaccaattaccgtt

SEQ ID NO: 69376 - DNA, 25 bp, Saccharomyces pastorianus
ggctacgtacagtggttctaaatct

SEQ ID NO: 69377 - DNA, 25 bp, Saccharomyces pastorianus
agttaacaacgtcggccaatcacat

SEQ ID NO: 69378 - DNA, 25 bp, Saccharomyces pastorianus
ttggtctaactccttagccggtgag

SEQ ID NO: 69379 - DNA, 25 bp, Saccharomyces pastorianus
actatcaacaacactgccacattat

SEQ ID NO: 69380 - DNA, 25 bp, Saccharomyces pastorianus
attcggtggattgattcctacccca

SEQ ID NO: 69381 - DNA, 25 bp, Saccharomyces pastorianus
atttggttactagttccatgtctaa

SEQ ID NO: 69382 - DNA, 25 bp, Saccharomyces pastorianus
acaagatgcacaccaactcgttttt

SEQ ID NO: 69383 - DNA, 25 bp, Saccharomyces pastorianus
agaagtgcgttgacttgcacccaga

SEQ ID NO: 69384 - DNA, 25 bp, Saccharomyces pastorianus
gactacacctatattctatggacgg

SEQ ID NO: 69385 - DNA, 25 bp, Saccharomyces pastorianus
tgtacctagacacccatttttctta

SEQ ID NO: 69386 - DNA, 25 bp, Saccharomyces pastorianus
ggtatgttccgtatatgaccatcat

SEQ ID NO: 69387 - DNA, 25 bp, Saccharomyces pastorianus
tagattctttgttgactgtgccggc

SEQ ID NO: 69388 - DNA, 25 bp, Saccharomyces pastorianus
aaagatggtcgaacacagccggtga

SEQ ID NO: 69389 - DNA, 25 bp, Saccharomyces pastorianus
gttctttcgcattacggtggtatct

SEQ ID NO: 69390 - DNA, 25 bp, Saccharomyces pastorianus
actgtgccggcattccttaggaaaa

SEQ ID NO: 69391 - DNA, 25 bp, Saccharomyces pastorianus
aactcgtttttctccatatctaaag

SEQ ID NO: 69392 - DNA, 25 bp, Saccharomyces pastorianus
taggaaaacctctcccacgggtgtg

SEQ ID NO: 69393 - DNA, 25 bp, Saccharomyces pastorianus
tattttgccgcaagactgtcacaga

SEQ ID NO: 69394 - DNA, 25 bp, Saccharomyces pastorianus
gacatggatcacctcctggatggaa

SEQ ID NO: 69395 - DNA, 25 bp, Saccharomyces pastorianus
gcgactacaaacacgtctgttcttg

SEQ ID NO: 69396 - DNA, 25 bp, Saccharomyces pastorianus
gacgcgcctatagattctacgaaga

SEQ ID NO: 69397 - DNA, 25 bp, Saccharomyces pastorianus
atttgctcgatcaaggttccacatc

SEQ ID NO: 69398 - DNA, 25 bp, Saccharomyces pastorianus
agcaatggtttggttcggtcacaga

SEQ ID NO: 69399 - DNA, 25 bp, Saccharomyces pastorianus
acccgcttttcgctaatgacatgga

SEQ ID NO: 69400 - DNA, 25 bp, Saccharomyces pastorianus
tttgccccatttgataacgacacca

SEQ ID NO: 69401 - DNA, 25 bp, Saccharomyces pastorianus
gaaatctcgtttccaatgacctgat

SEQ ID NO: 69402 - DNA, 25 bp, Saccharomyces pastorianus
accatattcccgtatgatccagtga

SEQ ID NO: 69403 - DNA, 25 bp, Saccharomyces pastorianus
tggaaaaccgatacactttgcccca

SEQ ID NO: 69404 - DNA, 25 bp, Saccharomyces pastorianus
agagccagtacctttaccagaagat

SEQ ID NO: 69405 - DNA, 25 bp, Saccharomyces pastorianus
gagtattctgattttgcatccgatg

SEQ ID NO: 69406 - DNA, 25 bp, Saccharomyces pastorianus
agaagatgctgaacctgtgtttgag

SEQ ID NO: 69407 - DNA, 25 bp, Saccharomyces pastorianus
gaagaactggcttcgttgggtaacg

SEQ ID NO: 69408 - DNA, 25 bp, Saccharomyces pastorianus
gaaacgtttggcttgaatccggttg

SEQ ID NO: 69409 - DNA, 25 bp, Saccharomyces pastorianus
aacactgacgaaaacatggatcttg

SEQ ID NO: 69410 - DNA, 25 bp, Saccharomyces pastorianus
aaatgcgctagctacgactgaagat

SEQ ID NO: 69411 - DNA, 25 bp, Saccharomyces pastorianus
acactcttcgtgctaaacttgatga

SEQ ID NO: 69412 - DNA, 25 bp, Saccharomyces pastorianus
atgacgacggtgaagattctaccaa

SEQ ID NO: 69413 - DNA, 25 bp, Saccharomyces pastorianus
ggcaaaatacgtcgccaaatatgaa

SEQ ID NO: 69414 - DNA, 25 bp, Saccharomyces pastorianus
gaatccggttgaactgaacaatcta

SEQ ID NO: 69415 - DNA, 25 bp, Saccharomyces pastorianus
gtattccggttctgaaacgatcgat

SEQ ID NO: 69416 - DNA, 25 bp, Saccharomyces pastorianus
taagaatgatctaccgggccctgag

SEQ ID NO: 69417 - DNA, 25 bp, Saccharomyces pastorianus
gacattgggcactctacctatactt

SEQ ID NO: 69418 - DNA, 25 bp, Saccharomyces pastorianus
gaaggtactctctgctaacaccaat

SEQ ID NO: 69419 - DNA, 25 bp, Saccharomyces pastorianus
tacctatacttgctccattctggat

SEQ ID NO: 69420 - DNA, 25 bp, Saccharomyces pastorianus
gtaccgcttacgacaaacactttgg

SEQ ID NO: 69421 - DNA, 25 bp, Saccharomyces pastorianus
ctcacagctgactcgcgaagaatta

SEQ ID NO: 69422 - DNA, 25 bp, Saccharomyces pastorianus
tgatattgacgtttcctcacagctg

SEQ ID NO: 69423 - DNA, 25 bp, Saccharomyces pastorianus
gtaaaccattgtcttccactttgaa

SEQ ID NO: 69424 - DNA, 25 bp, Saccharomyces pastorianus
gatcgatttctgatgcctttggtaa

SEQ ID NO: 69425 - DNA, 25 bp, Saccharomyces pastorianus
gtgcaatcacggaacatttcgctga

SEQ ID NO: 69426 - DNA, 25 bp, Saccharomyces pastorianus
gtggtctctccatatattgcagaat

SEQ ID NO: 69427 - DNA, 25 bp, Saccharomyces pastorianus
gaaaactctgtatctggcttttggg

SEQ ID NO: 69428 - DNA, 25 bp, Saccharomyces pastorianus
aacctcgaccatcgactggtgcgaa

SEQ ID NO: 69429 - DNA, 25 bp, Saccharomyces pastorianus
ccatcgactggtgcgaagagaacta

SEQ ID NO: 69430 - DNA, 25 bp, Saccharomyces pastorianus
cactctcacaaacagtgtgtttata

SEQ ID NO: 69431 - DNA, 25 bp, Saccharomyces pastorianus
gagaactatgtggtctctccatata

SEQ ID NO: 69432 - DNA, 25 bp, Saccharomyces pastorianus
gaatggtcaaacactctcacaaaca

SEQ ID NO: 69433 - DNA, 25 bp, Saccharomyces pastorianus
gttgggattatccagaaaactctgt

SEQ ID NO: 69434 - DNA, 25 bp, Saccharomyces pastorianus
gggaagatttcgttgggattatcca

SEQ ID NO: 69435 - DNA, 25 bp, Saccharomyces pastorianus
gtgtttatactttcagccgtatata

SEQ ID NO: 69436 - DNA, 25 bp, Saccharomyces pastorianus
gggcgaaacaacctcgaccatcgac

SEQ ID NO: 69437 - DNA, 25 bp, Saccharomyces pastorianus
ttatcagcttggtctaaattgcaaa

SEQ ID NO: 69438 - DNA, 25 bp, Saccharomyces pastorianus
atcagcttggtctaaattgcaaaaa

SEQ ID NO: 69439 - DNA, 25 bp, Saccharomyces pastorianus
gaattatcagcttggtctaaattgc

SEQ ID NO: 69440 - DNA, 25 bp, Saccharomyces pastorianus
tatcagcttggtctaaattgcaaaa

SEQ ID NO: 69441 - DNA, 25 bp, Saccharomyces pastorianus
actgaattatcagcttggtctaaat

SEQ ID NO: 69442 - DNA, 25 bp, Saccharomyces pastorianus
tcagcttggtctaaattgcaaaaaa

SEQ ID NO: 69443 - DNA, 25 bp, Saccharomyces pastorianus
aattatcagcttggtctaaattgca

SEQ ID NO: 69444 - DNA, 25 bp, Saccharomyces pastorianus
attatcagcttggtctaaattgcaa

SEQ ID NO: 69445 - DNA, 25 bp, Saccharomyces pastorianus
ccactgaattatcagcttggtctaa

SEQ ID NO: 69446 - DNA, 25 bp, Saccharomyces pastorianus
gccactgaattatcagcttggtcta

SEQ ID NO: 69447 - DNA, 25 bp, Saccharomyces pastorianus
ctgaattatcagcttggtctaaatt

SEQ ID NO: 69448 - DNA, 25 bp, Saccharomyces pastorianus
tggctatggtatgcaatcacaactg

SEQ ID NO: 69449 - DNA, 25 bp, Saccharomyces pastorianus
gtttacgaactatccacgactcatt

SEQ ID NO: 69450 - DNA, 25 bp, Saccharomyces pastorianus
gtgttcaagtcaatcgccagttacg

SEQ ID NO: 69451 - DNA, 25 bp, Saccharomyces pastorianus
taagatttaccaccccttcattata

SEQ ID NO: 69452 - DNA, 25 bp, Saccharomyces pastorianus
cgactcattcactacagacgctaag

SEQ ID NO: 69453 - DNA, 25 bp, Saccharomyces pastorianus
gatgttctcaagatatgtcccttcc

SEQ ID NO: 69454 - DNA, 25 bp, Saccharomyces pastorianus
agctttgttgcaggttctacttatt

SEQ ID NO: 69455 - DNA, 25 bp, Saccharomyces pastorianus
gctgtccatgaatgctgtttacgaa

SEQ ID NO: 69456 - DNA, 25 bp, Saccharomyces pastorianus
gatctttcaaggcaacgcgtttcca

SEQ ID NO: 69457 - DNA, 25 bp, Saccharomyces pastorianus
agactactatgtttggttcccgaga

SEQ ID NO: 69458 - DNA, 25 bp, Saccharomyces pastorianus
gttcccgagaacgttgcatttgact

SEQ ID NO: 69459 - DNA, 25 bp, Saccharomyces pastorianus
cactcattgatcctctttacactga

SEQ ID NO: 69460 - DNA, 25 bp, Saccharomyces pastorianus
atcgttgtgccacctgttcagcgac

SEQ ID NO: 69461 - DNA, 25 bp, Saccharomyces pastorianus
tacactgatcgccatctgacttctt

SEQ ID NO: 69462 - DNA, 25 bp, Saccharomyces pastorianus
gtcatcgtccttaccatttgtagtt

SEQ ID NO: 69463 - DNA, 25 bp, Saccharomyces pastorianus
ttttttccagcatctgcactatacc

SEQ ID NO: 69464 - DNA, 25 bp, Saccharomyces pastorianus
tttcttttggcaccactcattgatc

SEQ ID NO: 69465 - DNA, 25 bp, Saccharomyces pastorianus
atctgcactatacctgaaactcttc

SEQ ID NO: 69466 - DNA, 25 bp, Saccharomyces pastorianus
gacctcagatctctttcttttggca

SEQ ID NO: 69467 - DNA, 25 bp, Saccharomyces pastorianus
atgacacagtcgtcatcgtccttac

SEQ ID NO: 69468 - DNA, 25 bp, Saccharomyces pastorianus
gacttcttgtcatcgttattcttgt

SEQ ID NO: 69469 - DNA, 25 bp, Saccharomyces pastorianus
tgaaactcttccatcgttgtgccac

SEQ ID NO: 69470 - DNA, 25 bp, Saccharomyces pastorianus
acgttttactgcgaacctagttcat

SEQ ID NO: 69471 - DNA, 25 bp, Saccharomyces pastorianus
cagttctctgttgcccaggtatgaa

SEQ ID NO: 69472 - DNA, 25 bp, Saccharomyces pastorianus
agatgatcctccattatattcgatg

SEQ ID NO: 69473 - DNA, 25 bp, Saccharomyces pastorianus
atgaaacctctttgacagtagcaca

SEQ ID NO: 69474 - DNA, 25 bp, Saccharomyces pastorianus
caaggatatattgccggaaccctat

SEQ ID NO: 69475 - DNA, 25 bp, Saccharomyces pastorianus
tgacgacgttgttattccaaactac

SEQ ID NO: 69476 - DNA, 25 bp, Saccharomyces pastorianus
tatcccaattatgttgctctcaaag

SEQ ID NO: 69477 - DNA, 25 bp, Saccharomyces pastorianus
attaattgagatcggcacgcctttc

SEQ ID NO: 69478 - DNA, 25 bp, Saccharomyces pastorianus
gtatacgggttttgctttgacgacg

SEQ ID NO: 69479 - DNA, 25 bp, Saccharomyces pastorianus
acgcctttccaaatgatcctgtcga

SEQ ID NO: 69480 - DNA, 25 bp, Saccharomyces pastorianus
aactacaccgaaggtctaccgagct

SEQ ID NO: 69481 - DNA, 25 bp, Saccharomyces pastorianus
cctatggatattttgctgccgattc

SEQ ID NO: 69482 - DNA, 25 bp, Saccharomyces pastorianus
taagtaatgatatggccgccttgca

SEQ ID NO: 69483 - DNA, 25 bp, Saccharomyces pastorianus
ttgcaattccattccgacgaacatg

SEQ ID NO: 69484 - DNA, 25 bp, Saccharomyces pastorianus
aggctacgataatgttttcccactt

SEQ ID NO: 69485 - DNA, 25 bp, Saccharomyces pastorianus
gagtgaaaccagatctttttgcaaa

SEQ ID NO: 69486 - DNA, 25 bp, Saccharomyces pastorianus
gtaacagtgatacctgcatgacaca

SEQ ID NO: 69487 - DNA, 25 bp, Saccharomyces pastorianus
gattatgcgagtcattaggctacga

SEQ ID NO: 69488 - DNA, 25 bp, Saccharomyces pastorianus
atctggtagtatttccatcatcaag

SEQ ID NO: 69489 - DNA, 25 bp, Saccharomyces pastorianus
tacgcagcctgtcggcaatgagtta

SEQ ID NO: 69490 - DNA, 25 bp, Saccharomyces pastorianus
gagatattatcttacttcccaacca

SEQ ID NO: 69491 - DNA, 25 bp, Saccharomyces pastorianus
aatactcagcgtgcattttccatat

SEQ ID NO: 69492 - DNA, 25 bp, Saccharomyces pastorianus
aaagggtcgcggcactaatccaggt

SEQ ID NO: 69493 - DNA, 25 bp, Saccharomyces pastorianus
aaatcgcctattaccttcttcatag

SEQ ID NO: 69494 - DNA, 25 bp, Saccharomyces pastorianus
aggaccatttgcttttctccatgga

SEQ ID NO: 69495 - DNA, 25 bp, Saccharomyces pastorianus
ggaagcaactgcttgcgtctccaga

SEQ ID NO: 69496 - DNA, 25 bp, Saccharomyces pastorianus
tttggcgaccgttcgtaacctcaat

SEQ ID NO: 69497 - DNA, 25 bp, Saccharomyces pastorianus
acccttttggtagtcgcaaactctg

SEQ ID NO: 69498 - DNA, 25 bp, Saccharomyces pastorianus
aaactctgcttggaggtttctcgcc

SEQ ID NO: 69499 - DNA, 25 bp, Saccharomyces pastorianus
tgcgtctccagagaatgtctcctga

SEQ ID NO: 69500 - DNA, 25 bp, Saccharomyces pastorianus
gacgcaaaccaggatacccttttgg

SEQ ID NO: 69501 - DNA, 25 bp, Saccharomyces pastorianus
atagcaacgtcgacttccaaagggt

SEQ ID NO: 69502 - DNA, 25 bp, Saccharomyces pastorianus
tacaggctgggtgctgacgcaaacc

SEQ ID NO: 69503 - DNA, 25 bp, Saccharomyces pastorianus
gcctcatttagcagtgtcggtatca

SEQ ID NO: 69504 - DNA, 25 bp, Saccharomyces pastorianus
gttctcgtactttggagtccctcat

SEQ ID NO: 69505 - DNA, 25 bp, Saccharomyces pastorianus
tccagagtggacctgatcttcttgt

SEQ ID NO: 69506 - DNA, 25 bp, Saccharomyces pastorianus
tttaacctctccacttgtaacttgg

SEQ ID NO: 69507 - DNA, 25 bp, Saccharomyces pastorianus
gttagtctttgacttttctgtctca

SEQ ID NO: 69508 - DNA, 25 bp, Saccharomyces pastorianus
gatcttcttgttgtccaggtcttgt

SEQ ID NO: 69509 - DNA, 25 bp, Saccharomyces pastorianus
acttggttcttttcctctcagcagt

SEQ ID NO: 69510 - DNA, 25 bp, Saccharomyces pastorianus
aggtcttgtttgcttgcctcattta

SEQ ID NO: 69511 - DNA, 25 bp, Saccharomyces pastorianus
tttcactgcttttgtttaacctctc

SEQ ID NO: 69512 - DNA, 25 bp, Saccharomyces pastorianus
tttctgtctcaatctgttctcgtac

SEQ ID NO: 69513 - DNA, 25 bp, Saccharomyces pastorianus
tcagcagtgctgattggcctctttt

SEQ ID NO: 69514 - DNA, 25 bp, Saccharomyces pastorianus
tgaagacacacaccagggccgtaca

SEQ ID NO: 69515 - DNA, 25 bp, Saccharomyces pastorianus
ttggacacaactcgtccttagaaaa

SEQ ID NO: 69516 - DNA, 25 bp, Saccharomyces pastorianus
acaccagggccgtacacgttatctt

SEQ ID NO: 69517 - DNA, 25 bp, Saccharomyces pastorianus
gggcccaagttagccaattgccaat

SEQ ID NO: 69518 - DNA, 25 bp, Saccharomyces pastorianus
gcatcagggatgattttctcccagg

SEQ ID NO: 69519 - DNA, 25 bp, Saccharomyces pastorianus
attgccaatctgtgacaaatgcatc

SEQ ID NO: 69520 - DNA, 25 bp, Saccharomyces pastorianus
aaatgaagacacacaccagggccgt

SEQ ID NO: 69521 - DNA, 25 bp, Saccharomyces pastorianus
agttagccaattgccaatctgtgac

SEQ ID NO: 69522 - DNA, 25 bp, Saccharomyces pastorianus
gccaattgccaatctgtgacaaatg

SEQ ID NO: 69523 - DNA, 25 bp, Saccharomyces pastorianus
gcccaagttagccaattgccaatct

SEQ ID NO: 69524 - DNA, 25 bp, Saccharomyces pastorianus
gacacaactcgtccttagaaaaagt

SEQ ID NO: 69525 - DNA, 25 bp, Saccharomyces pastorianus
tcaatacttgtttggtaatgatgta

SEQ ID NO: 69526 - DNA, 25 bp, Saccharomyces pastorianus
atgatgtatggaatactccgtacta

SEQ ID NO: 69527 - DNA, 25 bp, Saccharomyces pastorianus
ctatttttactgtgataaggattgt

SEQ ID NO: 69528 - DNA, 25 bp, Saccharomyces pastorianus
cgtactatttttactgtgataagga

SEQ ID NO: 69529 - DNA, 25 bp, Saccharomyces pastorianus
acttgtttggtaatgatgtatggaa

SEQ ID NO: 69530 - DNA, 25 bp, Saccharomyces pastorianus
gtactatttttactgtgataaggat

SEQ ID NO: 69531 - DNA, 25 bp, Saccharomyces pastorianus
gatgtatggaatactccgtactatt

SEQ ID NO: 69532 - DNA, 25 bp, Saccharomyces pastorianus
atgtatggaatactccgtactattt

SEQ ID NO: 69533 - DNA, 25 bp, Saccharomyces pastorianus
tgatgtatggaatactccgtactat

SEQ ID NO: 69534 - DNA, 25 bp, Saccharomyces pastorianus
ttactgtgataaggattgtaacgat

SEQ ID NO: 69535 - DNA, 25 bp, Saccharomyces pastorianus
aatgatgtatggaatactccgtact

SEQ ID NO: 69536 - DNA, 25 bp, Saccharomyces pastorianus
gaaaattattcgctgccactgtcgc

SEQ ID NO: 69537 - DNA, 25 bp, Saccharomyces pastorianus
ataccgctaccgtcgctaagaagta

SEQ ID NO: 69538 - DNA, 25 bp, Saccharomyces pastorianus
cattggtggtggtgataccgctacc

SEQ ID NO: 69539 - DNA, 25 bp, Saccharomyces pastorianus
aagtccttgttggacgaagtcgtca

SEQ ID NO: 69540 - DNA, 25 bp, Saccharomyces pastorianus
tcgctgccactgtcgcaaaggctaa

SEQ ID NO: 69541 - DNA, 25 bp, Saccharomyces pastorianus
aagtcgtcttaccagtcgatttcgt

SEQ ID NO: 69542 - DNA, 25 bp, Saccharomyces pastorianus
acttctggtaacactgtcatcattg

SEQ ID NO: 69543 - DNA, 25 bp, Saccharomyces pastorianus
ctctttcctcacttctagactaaaa

SEQ ID NO: 69544 - DNA, 25 bp, Saccharomyces pastorianus
aagaaattctttcctcacttcacgc

SEQ ID NO: 69545 - DNA, 25 bp, Saccharomyces pastorianus
gtcgtcaagagttccacttctggta

SEQ ID NO: 69546 - DNA, 25 bp, Saccharomyces pastorianus
aagttcgccgctggtaccaagtcct

SEQ ID NO: 69547 - DNA, 25 bp, Saccharomyces pastorianus
gaaatagctccctcaaagaattgtg

SEQ ID NO: 69548 - DNA, 25 bp, Saccharomyces pastorianus
gatgggtctactacttcttcaaaaa

SEQ ID NO: 69549 - DNA, 25 bp, Saccharomyces pastorianus
actacccgcggctctgaaagagtta

SEQ ID NO: 69550 - DNA, 25 bp, Saccharomyces pastorianus
gaattgtgcaaatactacccgcggc

SEQ ID NO: 69551 - DNA, 25 bp, Saccharomyces pastorianus
tagaaacagtcagggccaaggccaa

SEQ ID NO: 69552 - DNA, 25 bp, Saccharomyces pastorianus
agggagctttgcagtccatgtggac

SEQ ID NO: 69553 - DNA, 25 bp, Saccharomyces pastorianus
ttcagtggcgaagtggtcctgcaca

SEQ ID NO: 69554 - DNA, 25 bp, Saccharomyces pastorianus
aaataaggacattggcggctggaaa

SEQ ID NO: 69555 - DNA, 25 bp, Saccharomyces pastorianus
gtccatgtggactcgcgtatggtaa

SEQ ID NO: 69556 - DNA, 25 bp, Saccharomyces pastorianus
tgttcctcacatgaaatagctccct

SEQ ID NO: 69557 - DNA, 25 bp, Saccharomyces pastorianus
gacaaactgttcttccaaacggtga

SEQ ID NO: 69558 - DNA, 25 bp, Saccharomyces pastorianus
atgtgtatgcgtatctccacacggt

SEQ ID NO: 69559 - DNA, 25 bp, Saccharomyces pastorianus
tccgctttggctttgtatgtgtcca

SEQ ID NO: 69560 - DNA, 25 bp, Saccharomyces pastorianus
ttttttctatgttgctgtctcgttc

SEQ ID NO: 69561 - DNA, 25 bp, Saccharomyces pastorianus
ggtccgattggtctcgtctaagaaa

SEQ ID NO: 69562 - DNA, 25 bp, Saccharomyces pastorianus
cagccgctaactaccagggtgggat

SEQ ID NO: 69563 - DNA, 25 bp, Saccharomyces pastorianus
ggattctattccaaagtctcaccat

SEQ ID NO: 69564 - DNA, 25 bp, Saccharomyces pastorianus
atgactttaagttccgtaatcggcg

SEQ ID NO: 69565 - DNA, 25 bp, Saccharomyces pastorianus
tattttcacccatacggtccgattg

SEQ ID NO: 69566 - DNA, 25 bp, Saccharomyces pastorianus
taaggaattccctaaccgcgatgga

SEQ ID NO: 69567 - DNA, 25 bp, Saccharomyces pastorianus
tcgttctccctgtctattattttca

SEQ ID NO: 69568 - DNA, 25 bp, Saccharomyces pastorianus
tcggaatctcttacttgtttggcct

SEQ ID NO: 69569 - DNA, 25 bp, Saccharomyces pastorianus
gcagtttctgggacaccgattcaag

SEQ ID NO: 69570 - DNA, 25 bp, Saccharomyces pastorianus
acctctgtttccacatcacggatga

SEQ ID NO: 69571 - DNA, 25 bp, Saccharomyces pastorianus
ccatcgaatgcactttccaggaatt

SEQ ID NO: 69572 - DNA, 25 bp, Saccharomyces pastorianus
aagacacgcacaactggcgcagttt

SEQ ID NO: 69573 - DNA, 25 bp, Saccharomyces pastorianus
gagccctggcggaattaacgctgat

SEQ ID NO: 69574 - DNA, 25 bp, Saccharomyces pastorianus
aattgcagatctggtgtcccatcga

SEQ ID NO: 69575 - DNA, 25 bp, Saccharomyces pastorianus
ggatccgcaacgtgtgctgcaattg

SEQ ID NO: 69576 - DNA, 25 bp, Saccharomyces pastorianus
acaagaaccacacgctgtacagctg

SEQ ID NO: 69577 - DNA, 25 bp, Saccharomyces pastorianus
gacgtcgagttcactgacatcttcc

SEQ ID NO: 69578 - DNA, 25 bp, Saccharomyces pastorianus
tacagagccaggacctcgacggaag

SEQ ID NO: 69579 - DNA, 25 bp, Saccharomyces pastorianus
gcgtactttttcaaccgcacaagcg

SEQ ID NO: 69580 - DNA, 25 bp, Saccharomyces pastorianus
tacttcgaccagtacactacgtttt

SEQ ID NO: 69581 - DNA, 25 bp, Saccharomyces pastorianus
ggaagagtacatcccggacctgaac

SEQ ID NO: 69582 - DNA, 25 bp, Saccharomyces pastorianus
gtacgcccaggtaaacaccctagcg

SEQ ID NO: 69583 - DNA, 25 bp, Saccharomyces pastorianus
ggcattcggcagactcggcgagtct

SEQ ID NO: 69584 - DNA, 25 bp, Saccharomyces pastorianus
tagcgacgcccacgcagttcgagca

SEQ ID NO: 69585 - DNA, 25 bp, Saccharomyces pastorianus
aaagaaacaagcaccacctcgccga

SEQ ID NO: 69586 - DNA, 25 bp, Saccharomyces pastorianus
gcggcaaaacacagcccagaaccgg

SEQ ID NO: 69587 - DNA, 25 bp, Saccharomyces pastorianus
tgcgcgaatgcgtaccgatcccgta

SEQ ID NO: 69588 - DNA, 25 bp, Saccharomyces pastorianus
gcaccacccctcagggaagagtaca

SEQ ID NO: 69589 - DNA, 25 bp, Saccharomyces pastorianus
agtcgttctaccagcgggcattcgg

SEQ ID NO: 69590 - DNA, 25 bp, Saccharomyces pastorianus
agttcgagcatctgcagtcgttcta

SEQ ID NO: 69591 - DNA, 25 bp, Saccharomyces pastorianus
ggttgttcgaactctctagcattaa

SEQ ID NO: 69592 - DNA, 25 bp, Saccharomyces pastorianus
tttatgcctgcagtttggacaatta

SEQ ID NO: 69593 - DNA, 25 bp, Saccharomyces pastorianus
attcattgccttaccaatcggtacc

SEQ ID NO: 69594 - DNA, 25 bp, Saccharomyces pastorianus
ccaccgccggtggtttatactattg

SEQ ID NO: 69595 - DNA, 25 bp, Saccharomyces pastorianus
aattctgcctagctggttttatgcc

SEQ ID NO: 69596 - DNA, 25 bp, Saccharomyces pastorianus
gctgccgtcaccttgaccaaagatg

SEQ ID NO: 69597 - DNA, 25 bp, Saccharomyces pastorianus
gtttccaacgtgtttatcattgtct

SEQ ID NO: 69598 - DNA, 25 bp, Saccharomyces pastorianus
ggaataacggctggcaattctgcct

SEQ ID NO: 69599 - DNA, 25 bp, Saccharomyces pastorianus
gggcattgctcgtttacaaacactg

SEQ ID NO: 69600 - DNA, 25 bp, Saccharomyces pastorianus
tatttgtacatgtattgcctccggg

SEQ ID NO: 69601 - DNA, 25 bp, Saccharomyces pastorianus
cagctggtgtgtgttcaatcaatta

SEQ ID NO: 69602 - DNA, 25 bp, Saccharomyces pastorianus
tcatcttcaggtgttgtttcgccaa

SEQ ID NO: 69603 - DNA, 25 bp, Saccharomyces pastorianus
atgtgctgcagcaaactggcttgta

SEQ ID NO: 69604 - DNA, 25 bp, Saccharomyces pastorianus
aagaatagtctcattgctgcacaaa

SEQ ID NO: 69605 - DNA, 25 bp, Saccharomyces pastorianus
tatatcgtggacactggctctcata

SEQ ID NO: 69606 - DNA, 25 bp, Saccharomyces pastorianus
tatccattgggcgtgaggtctaagt

SEQ ID NO: 69607 - DNA, 25 bp, Saccharomyces pastorianus
gtcgcaattgttggttgttccttaa

SEQ ID NO: 69608 - DNA, 25 bp, Saccharomyces pastorianus
gatgaccaaacaccaaggactctag

SEQ ID NO: 69609 - DNA, 25 bp, Saccharomyces pastorianus
tggctctcatacatcgtcattaggc

SEQ ID NO: 69610 - DNA, 25 bp, Saccharomyces pastorianus
attcatagcttctttttctgccact

SEQ ID NO: 69611 - DNA, 25 bp, Saccharomyces pastorianus
tgtcgtttgggtcatctctgcagaa

SEQ ID NO: 69612 - DNA, 25 bp, Saccharomyces pastorianus
aagtgtaccgctatatgtgctgcag

SEQ ID NO: 69613 - DNA, 25 bp, Saccharomyces pastorianus
tcacattgtctcttttccagtttag

SEQ ID NO: 69614 - DNA, 25 bp, Saccharomyces pastorianus
ttccagtttagcacgttctaaggct

SEQ ID NO: 69615 - DNA, 25 bp, Saccharomyces pastorianus
atgtgcttgtatttggagtgttcaa

SEQ ID NO: 69616 - DNA, 25 bp, Saccharomyces pastorianus
gtttagcacgttctaaggcttctct

SEQ ID NO: 69617 - DNA, 25 bp, Saccharomyces pastorianus
tttcacattgtctcttttccagttt

SEQ ID NO: 69618 - DNA, 25 bp, Saccharomyces pastorianus
cttttccagtttagcacgttctaag

SEQ ID NO: 69619 - DNA, 25 bp, Saccharomyces pastorianus
agcacgttctaaggcttctcttttt

SEQ ID NO: 69620 - DNA, 25 bp, Saccharomyces pastorianus
aacctgatatgtttctatgtgcttg

SEQ ID NO: 69621 - DNA, 25 bp, Saccharomyces pastorianus
gatttttcacattgtctcttttcca

SEQ ID NO: 69622 - DNA, 25 bp, Saccharomyces pastorianus
gttcaaatttgttgatttttcacat

SEQ ID NO: 69623 - DNA, 25 bp, Saccharomyces pastorianus
atgtttctatgtgcttgtatttgga

SEQ ID NO: 69624 - DNA, 25 bp, Saccharomyces pastorianus
aaacgcagggctaaacagtatcaag

SEQ ID NO: 69625 - DNA, 25 bp, Saccharomyces pastorianus
agaagttatcccaacgactttagct

SEQ ID NO: 69626 - DNA, 25 bp, Saccharomyces pastorianus
gcaagaccaaccgtttccgttgtca

SEQ ID NO: 69627 - DNA, 25 bp, Saccharomyces pastorianus
gatagttaagctgaccggcataaga

SEQ ID NO: 69628 - DNA, 25 bp, Saccharomyces pastorianus
gtggtgccaacaacatgattatcga

SEQ ID NO: 69629 - DNA, 25 bp, Saccharomyces pastorianus
tttccgttgtcatccgtggtgccaa

SEQ ID NO: 69630 - DNA, 25 bp, Saccharomyces pastorianus
gcattatgtgttatccgttgtttgg

SEQ ID NO: 69631 - DNA, 25 bp, Saccharomyces pastorianus
gagccatggaaggtgtacaagcatt

SEQ ID NO: 69632 - DNA, 25 bp, Saccharomyces pastorianus
acagaacgttctttgcatgatgcat

SEQ ID NO: 69633 - DNA, 25 bp, Saccharomyces pastorianus
aaagaaagaggtttgatcgccggtg

SEQ ID NO: 69634 - DNA, 25 bp, Saccharomyces pastorianus
gagtttgcctctgcattagaagtta

SEQ ID NO: 69635 - DNA, 25 bp, Saccharomyces pastorianus
attagcgacgaggacgacggcgaca

SEQ ID NO: 69636 - DNA, 25 bp, Saccharomyces pastorianus
agaacttgcggccaatcgctgaaaa

SEQ ID NO: 69637 - DNA, 25 bp, Saccharomyces pastorianus
gacgacgaagtcatgcagcgccata

SEQ ID NO: 69638 - DNA, 25 bp, Saccharomyces pastorianus
aaatcaggttatccccaagctaagc

SEQ ID NO: 69639 - DNA, 25 bp, Saccharomyces pastorianus
tgactaccaacgacactaccaaaga

SEQ ID NO: 69640 - DNA, 25 bp, Saccharomyces pastorianus
tcaagggttacgaagccaagctgtc

SEQ ID NO: 69641 - DNA, 25 bp, Saccharomyces pastorianus
tgattacggttctgttccccaagtg

SEQ ID NO: 69642 - DNA, 25 bp, Saccharomyces pastorianus
cgtcctcagggacattatcgacatt

SEQ ID NO: 69643 - DNA, 25 bp, Saccharomyces pastorianus
caagtgcacgctccgattatcgaaa

SEQ ID NO: 69644 - DNA, 25 bp, Saccharomyces pastorianus
agccggagactgacgcagacttcaa

SEQ ID NO: 69645 - DNA, 25 bp, Saccharomyces pastorianus
gggcatatcaagcaactgactacca

SEQ ID NO: 69646 - DNA, 25 bp, Saccharomyces pastorianus
gagcccatcaactggtcatggaagg

SEQ ID NO: 69647 - DNA, 25 bp, Saccharomyces pastorianus
gaaggttatgcctggactcatcaac

SEQ ID NO: 69648 - DNA, 25 bp, Saccharomyces pastorianus
aacaaaacgtagtcaccatctttag

SEQ ID NO: 69649 - DNA, 25 bp, Saccharomyces pastorianus
tagcaagagcccatcaactggtcat

SEQ ID NO: 69650 - DNA, 25 bp, Saccharomyces pastorianus
ggttatgcctggactcatcaacaaa

SEQ ID NO: 69651 - DNA, 25 bp, Saccharomyces pastorianus
catctttagtgctcccaattactgt

SEQ ID NO: 69652 - DNA, 25 bp, Saccharomyces pastorianus
tcatggaaggttatgcctggactca

SEQ ID NO: 69653 - DNA, 25 bp, Saccharomyces pastorianus
tagtgctcccaattactgttataga

SEQ ID NO: 69654 - DNA, 25 bp, Saccharomyces pastorianus
tagtcaccatctttagtgctcccaa

SEQ ID NO: 69655 - DNA, 25 bp, Saccharomyces pastorianus
actaatagcaagagcccatcaactg

SEQ ID NO: 69656 - DNA, 25 bp, Saccharomyces pastorianus
gcctggactcatcaacaaaacgtag

SEQ ID NO: 69657 - DNA, 25 bp, Saccharomyces pastorianus
gaacaatttgccaattctttctttg

SEQ ID NO: 69658 - DNA, 25 bp, Saccharomyces pastorianus
acttggccagagtgcgcgaagtctt

SEQ ID NO: 69659 - DNA, 25 bp, Saccharomyces pastorianus
gtattcccacggtaagactgaacta

SEQ ID NO: 69660 - DNA, 25 bp, Saccharomyces pastorianus
acggtaagactgaactacttggcca

SEQ ID NO: 69661 - DNA, 25 bp, Saccharomyces pastorianus
gtgcgcgaagtcttgagttgtcaat

SEQ ID NO: 69662 - DNA, 25 bp, Saccharomyces pastorianus
caactgattgattcaaccctaagag

SEQ ID NO: 69663 - DNA, 25 bp, Saccharomyces pastorianus
cgaagtcttgagttgtcaattcagg

SEQ ID NO: 69664 - DNA, 25 bp, Saccharomyces pastorianus
gaactacttggccagagtgcgcgaa

SEQ ID NO: 69665 - DNA, 25 bp, Saccharomyces pastorianus
ttccaacgtcaagaatttccaactg

SEQ ID NO: 69666 - DNA, 25 bp, Saccharomyces pastorianus
gcggattacctttccaacgtcaaga

SEQ ID NO: 69667 - DNA, 25 bp, Saccharomyces pastorianus
atttccaactgattgattcaaccct

SEQ ID NO: 69668 - DNA, 25 bp, Saccharomyces pastorianus
tttcccacaaaagccgtcatcagat

SEQ ID NO: 69669 - DNA, 25 bp, Saccharomyces pastorianus
gaaggaactggctcactggaactag

SEQ ID NO: 69670 - DNA, 25 bp, Saccharomyces pastorianus
aatgtcactaccaggaccagtcttg

SEQ ID NO: 69671 - DNA, 25 bp, Saccharomyces pastorianus
aataggtccttaacatccacttcac

SEQ ID NO: 69672 - DNA, 25 bp, Saccharomyces pastorianus
ctgcaggcccagctatcagagttaa

SEQ ID NO: 69673 - DNA, 25 bp, Saccharomyces pastorianus
agtcttgaggcccttttccactgat

SEQ ID NO: 69674 - DNA, 25 bp, Saccharomyces pastorianus
aagttccaagacttcctcatactgc

SEQ ID NO: 69675 - DNA, 25 bp, Saccharomyces pastorianus
tactgaacgttctcaataggtcctt

SEQ ID NO: 69676 - DNA, 25 bp, Saccharomyces pastorianus
gtgataacccatccaccaaaggagt

SEQ ID NO: 69677 - DNA, 25 bp, Saccharomyces pastorianus
actgatgcccgattggaggctggac

SEQ ID NO: 69678 - DNA, 25 bp, Saccharomyces pastorianus
aaccggtgagaatccaggtctttca

SEQ ID NO: 69679 - DNA, 25 bp, Saccharomyces pastorianus
tgaatgctactttcggtaacgccgt

SEQ ID NO: 69680 - DNA, 25 bp, Saccharomyces pastorianus
aaacgatgtcgtccttgcttgccat

SEQ ID NO: 69681 - DNA, 25 bp, Saccharomyces pastorianus
gggacatttccaattagctcataca

SEQ ID NO: 69682 - DNA, 25 bp, Saccharomyces pastorianus
ggcaatcattccattagcagctatt

SEQ ID NO: 69683 - DNA, 25 bp, Saccharomyces pastorianus
aagcatcccctttgaattttctatt

SEQ ID NO: 69684 - DNA, 25 bp, Saccharomyces pastorianus
aatctgctactggtccttgggttct

SEQ ID NO: 69685 - DNA, 25 bp, Saccharomyces pastorianus
agattcaaccagactgctgctcaaa

SEQ ID NO: 69686 - DNA, 25 bp, Saccharomyces pastorianus
tgattgtttctgtcattgccctgaa

SEQ ID NO: 69687 - DNA, 25 bp, Saccharomyces pastorianus
tgtgcatctttactgattcctgctg

SEQ ID NO: 69688 - DNA, 25 bp, Saccharomyces pastorianus
gggtagtcttttatccaatctgcta

SEQ ID NO: 69689 - DNA, 25 bp, Saccharomyces pastorianus
gttcagagctactttaccacatggt

SEQ ID NO: 69690 - DNA, 25 bp, Saccharomyces pastorianus
gaacctcagagcagacatttgtttg

SEQ ID NO: 69691 - DNA, 25 bp, Saccharomyces pastorianus
aggttcactatacgtacattctggt

SEQ ID NO: 69692 - DNA, 25 bp, Saccharomyces pastorianus
gtttagcactgctttgtcttttttg

SEQ ID NO: 69693 - DNA, 25 bp, Saccharomyces pastorianus
gaaattatccaaagtccttctgatg

SEQ ID NO: 69694 - DNA, 25 bp, Saccharomyces pastorianus
gaagtttacgaatgctctttggaaa

SEQ ID NO: 69695 - DNA, 25 bp, Saccharomyces pastorianus
gagttgctctcatcaaagccatttt

SEQ ID NO: 69696 - DNA, 25 bp, Saccharomyces pastorianus
gcatcagtggttatcccaaccgata

SEQ ID NO: 69697 - DNA, 25 bp, Saccharomyces pastorianus
aatgacgtcgaggtgtttgcatcag

SEQ ID NO: 69698 - DNA, 25 bp, Saccharomyces pastorianus
agattccggcaggagagttgctctc

SEQ ID NO: 69699 - DNA, 25 bp, Saccharomyces pastorianus
aagccattttgccacccggtgtaag

SEQ ID NO: 69700 - DNA, 25 bp, Saccharomyces pastorianus
cagccgatggcggtgaagtcacctt

SEQ ID NO: 69701 - DNA, 25 bp, Saccharomyces pastorianus
gaaaaagattcatcgctgctagtga

SEQ ID NO: 69702 - DNA, 25 bp, Saccharomyces pastorianus
atagggcttggcctgaggtttcttc

SEQ ID NO: 69703 - DNA, 25 bp, Saccharomyces pastorianus
gagaggagtctaccattgccataga

SEQ ID NO: 69704 - DNA, 25 bp, Saccharomyces pastorianus
cagagcaccagagcttttattcggg

SEQ ID NO: 69705 - DNA, 25 bp, Saccharomyces pastorianus
tactattttcaccagatggccaaat

SEQ ID NO: 69706 - DNA, 25 bp, Saccharomyces pastorianus
gagtttctccctaccgatttagaag

SEQ ID NO: 69707 - DNA, 25 bp, Saccharomyces pastorianus
agtcacatttagagccttgggcacg

SEQ ID NO: 69708 - DNA, 25 bp, Saccharomyces pastorianus
tggtctagcaagagccatacctgcc

SEQ ID NO: 69709 - DNA, 25 bp, Saccharomyces pastorianus
tatgcgttggattttatgtgcggaa

SEQ ID NO: 69710 - DNA, 25 bp, Saccharomyces pastorianus
gaggtttcttcctttacgtcataca

SEQ ID NO: 69711 - DNA, 25 bp, Saccharomyces pastorianus
atacctgccccacatgaaatcttaa

SEQ ID NO: 69712 - DNA, 25 bp, Saccharomyces pastorianus
tcctccaatggacctttgtagcgat

SEQ ID NO: 69713 - DNA, 25 bp, Saccharomyces pastorianus
gacctttgtagcgataattccatta

SEQ ID NO: 69714 - DNA, 25 bp, Saccharomyces pastorianus
taaaagtcacatcagcgacctgcct

SEQ ID NO: 69715 - DNA, 25 bp, Saccharomyces pastorianus
ttccattatgattggctgggcgggt

SEQ ID NO: 69716 - DNA, 25 bp, Saccharomyces pastorianus
tttataaatcaagaccccgaggaca

SEQ ID NO: 69717 - DNA, 25 bp, Saccharomyces pastorianus
agcgacctgcctgaatgtgaaatac

SEQ ID NO: 69718 - DNA, 25 bp, Saccharomyces pastorianus
ggagtcaatattcgaccatgtcatt

SEQ ID NO: 69719 - DNA, 25 bp, Saccharomyces pastorianus
atttgggaaacgctaggcttggcta

SEQ ID NO: 69720 - DNA, 25 bp, Saccharomyces pastorianus
ggatatcgctgtgggagactcatta

SEQ ID NO: 69721 - DNA, 25 bp, Saccharomyces pastorianus
accaatttttactatcctccaatgg

SEQ ID NO: 69722 - DNA, 25 bp, Saccharomyces pastorianus
aaagctaaaaatgcccagtccattg

SEQ ID NO: 69723 - DNA, 25 bp, Saccharomyces pastorianus
tgctaaaacgcgatttgggccaatg

SEQ ID NO: 69724 - DNA, 25 bp, Saccharomyces pastorianus
agctacgcgcaggaaatattgtcaa

SEQ ID NO: 69725 - DNA, 25 bp, Saccharomyces pastorianus
aacggtggcctttatcgtgccataa

SEQ ID NO: 69726 - DNA, 25 bp, Saccharomyces pastorianus
tgaactggcaaccaaagccgtcaga

SEQ ID NO: 69727 - DNA, 25 bp, Saccharomyces pastorianus
aatcaaggtactctgcctgcatttg

SEQ ID NO: 69728 - DNA, 25 bp, Saccharomyces pastorianus
ggatttgccattaagcacgggtttg

SEQ ID NO: 69729 - DNA, 25 bp, Saccharomyces pastorianus
ggcagaccctgtattcattggattt

SEQ ID NO: 69730 - DNA, 25 bp, Saccharomyces pastorianus
gaagagcaccagtattttggcttga

SEQ ID NO: 69731 - DNA, 25 bp, Saccharomyces pastorianus
gcctgcatttgatctgactggtgaa

SEQ ID NO: 69732 - DNA, 25 bp, Saccharomyces pastorianus
aaatcccagcctatgacagtactac

SEQ ID NO: 69733 - DNA, 25 bp, Saccharomyces pastorianus
aagaaggtctgctcaagctacgcgc

SEQ ID NO: 69734 - DNA, 25 bp, Saccharomyces pastorianus
tcgaaacagtgccactcgataagtt

SEQ ID NO: 69735 - DNA, 25 bp, Saccharomyces pastorianus
gagcagtttatatttgatgttttcg

SEQ ID NO: 69736 - DNA, 25 bp, Saccharomyces pastorianus
acagtgccactcgataagtttggtt

SEQ ID NO: 69737 - DNA, 25 bp, Saccharomyces pastorianus
gttttcgaaacagtgccactcgata

SEQ ID NO: 69738 - DNA, 25 bp, Saccharomyces pastorianus
tgttttcgaaacagtgccactcgat

SEQ ID NO: 69739 - DNA, 25 bp, Saccharomyces pastorianus
gatgttttcgaaacagtgccactcg

SEQ ID NO: 69740 - DNA, 25 bp, Saccharomyces pastorianus
gaaacagtgccactcgataagtttg

SEQ ID NO: 69741 - DNA, 25 bp, Saccharomyces pastorianus
tttcgaaacagtgccactcgataag

SEQ ID NO: 69742 - DNA, 25 bp, Saccharomyces pastorianus
aacagtgccactcgataagtttggt

SEQ ID NO: 69743 - DNA, 25 bp, Saccharomyces pastorianus
gcagtttatatttgatgttttcgaa

SEQ ID NO: 69744 - DNA, 25 bp, Saccharomyces pastorianus
agtgccactcgataagtttggttgt

SEQ ID NO: 69745 - DNA, 25 bp, Saccharomyces pastorianus
ttttttgcaaagacaggatcatcga

SEQ ID NO: 69746 - DNA, 25 bp, Saccharomyces pastorianus
gtcttgctcaactgctttatttttt

SEQ ID NO: 69747 - DNA, 25 bp, Saccharomyces pastorianus
atattccagtcagccatggtcttgc

SEQ ID NO: 69748 - DNA, 25 bp, Saccharomyces pastorianus
caccttcaatggatgctttctttcc

SEQ ID NO: 69749 - DNA, 25 bp, Saccharomyces pastorianus
gggacagggtccaccttcaatggat

SEQ ID NO: 69750 - DNA, 25 bp, Saccharomyces pastorianus
catggtcttgctcaactgctttatt

SEQ ID NO: 69751 - DNA, 25 bp, Saccharomyces pastorianus
ttctttccatattccagtcagccat

SEQ ID NO: 69752 - DNA, 25 bp, Saccharomyces pastorianus
agtcagccatggtcttgctcaactg

SEQ ID NO: 69753 - DNA, 25 bp, Saccharomyces pastorianus
tgctttctttccatattccagtcag

SEQ ID NO: 69754 - DNA, 25 bp, Saccharomyces pastorianus
ggatgctttctttccatattccagt

SEQ ID NO: 69755 - DNA, 25 bp, Saccharomyces pastorianus
agggtccaccttcaatggatgcttt

SEQ ID NO: 69756 - DNA, 25 bp, Saccharomyces pastorianus
tacttattaggttttgccctccact

SEQ ID NO: 69757 - DNA, 25 bp, Saccharomyces pastorianus
tttatgcctctgaatggacaagcgg

SEQ ID NO: 69758 - DNA, 25 bp, Saccharomyces pastorianus
ggtatcttagcgtttggtcatgcat

SEQ ID NO: 69759 - DNA, 25 bp, Saccharomyces pastorianus
ggtctgtcacaggttttatctgcat

SEQ ID NO: 69760 - DNA, 25 bp, Saccharomyces pastorianus
gcattagaccttatttcgacttacc

SEQ ID NO: 69761 - DNA, 25 bp, Saccharomyces pastorianus
aattcatttccagtgcaggcgacag

SEQ ID NO: 69762 - DNA, 25 bp, Saccharomyces pastorianus
atcactctcctttaatttatgcctc

SEQ ID NO: 69763 - DNA, 25 bp, Saccharomyces pastorianus
gattacataccagcctactattttg

SEQ ID NO: 69764 - DNA, 25 bp, Saccharomyces pastorianus
aacgctgtattatggtggtctgtca

SEQ ID NO: 69765 - DNA, 25 bp, Saccharomyces pastorianus
cactacgttcccttctactttatga

SEQ ID NO: 69766 - DNA, 25 bp, Saccharomyces pastorianus
gttacgtggtattgacttctggaat

SEQ ID NO: 69767 - DNA, 25 bp, Saccharomyces pastorianus
aaggcggattcggaagttgtcctca

SEQ ID NO: 69768 - DNA, 25 bp, Saccharomyces pastorianus
agtctggctatcttaaggtctgcaa

SEQ ID NO: 69769 - DNA, 25 bp, Saccharomyces pastorianus
gagagttcgtacacttgtgccccaa

SEQ ID NO: 69770 - DNA, 25 bp, Saccharomyces pastorianus
tgtagtgtccgccaactgcaagaag

SEQ ID NO: 69771 - DNA, 25 bp, Saccharomyces pastorianus
catactatactgttgccaggcggaa

SEQ ID NO: 69772 - DNA, 25 bp, Saccharomyces pastorianus
gtaagcacgctcttcgggagtacat

SEQ ID NO: 69773 - DNA, 25 bp, Saccharomyces pastorianus
gtattcccaacagtcaagtcgagtc

SEQ ID NO: 69774 - DNA, 25 bp, Saccharomyces pastorianus
gtttacggtctacccatagagagca

SEQ ID NO: 69775 - DNA, 25 bp, Saccharomyces pastorianus
gtcgagtcgtctgaacttactgata

SEQ ID NO: 69776 - DNA, 25 bp, Saccharomyces pastorianus
ttactgatatcaaccccgtttacgg

SEQ ID NO: 69777 - DNA, 25 bp, Saccharomyces pastorianus
gggtacaccttctgtgctacagcaa

SEQ ID NO: 69778 - DNA, 25 bp, Saccharomyces pastorianus
gggtccacatgggtgtccgaagtac

SEQ ID NO: 69779 - DNA, 25 bp, Saccharomyces pastorianus
gaacttcacgccgtggtctctgagc

SEQ ID NO: 69780 - DNA, 25 bp, Saccharomyces pastorianus
agacctccaagaacgtgaacttcac

SEQ ID NO: 69781 - DNA, 25 bp, Saccharomyces pastorianus
atgaacgcatgctgggcggccaaga

SEQ ID NO: 69782 - DNA, 25 bp, Saccharomyces pastorianus
gagcgtcttcctgatcaggtcacgg

SEQ ID NO: 69783 - DNA, 25 bp, Saccharomyces pastorianus
gatcagaaccatttcctggtcgttg

SEQ ID NO: 69784 - DNA, 25 bp, Saccharomyces pastorianus
tggtctctgagcgtcttcctgatca

SEQ ID NO: 69785 - DNA, 25 bp, Saccharomyces pastorianus
tggtcgttgcccagctccttcgaaa

SEQ ID NO: 69786 - DNA, 25 bp, Saccharomyces pastorianus
gtgtccgaagtaccgaagatcagaa

SEQ ID NO: 69787 - DNA, 25 bp, Saccharomyces pastorianus
ctgatcaggtcacggccctccgggt

SEQ ID NO: 69788 - DNA, 25 bp, Saccharomyces pastorianus
gcggccaagacctccaagaacgtga

SEQ ID NO: 69789 - DNA, 25 bp, Saccharomyces pastorianus
agccgcctatttacttgccgaaaag

SEQ ID NO: 69790 - DNA, 25 bp, Saccharomyces pastorianus
aaaacgctctgattttcaatggtaa

SEQ ID NO: 69791 - DNA, 25 bp, Saccharomyces pastorianus
gggtatctctaacctttgacaatga

SEQ ID NO: 69792 - DNA, 25 bp, Saccharomyces pastorianus
agtcttcaagaatccggcgttataa

SEQ ID NO: 69793 - DNA, 25 bp, Saccharomyces pastorianus
actcgaagacttttgggtatctcta

SEQ ID NO: 69794 - DNA, 25 bp, Saccharomyces pastorianus
gtttcctacagttagttcagtggca

SEQ ID NO: 69795 - DNA, 25 bp, Saccharomyces pastorianus
aaatggcaagtaaagccgcctattt

SEQ ID NO: 69796 - DNA, 25 bp, Saccharomyces pastorianus
taattcacatttgatgatggtcccc

SEQ ID NO: 69797 - DNA, 25 bp, Saccharomyces pastorianus
ggcgttataagatcgttaccgtata

SEQ ID NO: 69798 - DNA, 25 bp, Saccharomyces pastorianus
ctgttgtgccttttcaacgtatgga

SEQ ID NO: 69799 - DNA, 25 bp, Saccharomyces pastorianus
gactctagcccaagtcttcaagaat

SEQ ID NO: 69800 - DNA, 25 bp, Saccharomyces pastorianus
cttgatcaacttcttttgtttgttt

SEQ ID NO: 69801 - DNA, 25 bp, Saccharomyces pastorianus
ggatagccttcacttaactcatgta

SEQ ID NO: 69802 - DNA, 25 bp, Saccharomyces pastorianus
ggccacgacacgtcagcgtcggtcg

SEQ ID NO: 69803 - DNA, 25 bp, Saccharomyces pastorianus
actgcgcccgctttatatacaaaat

SEQ ID NO: 69804 - DNA, 25 bp, Saccharomyces pastorianus
tcacttaactcatgtatttggacag

SEQ ID NO: 69805 - DNA, 25 bp, Saccharomyces pastorianus
gtgtcactgtacacgggccacgaca

SEQ ID NO: 69806 - DNA, 25 bp, Saccharomyces pastorianus
gaggtctttcttgatcaacttcttt

SEQ ID NO: 69807 - DNA, 25 bp, Saccharomyces pastorianus
gcagagcccaagagcgtctttggat

SEQ ID NO: 69808 - DNA, 25 bp, Saccharomyces pastorianus
atccattccgaaagaaagcgcccga

SEQ ID NO: 69809 - DNA, 25 bp, Saccharomyces pastorianus
tcttttcgctcgtttttcgccactg

SEQ ID NO: 69810 - DNA, 25 bp, Saccharomyces pastorianus
agagcgtctttggatagccttcact

SEQ ID NO: 69811 - DNA, 25 bp, Saccharomyces pastorianus
cagagcccgatgatgtgcaagcgaa

SEQ ID NO: 69812 - DNA, 25 bp, Saccharomyces pastorianus
gacagtgatggcgtacaggtagcta

SEQ ID NO: 69813 - DNA, 25 bp, Saccharomyces pastorianus
gtaacagcactgataaagggaccct

SEQ ID NO: 69814 - DNA, 25 bp, Saccharomyces pastorianus
ggcagctaaagtacctcgtcaacag

SEQ ID NO: 69815 - DNA, 25 bp, Saccharomyces pastorianus
agctaatgaatctgaagaggaccca

SEQ ID NO: 69816 - DNA, 25 bp, Saccharomyces pastorianus
gatgaccttttagatgaagatccca

SEQ ID NO: 69817 - DNA, 25 bp, Saccharomyces pastorianus
gtacctcgtcaacagatggagcaag

SEQ ID NO: 69818 - DNA, 25 bp, Saccharomyces pastorianus
aactgattagtgctctagaagaggc

SEQ ID NO: 69819 - DNA, 25 bp, Saccharomyces pastorianus
gcaagcgaagggttctgtgtacaac

SEQ ID NO: 69820 - DNA, 25 bp, Saccharomyces pastorianus
gatgaagatcccactaaactggatg

SEQ ID NO: 69821 - DNA, 25 bp, Saccharomyces pastorianus
taaactggatgaagcagagcccgat

SEQ ID NO: 69822 - DNA, 25 bp, Saccharomyces pastorianus
gtacccaattacagtcgaatatcca

SEQ ID NO: 69823 - DNA, 25 bp, Saccharomyces pastorianus
ggcgggtggtgtgtacccaattaca

SEQ ID NO: 69824 - DNA, 25 bp, Saccharomyces pastorianus
gtcgaatatccaaatgaatatcctt

SEQ ID NO: 69825 - DNA, 25 bp, Saccharomyces pastorianus
gagcctgcatggagatcattttcaa

SEQ ID NO: 69826 - DNA, 25 bp, Saccharomyces pastorianus
gacccgccatcacgttaaaacaaat

SEQ ID NO: 69827 - DNA, 25 bp, Saccharomyces pastorianus
ttggagacccgccatcacgttaaaa

SEQ ID NO: 69828 - DNA, 25 bp, Saccharomyces pastorianus
tccaagtggcacaatatgtttaagt

SEQ ID NO: 69829 - DNA, 25 bp, Saccharomyces pastorianus
atttccagccggattttatcatcca

SEQ ID NO: 69830 - DNA, 25 bp, Saccharomyces pastorianus
tccaaacgtgtatccaagtggcaca

SEQ ID NO: 69831 - DNA, 25 bp, Saccharomyces pastorianus
gatcaagattggagacccgccatca

SEQ ID NO: 69832 - DNA, 25 bp, Saccharomyces pastorianus
ggtgtgtacccaattacagtcgaat

SEQ ID NO: 69833 - DNA, 25 bp, Saccharomyces pastorianus
gacggttcgttggatgtaatactac

SEQ ID NO: 69834 - DNA, 25 bp, Saccharomyces pastorianus
aggacgaatctcataccatcgcgaa

SEQ ID NO: 69835 - DNA, 25 bp, Saccharomyces pastorianus
gatagtagcagagacgataacgacg

SEQ ID NO: 69836 - DNA, 25 bp, Saccharomyces pastorianus
ggagctagctcagaaactaacactt

SEQ ID NO: 69837 - DNA, 25 bp, Saccharomyces pastorianus
gactctaacttatttacaacagcgt

SEQ ID NO: 69838 - DNA, 25 bp, Saccharomyces pastorianus
gaatgcggacttcgagactctaact

SEQ ID NO: 69839 - DNA, 25 bp, Saccharomyces pastorianus
atcgcgaacagtgcagacggtgacg

SEQ ID NO: 69840 - DNA, 25 bp, Saccharomyces pastorianus
atatcggagaagtggacggttcgtt

SEQ ID NO: 69841 - DNA, 25 bp, Saccharomyces pastorianus
ggccagcatatataatgatctccat

SEQ ID NO: 69842 - DNA, 25 bp, Saccharomyces pastorianus
acggtgacgagagtaatctcctgga

SEQ ID NO: 69843 - DNA, 25 bp, Saccharomyces pastorianus
aatgatctccatgaagaacacgata

SEQ ID NO: 69844 - DNA, 25 bp, Saccharomyces pastorianus
tgaccattccacacatgaatcacgc

SEQ ID NO: 69845 - DNA, 25 bp, Saccharomyces pastorianus
gatagtggagaacctttgcctaaga

SEQ ID NO: 69846 - DNA, 25 bp, Saccharomyces pastorianus
gcgggcttctcgatggcatccaata

SEQ ID NO: 69847 - DNA, 25 bp, Saccharomyces pastorianus
ctgcagtcgggcaagtagcatcaat

SEQ ID NO: 69848 - DNA, 25 bp, Saccharomyces pastorianus
gaaacagcccgatgaggtcgtagat

SEQ ID NO: 69849 - DNA, 25 bp, Saccharomyces pastorianus
tacagtaagctctacccaggatcaa

SEQ ID NO: 69850 - DNA, 25 bp, Saccharomyces pastorianus
agtgacatggatcccacagcagtgt

SEQ ID NO: 69851 - DNA, 25 bp, Saccharomyces pastorianus
tgaatcacgctgtatcgaagaatag

SEQ ID NO: 69852 - DNA, 25 bp, Saccharomyces pastorianus
gagaatacgctcaggctgcagtcgg

SEQ ID NO: 69853 - DNA, 25 bp, Saccharomyces pastorianus
ggcatccaataaggctgacaatcga

SEQ ID NO: 69854 - DNA, 25 bp, Saccharomyces pastorianus
ttaaaagtgccactggcgggcttct

SEQ ID NO: 69855 - DNA, 25 bp, Saccharomyces pastorianus
gagtacggttgcttgactataacac

SEQ ID NO: 69856 - DNA, 25 bp, Saccharomyces pastorianus
ggtcccagatactttattattgttt

SEQ ID NO: 69857 - DNA, 25 bp, Saccharomyces pastorianus
taatctcggccaaaacttgcatgaa

SEQ ID NO: 69858 - DNA, 25 bp, Saccharomyces pastorianus
ttcaccatatctctggtagagccag

SEQ ID NO: 69859 - DNA, 25 bp, Saccharomyces pastorianus
taatgcctgcaaaccaagatttaga

SEQ ID NO: 69860 - DNA, 25 bp, Saccharomyces pastorianus
gattctcccagacaaggcggttaca

SEQ ID NO: 69861 - DNA, 25 bp, Saccharomyces pastorianus
gttatcttaaatcgccattgttacg

SEQ ID NO: 69862 - DNA, 25 bp, Saccharomyces pastorianus
ttctattttcgccatttacatcagt

SEQ ID NO: 69863 - DNA, 25 bp, Saccharomyces pastorianus
tgctatttgccacccaaaccatatt

SEQ ID NO: 69864 - DNA, 25 bp, Saccharomyces pastorianus
gactataacactactaagccggcta

SEQ ID NO: 69865 - DNA, 25 bp, Saccharomyces pastorianus
tagtagtggcacttttaatctcggc

SEQ ID NO: 69866 - DNA, 25 bp, Saccharomyces pastorianus
aaagcgcaggtcacaaattcagaag

SEQ ID NO: 69867 - DNA, 25 bp, Saccharomyces pastorianus
tgagaccattaagctgtctcgtcga

SEQ ID NO: 69868 - DNA, 25 bp, Saccharomyces pastorianus
tctgagagccatattcatttatcca

SEQ ID NO: 69869 - DNA, 25 bp, Saccharomyces pastorianus
tgtggtttatccaacgcttttttga

SEQ ID NO: 69870 - DNA, 25 bp, Saccharomyces pastorianus
aaatggcagtgatagatctcttcag

SEQ ID NO: 69871 - DNA, 25 bp, Saccharomyces pastorianus
atatcgatacttgtgtgagaccatt

SEQ ID NO: 69872 - DNA, 25 bp, Saccharomyces pastorianus
gatctcttcagacaaactcacggga

SEQ ID NO: 69873 - DNA, 25 bp, Saccharomyces pastorianus
attgcgatttggctttttcccatca

SEQ ID NO: 69874 - DNA, 25 bp, Saccharomyces pastorianus
ttcactttgattttcacgacaactg

SEQ ID NO: 69875 - DNA, 25 bp, Saccharomyces pastorianus
ggagatattctacaagcaccacaaa

SEQ ID NO: 69876 - DNA, 25 bp, Saccharomyces pastorianus
ggaaattttgaacctttgctatagt

SEQ ID NO: 69877 - DNA, 25 bp, Saccharomyces pastorianus
gacaatgctgcgctgtacaaggata

SEQ ID NO: 69878 - DNA, 25 bp, Saccharomyces pastorianus
aaatcgtgcacgttacgagaccctg

SEQ ID NO: 69879 - DNA, 25 bp, Saccharomyces pastorianus
aatcctgctgtctctatattggcga

SEQ ID NO: 69880 - DNA, 25 bp, Saccharomyces pastorianus
taataaccatcgatccggagtccgg

SEQ ID NO: 69881 - DNA, 25 bp, Saccharomyces pastorianus
tctagcaaaatacgtgggcctccct

SEQ ID NO: 69882 - DNA, 25 bp, Saccharomyces pastorianus
gacattgcaattccggtcactacaa

SEQ ID NO: 69883 - DNA, 25 bp, Saccharomyces pastorianus
aaagctttgcgtccatgtgctcgaa

SEQ ID NO: 69884 - DNA, 25 bp, Saccharomyces pastorianus
atagaactagcctcaacgcaacgtg

SEQ ID NO: 69885 - DNA, 25 bp, Saccharomyces pastorianus
agaacttcctcaagcattatctgcc

SEQ ID NO: 69886 - DNA, 25 bp, Saccharomyces pastorianus
ggacaccatcaaggctctacaggat

SEQ ID NO: 69887 - DNA, 25 bp, Saccharomyces pastorianus
gaaagtcggcttgtctatgccgcaa

SEQ ID NO: 69888 - DNA, 25 bp, Saccharomyces pastorianus
gataccagccaatcattctttacca

SEQ ID NO: 69889 - DNA, 25 bp, Saccharomyces pastorianus
aactcgcccgatatagggtcaattt

SEQ ID NO: 69890 - DNA, 25 bp, Saccharomyces pastorianus
actcgcccgatatagggtcaatttc

SEQ ID NO: 69891 - DNA, 25 bp, Saccharomyces pastorianus
accaactcgcccgatatagggtcaa

SEQ ID NO: 69892 - DNA, 25 bp, Saccharomyces pastorianus
ccaactcgcccgatatagggtcaat

SEQ ID NO: 69893 - DNA, 25 bp, Saccharomyces pastorianus
gggacggataccagccaatcattct

SEQ ID NO: 69894 - DNA, 25 bp, Saccharomyces pastorianus
cccgatatagggtcaatttcacaag

SEQ ID NO: 69895 - DNA, 25 bp, Saccharomyces pastorianus
cgatatagggtcaatttcacaagag

SEQ ID NO: 69896 - DNA, 25 bp, Saccharomyces pastorianus
atatagggtcaatttcacaagaggg

SEQ ID NO: 69897 - DNA, 25 bp, Saccharomyces pastorianus
tcgcccgatatagggtcaatttcac

SEQ ID NO: 69898 - DNA, 25 bp, Saccharomyces pastorianus
caactcgcccgatatagggtcaatt

SEQ ID NO: 69899 - DNA, 25 bp, Saccharomyces pastorianus
gttcaaatggccagaggttaagttt

SEQ ID NO: 69900 - DNA, 25 bp, Saccharomyces pastorianus
aatgacggtgaccttgaaaggcttt

SEQ ID NO: 69901 - DNA, 25 bp, Saccharomyces pastorianus
cttctctttctaccggcgttcaaat

SEQ ID NO: 69902 - DNA, 25 bp, Saccharomyces pastorianus
ccagttaccggaaccaatgacggtg

SEQ ID NO: 69903 - DNA, 25 bp, Saccharomyces pastorianus
tttctaccggcgttcaaatggccag

SEQ ID NO: 69904 - DNA, 25 bp, Saccharomyces pastorianus
gaagaagaacttctctttctaccgg

SEQ ID NO: 69905 - DNA, 25 bp, Saccharomyces pastorianus
ggttaagtttaatctatcagcagca

SEQ ID NO: 69906 - DNA, 25 bp, Saccharomyces pastorianus
gtttaatctatcagcagcagcagac

SEQ ID NO: 69907 - DNA, 25 bp, Saccharomyces pastorianus
gaagaacttctctttctaccggcgt

SEQ ID NO: 69908 - DNA, 25 bp, Saccharomyces pastorianus
cggaaccaatgacggtgaccttgaa

SEQ ID NO: 69909 - DNA, 25 bp, Saccharomyces pastorianus
accggcgttcaaatggccagaggtt

SEQ ID NO: 69910 - DNA, 25 bp, Saccharomyces pastorianus
tagatgttggcacggcagcagttcc

SEQ ID NO: 69911 - DNA, 25 bp, Saccharomyces pastorianus
ttcatctacttcagagtttcccttc

SEQ ID NO: 69912 - DNA, 25 bp, Saccharomyces pastorianus
atgggctgctggagtcccactcttt

SEQ ID NO: 69913 - DNA, 25 bp, Saccharomyces pastorianus
cccttgacgatctaccagctatatt

SEQ ID NO: 69914 - DNA, 25 bp, Saccharomyces pastorianus
gtctctattgccagaaagttcgcat

SEQ ID NO: 69915 - DNA, 25 bp, Saccharomyces pastorianus
gctatattatccctaccaacactaa

SEQ ID NO: 69916 - DNA, 25 bp, Saccharomyces pastorianus
tcccactctttgctttatttcgtta

SEQ ID NO: 69917 - DNA, 25 bp, Saccharomyces pastorianus
gaaagttcgcattctgtgctataaa

SEQ ID NO: 69918 - DNA, 25 bp, Saccharomyces pastorianus
tcttcctttgtctctattgccagaa

SEQ ID NO: 69919 - DNA, 25 bp, Saccharomyces pastorianus
agagtttcccttctttgtggtagat

SEQ ID NO: 69920 - DNA, 25 bp, Saccharomyces pastorianus
atttcgttaatctcttcatctactt

SEQ ID NO: 69921 - DNA, 25 bp, Saccharomyces pastorianus
gtaggaattgcgaattttcatgctt

SEQ ID NO: 69922 - DNA, 25 bp, Saccharomyces pastorianus
gtctctagggaacacaagcctttta

SEQ ID NO: 69923 - DNA, 25 bp, Saccharomyces pastorianus
gcttcgtagcccaatctgaaataga

SEQ ID NO: 69924 - DNA, 25 bp, Saccharomyces pastorianus
atcactaacgttttcaggcgtcaac

SEQ ID NO: 69925 - DNA, 25 bp, Saccharomyces pastorianus
atgggatttctctggaggcgtattc

SEQ ID NO: 69926 - DNA, 25 bp, Saccharomyces pastorianus
atgacaccgtttagctggaccgcat

SEQ ID NO: 69927 - DNA, 25 bp, Saccharomyces pastorianus
gaggcgtattcagtagtatgtcaca

SEQ ID NO: 69928 - DNA, 25 bp, Saccharomyces pastorianus
gaattttcatgcttcgtagcccaat

SEQ ID NO: 69929 - DNA, 25 bp, Saccharomyces pastorianus
gtatgtcacagtctctagggaacac

SEQ ID NO: 69930 - DNA, 25 bp, Saccharomyces pastorianus
gtcaacccaccagccaatatgaatt

SEQ ID NO: 69931 - DNA, 25 bp, Saccharomyces pastorianus
tggaccgcatcactaacgttttcag

SEQ ID NO: 69932 - DNA, 25 bp, Saccharomyces pastorianus
aggccaaatctgcttcgttagctac

SEQ ID NO: 69933 - DNA, 25 bp, Saccharomyces pastorianus
tcctcatgtttatctttacgacctg

SEQ ID NO: 69934 - DNA, 25 bp, Saccharomyces pastorianus
attatacggccccacagacagggac

SEQ ID NO: 69935 - DNA, 25 bp, Saccharomyces pastorianus
attcctcatatgtgtaacgactcca

SEQ ID NO: 69936 - DNA, 25 bp, Saccharomyces pastorianus
atatgcattacaactccgtgcctta

SEQ ID NO: 69937 - DNA, 25 bp, Saccharomyces pastorianus
cacattgtccaaccttttacacaac

SEQ ID NO: 69938 - DNA, 25 bp, Saccharomyces pastorianus
gaaaattcttacaagcgcgtagcaa

SEQ ID NO: 69939 - DNA, 25 bp, Saccharomyces pastorianus
taccccgttttgaaactgggctcat

SEQ ID NO: 69940 - DNA, 25 bp, Saccharomyces pastorianus
tacgacctgtggcaaacttgggctc

SEQ ID NO: 69941 - DNA, 25 bp, Saccharomyces pastorianus
tattccagtatcatgctgacacttt

SEQ ID NO: 69942 - DNA, 25 bp, Saccharomyces pastorianus
gatacagacatcttatccagagcta

SEQ ID NO: 69943 - DNA, 25 bp, Saccharomyces pastorianus
caacgtctggagatactgctgtgaa

SEQ ID NO: 69944 - DNA, 25 bp, Saccharomyces pastorianus
gactgtcaccagacatgaccactgt

SEQ ID NO: 69945 - DNA, 25 bp, Saccharomyces pastorianus
tactgctgtgaagtgttcgattact

SEQ ID NO: 69946 - DNA, 25 bp, Saccharomyces pastorianus
tgaccactgtggatgaaatacggac

SEQ ID NO: 69947 - DNA, 25 bp, Saccharomyces pastorianus
gagggaaccacgaaactcgtcaaat

SEQ ID NO: 69948 - DNA, 25 bp, Saccharomyces pastorianus
gtagcgcaagtcgatacacccgtta

SEQ ID NO: 69949 - DNA, 25 bp, Saccharomyces pastorianus
gagtcactttgatcagagggaacca

SEQ ID NO: 69950 - DNA, 25 bp, Saccharomyces pastorianus
acatacatggtcaattgcacgatct

SEQ ID NO: 69951 - DNA, 25 bp, Saccharomyces pastorianus
acacgaaggtgctatgtgcgatcta

SEQ ID NO: 69952 - DNA, 25 bp, Saccharomyces pastorianus
gagtgaccccgaagatgttgataca

SEQ ID NO: 69953 - DNA, 25 bp, Saccharomyces pastorianus
gtgcgatctattatggagtgacccc

SEQ ID NO: 69954 - DNA, 25 bp, Saccharomyces pastorianus
ttggcctcgaccactttggctcaat

SEQ ID NO: 69955 - DNA, 25 bp, Saccharomyces pastorianus
attgaaaagccaaccactacctcaa

SEQ ID NO: 69956 - DNA, 25 bp, Saccharomyces pastorianus
aggtccaagcaacaccactagtact

SEQ ID NO: 69957 - DNA, 25 bp, Saccharomyces pastorianus
actgctatcccaacagatgctccaa

SEQ ID NO: 69958 - DNA, 25 bp, Saccharomyces pastorianus
actttaccgtcgtcactgaatacac

SEQ ID NO: 69959 - DNA, 25 bp, Saccharomyces pastorianus
tacctcaaccactgagtacactgtt

SEQ ID NO: 69960 - DNA, 25 bp, Saccharomyces pastorianus
tgccacctcagacgctgataacggt

SEQ ID NO: 69961 - DNA, 25 bp, Saccharomyces pastorianus
attctccactgttttgttatctgcc

SEQ ID NO: 69962 - DNA, 25 bp, Saccharomyces pastorianus
tgcttcttccactagttcttctagt

SEQ ID NO: 69963 - DNA, 25 bp, Saccharomyces pastorianus
ttggctcaattctctaacagcaccg

SEQ ID NO: 69964 - DNA, 25 bp, Saccharomyces pastorianus
gataacggtactaccactgctatcc

SEQ ID NO: 69965 - DNA, 25 bp, Saccharomyces pastorianus
taatccaaacgaccccttagctaat

SEQ ID NO: 69966 - DNA, 25 bp, Saccharomyces pastorianus
gattgggccgtatatgcctcgatgt

SEQ ID NO: 69967 - DNA, 25 bp, Saccharomyces pastorianus
agatcagaaccgtgctattgtccat

SEQ ID NO: 69968 - DNA, 25 bp, Saccharomyces pastorianus
caaaagtgcgttttttgaccaagat

SEQ ID NO: 69969 - DNA, 25 bp, Saccharomyces pastorianus
gaccccttagctaatgatgtcgctg

SEQ ID NO: 69970 - DNA, 25 bp, Saccharomyces pastorianus
gctattgtccatccaggcattgttg

SEQ ID NO: 69971 - DNA, 25 bp, Saccharomyces pastorianus
ggcattgttggccagtcctaatcca

SEQ ID NO: 69972 - DNA, 25 bp, Saccharomyces pastorianus
tatgcctcgatgtgcttaagactaa

SEQ ID NO: 69973 - DNA, 25 bp, Saccharomyces pastorianus
gatgtcgctgaagactggatcaaga

SEQ ID NO: 69974 - DNA, 25 bp, Saccharomyces pastorianus
aggcgccaaagccaaggcacgcgaa

SEQ ID NO: 69975 - DNA, 25 bp, Saccharomyces pastorianus
tccgaatatcgatagattgggccgt

SEQ ID NO: 69976 - DNA, 25 bp, Saccharomyces pastorianus
aataccgccacagcgcaagaaacaa

SEQ ID NO: 69977 - DNA, 25 bp, Saccharomyces pastorianus
cgccaggcccgtgcggcgtacgttc

SEQ ID NO: 69978 - DNA, 25 bp, Saccharomyces pastorianus
tcacaataccgccacagcgcaagaa

SEQ ID NO: 69979 - DNA, 25 bp, Saccharomyces pastorianus
aagcaactccgtatcacaataccgc

SEQ ID NO: 69980 - DNA, 25 bp, Saccharomyces pastorianus
gccacagcgcaagaaacaacgagat

SEQ ID NO: 69981 - DNA, 25 bp, Saccharomyces pastorianus
tataaagcaactccgtatcacaata

SEQ ID NO: 69982 - DNA, 25 bp, Saccharomyces pastorianus
aaagcaactccgtatcacaataccg

SEQ ID NO: 69983 - DNA, 25 bp, Saccharomyces pastorianus
accgccacagcgcaagaaacaacga

SEQ ID NO: 69984 - DNA, 25 bp, Saccharomyces pastorianus
agcgcaagaaacaacgagatatatt

SEQ ID NO: 69985 - DNA, 25 bp, Saccharomyces pastorianus
gaagtgggccaccaagcccctttgc

SEQ ID NO: 69986 - DNA, 25 bp, Saccharomyces pastorianus
ggaagtgggccaccaagcccctttg

SEQ ID NO: 69987 - DNA, 25 bp, Saccharomyces pastorianus
aagcaactccgtatcacaataccgc

SEQ ID NO: 69988 - DNA, 25 bp, Saccharomyces pastorianus
aataccgccacagcgcaagaaacaa

SEQ ID NO: 69989 - DNA, 25 bp, Saccharomyces pastorianus
cgccaggcccgtgcggcgtacgttc

SEQ ID NO: 69990 - DNA, 25 bp, Saccharomyces pastorianus
tcacaataccgccacagcgcaagaa

SEQ ID NO: 69991 - DNA, 25 bp, Saccharomyces pastorianus
gccacagcgcaagaaacaacgagat

SEQ ID NO: 69992 - DNA, 25 bp, Saccharomyces pastorianus
cttgaagcacaaaacgccatccctt

SEQ ID NO: 69993 - DNA, 25 bp, Saccharomyces pastorianus
tataaagcaactccgtatcacaata

SEQ ID NO: 69994 - DNA, 25 bp, Saccharomyces pastorianus
accgccacagcgcaagaaacaacga

SEQ ID NO: 69995 - DNA, 25 bp, Saccharomyces pastorianus
agcgcaagaaacaacgagatatatt

SEQ ID NO: 69996 - DNA, 25 bp, Saccharomyces pastorianus
gagatatatttccttgaagcacaaa

SEQ ID NO: 69997 - DNA, 25 bp, Saccharomyces pastorianus
ggaagtgggccaccaagcccctttg

SEQ ID NO: 69998 - DNA, 25 bp, Saccharomyces pastorianus
gaaggccactaactcaaacggtaat

SEQ ID NO: 69999 - DNA, 25 bp, Saccharomyces pastorianus
aatactgtcgtattgtgtgacgcca

SEQ ID NO: 70000 - DNA, 25 bp, Saccharomyces pastorianus
gggaccatattttgaaggccactaa

SEQ ID NO: 70001 - DNA, 25 bp, Saccharomyces pastorianus
gttgcacgtgaatgtaatactgtcg

SEQ ID NO: 70002 - DNA, 25 bp, Saccharomyces pastorianus
aactggcggttccaagacttgtcaa

SEQ ID NO: 70003 - DNA, 25 bp, Saccharomyces pastorianus
tatctttcaattggctactttggct

SEQ ID NO: 70004 - DNA, 25 bp, Saccharomyces pastorianus
aacatgaattgaaccctgaagactc

SEQ ID NO: 70005 - DNA, 25 bp, Saccharomyces pastorianus
gatgttaggaactcttacactctta

SEQ ID NO: 70006 - DNA, 25 bp, Saccharomyces pastorianus
gttggattcactcccaacatgaatt

SEQ ID NO: 70007 - DNA, 25 bp, Saccharomyces pastorianus
gtgtgacgccagtgtaagtacaacc

SEQ ID NO: 70008 - DNA, 25 bp, Saccharomyces pastorianus
ttacctggtcatgaattgcctttac

SEQ ID NO: 70009 - DNA, 25 bp, Saccharomyces pastorianus
gattcgtaccataccaagactgctc

SEQ ID NO: 70010 - DNA, 25 bp, Saccharomyces pastorianus
aattacgttgggtgtccacattgat

SEQ ID NO: 70011 - DNA, 25 bp, Saccharomyces pastorianus
tgactcgcttggaacagcactacaa

SEQ ID NO: 70012 - DNA, 25 bp, Saccharomyces pastorianus
acttccgaagtttctcataccatgg

SEQ ID NO: 70013 - DNA, 25 bp, Saccharomyces pastorianus
attgctattccaactaccatcgata

SEQ ID NO: 70014 - DNA, 25 bp, Saccharomyces pastorianus
gatattgaccaaatttccggcggat

SEQ ID NO: 70015 - DNA, 25 bp, Saccharomyces pastorianus
cacattttcatcttccgtaactggt

SEQ ID NO: 70016 - DNA, 25 bp, Saccharomyces pastorianus
gaatgtactacaggactcggtcttg

SEQ ID NO: 70017 - DNA, 25 bp, Saccharomyces pastorianus
gggcaaatcgcacaaactgctctga

SEQ ID NO: 70018 - DNA, 25 bp, Saccharomyces pastorianus
gacagattcctttgtgctgactcgc

SEQ ID NO: 70019 - DNA, 25 bp, Saccharomyces pastorianus
agactgctcagcgtcaactatctgt

SEQ ID NO: 70020 - DNA, 25 bp, Saccharomyces pastorianus
cataactttgttgatccaccttcgg

SEQ ID NO: 70021 - DNA, 25 bp, Saccharomyces pastorianus
gaaatcgatctggactactccgaga

SEQ ID NO: 70022 - DNA, 25 bp, Saccharomyces pastorianus
taatttaggatctcataccctgcct

SEQ ID NO: 70023 - DNA, 25 bp, Saccharomyces pastorianus
tccaccttcggctctagaaatcgat

SEQ ID NO: 70024 - DNA, 25 bp, Saccharomyces pastorianus
aagttcacgatgctttacactttgg

SEQ ID NO: 70025 - DNA, 25 bp, Saccharomyces pastorianus
gattgttatctatactcgggaacta

SEQ ID NO: 70026 - DNA, 25 bp, Saccharomyces pastorianus
gtcaactacgggttttgccaaggag

SEQ ID NO: 70027 - DNA, 25 bp, Saccharomyces pastorianus
aagacgtgctatttccagcaatccc

SEQ ID NO: 70028 - DNA, 25 bp, Saccharomyces pastorianus
gtttcattgctttcataggtcaact

SEQ ID NO: 70029 - DNA, 25 bp, Saccharomyces pastorianus
ataccctgcctcgagtttatggaga

SEQ ID NO: 70030 - DNA, 25 bp, Saccharomyces pastorianus
atcgatggtcttcatggcaaggtca

SEQ ID NO: 70031 - DNA, 25 bp, Saccharomyces pastorianus
gatcttggcgtctgagttgttttta

SEQ ID NO: 70032 - DNA, 25 bp, Saccharomyces pastorianus
aagcgatacgtggacttctacacct

SEQ ID NO: 70033 - DNA, 25 bp, Saccharomyces pastorianus
gagagtcgatcctagagttaaacat

SEQ ID NO: 70034 - DNA, 25 bp, Saccharomyces pastorianus
ggtacgttcatatgagacgcgttgt

SEQ ID NO: 70035 - DNA, 25 bp, Saccharomyces pastorianus
gggccttgctcacaaataatggttt

SEQ ID NO: 70036 - DNA, 25 bp, Saccharomyces pastorianus
tcaagcgtcgtggaaccggtacgtt

SEQ ID NO: 70037 - DNA, 25 bp, Saccharomyces pastorianus
aagagctgacatcttcaagcgtcgt

SEQ ID NO: 70038 - DNA, 25 bp, Saccharomyces pastorianus
cttactttaggttgatagcggccaa

SEQ ID NO: 70039 - DNA, 25 bp, Saccharomyces pastorianus
aaaattgctctcaaacgcagcgcca

SEQ ID NO: 70040 - DNA, 25 bp, Saccharomyces pastorianus
gagagctttggccacatatgaaaat

SEQ ID NO: 70041 - DNA, 25 bp, Saccharomyces pastorianus
cttctacaccttacgctattcaata

SEQ ID NO: 70042 - DNA, 25 bp, Saccharomyces pastorianus
gtccttcttagtgagctttgcagca

SEQ ID NO: 70043 - DNA, 25 bp, Saccharomyces pastorianus
acagcatactctgctttggtgacgc

SEQ ID NO: 70044 - DNA, 25 bp, Saccharomyces pastorianus
gaacggtaacgaatttgagcttctt

SEQ ID NO: 70045 - DNA, 25 bp, Saccharomyces pastorianus
gcttgcattcaagtccttcttagtg

SEQ ID NO: 70046 - DNA, 25 bp, Saccharomyces pastorianus
tcctttagttcgtcggcccttgtgg

SEQ ID NO: 70047 - DNA, 25 bp, Saccharomyces pastorianus
gcagcaggcttgaaatccaaatcct

SEQ ID NO: 70048 - DNA, 25 bp, Saccharomyces pastorianus
ttgagcttctttttagttcctcctt

SEQ ID NO: 70049 - DNA, 25 bp, Saccharomyces pastorianus
atgtttgcgtttatgatgttattga

SEQ ID NO: 70050 - DNA, 25 bp, Saccharomyces pastorianus
ttagtgagctttgcagcaggcttga

SEQ ID NO: 70051 - DNA, 25 bp, Saccharomyces pastorianus
gctttggtgacgcttgcattcaagt

SEQ ID NO: 70052 - DNA, 25 bp, Saccharomyces pastorianus
gggatagcgcctcttacagcatact

SEQ ID NO: 70053 - DNA, 25 bp, Saccharomyces pastorianus
catcagtggacttattgcgctatat

SEQ ID NO: 70054 - DNA, 25 bp, Saccharomyces pastorianus
tattacagagcgaaccatcagtgga

SEQ ID NO: 70055 - DNA, 25 bp, Saccharomyces pastorianus
gcttataggttacttgctcgcgcat

SEQ ID NO: 70056 - DNA, 25 bp, Saccharomyces pastorianus
acttgctcgcgcatatagagtttat

SEQ ID NO: 70057 - DNA, 25 bp, Saccharomyces pastorianus
caggatggtttttatcgttgcttat

SEQ ID NO: 70058 - DNA, 25 bp, Saccharomyces pastorianus
aagttttgggctgcgaagcttacca

SEQ ID NO: 70059 - DNA, 25 bp, Saccharomyces pastorianus
gactgttcaggtttttactttggcg

SEQ ID NO: 70060 - DNA, 25 bp, Saccharomyces pastorianus
gactacgctattcttttgccagtaa

SEQ ID NO: 70061 - DNA, 25 bp, Saccharomyces pastorianus
caacgccgtatgtggatttcctcaa

SEQ ID NO: 70062 - DNA, 25 bp, Saccharomyces pastorianus
gaagttccatgcgatttagacgatt

SEQ ID NO: 70063 - DNA, 25 bp, Saccharomyces pastorianus
tttggcgtttgtgcccacatgtgaa

SEQ ID NO: 70064 - DNA, 25 bp, Saccharomyces pastorianus
aaacatcgagcccatgatagccttg

SEQ ID NO: 70065 - DNA, 25 bp, Saccharomyces pastorianus
gggcgctggcgctagtaaatagtca

SEQ ID NO: 70066 - DNA, 25 bp, Saccharomyces pastorianus
gaggttcccgtaccctacagcggat

SEQ ID NO: 70067 - DNA, 25 bp, Saccharomyces pastorianus
atagccttgccgctagatcgaccag

SEQ ID NO: 70068 - DNA, 25 bp, Saccharomyces pastorianus
agttgttgagacagctgccttgcaa

SEQ ID NO: 70069 - DNA, 25 bp, Saccharomyces pastorianus
ccgactggaaaccatttcttttcag

SEQ ID NO: 70070 - DNA, 25 bp, Saccharomyces pastorianus
aaaaggaccctccactggcatttga

SEQ ID NO: 70071 - DNA, 25 bp, Saccharomyces pastorianus
gatcgaccagtactagtccataact

SEQ ID NO: 70072 - DNA, 25 bp, Saccharomyces pastorianus
actggcatttgacctattggtacac

SEQ ID NO: 70073 - DNA, 25 bp, Saccharomyces pastorianus
cttgcaaggcaatcgctaagctgtg

SEQ ID NO: 70074 - DNA, 25 bp, Saccharomyces pastorianus
ataactatctatgtgctgcattcaa

SEQ ID NO: 70075 - DNA, 25 bp, Saccharomyces pastorianus
cgctaggtctagtgtggcaattaat

SEQ ID NO: 70076 - DNA, 25 bp, Saccharomyces pastorianus
gtaataagttgttgacgctaggtct

SEQ ID NO: 70077 - DNA, 25 bp, Saccharomyces pastorianus
gatcacggtttatcaaacgcacatt

SEQ ID NO: 70078 - DNA, 25 bp, Saccharomyces pastorianus
agaaaacaccaactacgctgtcgac

SEQ ID NO: 70079 - DNA, 25 bp, Saccharomyces pastorianus
aaacgcacatttcctattggatgtt

SEQ ID NO: 70080 - DNA, 25 bp, Saccharomyces pastorianus
tgtcaataaaagacccgcctcgggc

SEQ ID NO: 70081 - DNA, 25 bp, Saccharomyces pastorianus
aatgggctcaggaccaagtcacgaa

SEQ ID NO: 70082 - DNA, 25 bp, Saccharomyces pastorianus
actacgctgtcgacttaggcagatc

SEQ ID NO: 70083 - DNA, 25 bp, Saccharomyces pastorianus
gcctcgggcactgaaatatccagat

SEQ ID NO: 70084 - DNA, 25 bp, Saccharomyces pastorianus
gcgcagaaacatttccatcactatg

SEQ ID NO: 70085 - DNA, 25 bp, Saccharomyces pastorianus
tttgaacggaattgcaccaggctat

SEQ ID NO: 70086 - DNA, 25 bp, Saccharomyces pastorianus
aacttctctaaagacgtttctgatg

SEQ ID NO: 70087 - DNA, 25 bp, Saccharomyces pastorianus
catcctgaattataccgtctactgg

SEQ ID NO: 70088 - DNA, 25 bp, Saccharomyces pastorianus
cagttggatcctacgttgtgttcta

SEQ ID NO: 70089 - DNA, 25 bp, Saccharomyces pastorianus
tatttgaccccaagttctttggtcg

SEQ ID NO: 70090 - DNA, 25 bp, Saccharomyces pastorianus
ttctttggtcgcagggaaccctaag

SEQ ID NO: 70091 - DNA, 25 bp, Saccharomyces pastorianus
gtagctcacctgtttaacactcatc

SEQ ID NO: 70092 - DNA, 25 bp, Saccharomyces pastorianus
gttaaatctggcctttgtagctcac

SEQ ID NO: 70093 - DNA, 25 bp, Saccharomyces pastorianus
aaatcttattgcgttggttcaacta

SEQ ID NO: 70094 - DNA, 25 bp, Saccharomyces pastorianus
aatttttgagattgcctccagagca

SEQ ID NO: 70095 - DNA, 25 bp, Saccharomyces pastorianus
gttgtgttctaaggcgcctttgcaa

SEQ ID NO: 70096 - DNA, 25 bp, Saccharomyces pastorianus
ttgcaaactaccgacccactggaaa

SEQ ID NO: 70097 - DNA, 25 bp, Saccharomyces pastorianus
atggttcttccgtcccaactgtcac

SEQ ID NO: 70098 - DNA, 25 bp, Saccharomyces pastorianus
tttgccggtgctgccgctttgttgt

SEQ ID NO: 70099 - DNA, 25 bp, Saccharomyces pastorianus
tgtcagagccttgccagctgctggt

SEQ ID NO: 70100 - DNA, 25 bp, Saccharomyces pastorianus
aaacatggttcttccgtcccaactg

SEQ ID NO: 70101 - DNA, 25 bp, Saccharomyces pastorianus
cagcaccaactgaaaatccaaccaa

SEQ ID NO: 70102 - DNA, 25 bp, Saccharomyces pastorianus
tccaggtccagcaccaactgaaaat

SEQ ID NO: 70103 - DNA, 25 bp, Saccharomyces pastorianus
acaccggtgctgctgtcagagcctt

SEQ ID NO: 70104 - DNA, 25 bp, Saccharomyces pastorianus
tgctggtgctttgtttgccggtgct

SEQ ID NO: 70105 - DNA, 25 bp, Saccharomyces pastorianus
ggtgctgctgtcagagccttgccag

SEQ ID NO: 70106 - DNA, 25 bp, Saccharomyces pastorianus
tccaaccaaacatggttcttccgtc

SEQ ID NO: 70107 - DNA, 25 bp, Saccharomyces pastorianus
tggtgctttgtttgccggtgctgcc

SEQ ID NO: 70108 - DNA, 25 bp, Saccharomyces pastorianus
atctcagcagagacttatattccaa

SEQ ID NO: 70109 - DNA, 25 bp, Saccharomyces pastorianus
atgtgaaagtttacgtaatcgccaa

SEQ ID NO: 70110 - DNA, 25 bp, Saccharomyces pastorianus
attccaaggaaagcaaatgtatgtg

SEQ ID NO: 70111 - DNA, 25 bp, Saccharomyces pastorianus
gaaagaatcggaccttgtgtatcac

SEQ ID NO: 70112 - DNA, 25 bp, Saccharomyces pastorianus
cgtaatcgccaattacatttcttct

SEQ ID NO: 70113 - DNA, 25 bp, Saccharomyces pastorianus
agaatcggaccttgtgtatcacatc

SEQ ID NO: 70114 - DNA, 25 bp, Saccharomyces pastorianus
atcggaccttgtgtatcacatcaag

SEQ ID NO: 70115 - DNA, 25 bp, Saccharomyces pastorianus
tgtcgaattgaaagaatcggacctt

SEQ ID NO: 70116 - DNA, 25 bp, Saccharomyces pastorianus
gtgaaagtttacgtaatcgccaatt

SEQ ID NO: 70117 - DNA, 25 bp, Saccharomyces pastorianus
ggaccttgtgtatcacatcaaggaa

SEQ ID NO: 70118 - DNA, 25 bp, Saccharomyces pastorianus
agcagagacttatattccaaggaaa

SEQ ID NO: 70119 - DNA, 25 bp, Saccharomyces pastorianus
aagaatcggaccttgtgtatcacat

SEQ ID NO: 70120 - DNA, 25 bp, Saccharomyces pastorianus
atctcagcagagacttatattccaa

SEQ ID NO: 70121 - DNA, 25 bp, Saccharomyces pastorianus
ggaagggattccaccatctcagcag

SEQ ID NO: 70122 - DNA, 25 bp, Saccharomyces pastorianus
attccaaggaaagcaaatgtatgtg

SEQ ID NO: 70123 - DNA, 25 bp, Saccharomyces pastorianus
cgttgactggcaaagaaatttctgt

SEQ ID NO: 70124 - DNA, 25 bp, Saccharomyces pastorianus
cgtaatcgccaattacatttcttct

SEQ ID NO: 70125 - DNA, 25 bp, Saccharomyces pastorianus
ggaccttgtgtatcacatcaaggaa

SEQ ID NO: 70126 - DNA, 25 bp, Saccharomyces pastorianus
atcggaccttgtgtatcacatcaag

SEQ ID NO: 70127 - DNA, 25 bp, Saccharomyces pastorianus
tgtcgaattgaaagaatcggacctt

SEQ ID NO: 70128 - DNA, 25 bp, Saccharomyces pastorianus
gtgaaagtttacgtaatcgccaatt

SEQ ID NO: 70129 - DNA, 25 bp, Saccharomyces pastorianus
agcagagacttatattccaaggaaa

SEQ ID NO: 70130 - DNA, 25 bp, Saccharomyces pastorianus
attattccaagatttttctgtcctt

SEQ ID NO: 70131 - DNA, 25 bp, Saccharomyces pastorianus
tgtccttttgttcgattctcttagt

SEQ ID NO: 70132 - DNA, 25 bp, Saccharomyces pastorianus
taatatctctaaatcagttttcaaa

SEQ ID NO: 70133 - DNA, 25 bp, Saccharomyces pastorianus
cttccaaatcccagttgaggtcttt

SEQ ID NO: 70134 - DNA, 25 bp, Saccharomyces pastorianus
gattctcttagttgcttacactcca

SEQ ID NO: 70135 - DNA, 25 bp, Saccharomyces pastorianus
tgcttacactccatatccaaactag

SEQ ID NO: 70136 - DNA, 25 bp, Saccharomyces pastorianus
caaagtttccttgtcattattccaa

SEQ ID NO: 70137 - DNA, 25 bp, Saccharomyces pastorianus
gttaacttagcttccaaatcccagt

SEQ ID NO: 70138 - DNA, 25 bp, Saccharomyces pastorianus
catttttggttaacgataatatctc

SEQ ID NO: 70139 - DNA, 25 bp, Saccharomyces pastorianus
atcccagttgaggtctttggttgag

SEQ ID NO: 70140 - DNA, 25 bp, Saccharomyces pastorianus
gatttttctgtccttttgttcgatt

SEQ ID NO: 70141 - DNA, 25 bp, Saccharomyces pastorianus
caagaagcaccacgacagaccaggt

SEQ ID NO: 70142 - DNA, 25 bp, Saccharomyces pastorianus
tcaagaagcaccacgacagaccagg

SEQ ID NO: 70143 - DNA, 25 bp, Saccharomyces pastorianus
cttcaagaagcaccacgacagacca

SEQ ID NO: 70144 - DNA, 25 bp, Saccharomyces pastorianus
ttcaagaagcaccacgacagaccag

SEQ ID NO: 70145 - DNA, 25 bp, Saccharomyces pastorianus
gaagcaccacgacagaccaggtttg

SEQ ID NO: 70146 - DNA, 25 bp, Saccharomyces pastorianus
aagaagcaccacgacagaccaggtt

SEQ ID NO: 70147 - DNA, 25 bp, Saccharomyces pastorianus
aagcaccacgacagaccaggtttgt

SEQ ID NO: 70148 - DNA, 25 bp, Saccharomyces pastorianus
agaagcaccacgacagaccaggttt

SEQ ID NO: 70149 - DNA, 25 bp, Saccharomyces pastorianus
gaggatacgactgacgattacgaca

SEQ ID NO: 70150 - DNA, 25 bp, Saccharomyces pastorianus
gatacgactgacgattacgacaaga

SEQ ID NO: 70151 - DNA, 25 bp, Saccharomyces pastorianus
caaatgctgggaaagacgaggatac

SEQ ID NO: 70152 - DNA, 25 bp, Saccharomyces pastorianus
atgcaagataagttagacggatact

SEQ ID NO: 70153 - DNA, 25 bp, Saccharomyces pastorianus
ggatactatgcgaatgtactttcaa

SEQ ID NO: 70154 - DNA, 25 bp, Saccharomyces pastorianus
tgacgattacgacaagaccagtgat

SEQ ID NO: 70155 - DNA, 25 bp, Saccharomyces pastorianus
ttacgacaagaccagtgatgaagaa

SEQ ID NO: 70156 - DNA, 25 bp, Saccharomyces pastorianus
gacggatactatgcgaatgtacttt

SEQ ID NO: 70157 - DNA, 25 bp, Saccharomyces pastorianus
agacgaggatacgactgacgattac

SEQ ID NO: 70158 - DNA, 25 bp, Saccharomyces pastorianus
gcgaatgtactttcaaatgctggga

SEQ ID NO: 70159 - DNA, 25 bp, Saccharomyces pastorianus
aaatctagaggagatactggcggaa

SEQ ID NO: 70160 - DNA, 25 bp, Saccharomyces pastorianus
gttggtctccaacacggactgcaga

SEQ ID NO: 70161 - DNA, 25 bp, Saccharomyces pastorianus
gccgtgggcgattggatctgcattt

SEQ ID NO: 70162 - DNA, 25 bp, Saccharomyces pastorianus
tttgggcccaggttggtctccaaca

SEQ ID NO: 70163 - DNA, 25 bp, Saccharomyces pastorianus
agaccctcggcagaggtgacgttca

SEQ ID NO: 70164 - DNA, 25 bp, Saccharomyces pastorianus
atcaccggtaatctcgtcctgggcg

SEQ ID NO: 70165 - DNA, 25 bp, Saccharomyces pastorianus
gtgacgttcaccttcaacgcggcat

SEQ ID NO: 70166 - DNA, 25 bp, Saccharomyces pastorianus
ttggtcaacttaatattgcccgccc

SEQ ID NO: 70167 - DNA, 25 bp, Saccharomyces pastorianus
actcggccttgggattcagcaattg

SEQ ID NO: 70168 - DNA, 25 bp, Saccharomyces pastorianus
tacaagcatcttcagcgtacccttt

SEQ ID NO: 70169 - DNA, 25 bp, Saccharomyces pastorianus
gaaccggtgcgcctgtctgagcaac

SEQ ID NO: 70170 - DNA, 25 bp, Saccharomyces pastorianus
gcatttcggttagcagcactttacc

SEQ ID NO: 70171 - DNA, 25 bp, Saccharomyces pastorianus
aggacgagttggacgacgcccagca

SEQ ID NO: 70172 - DNA, 25 bp, Saccharomyces pastorianus
tatcgaaggcatctgggactcctac

SEQ ID NO: 70173 - DNA, 25 bp, Saccharomyces pastorianus
gaccctaagtcttgtaccatcttga

SEQ ID NO: 70174 - DNA, 25 bp, Saccharomyces pastorianus
aaacataggtgactcgtgcgacccc

SEQ ID NO: 70175 - DNA, 25 bp, Saccharomyces pastorianus
gaggccatgcttgtgatcccaaaga

SEQ ID NO: 70176 - DNA, 25 bp, Saccharomyces pastorianus
gagagccgtggcaaacgtcctcaag

SEQ ID NO: 70177 - DNA, 25 bp, Saccharomyces pastorianus
cattggatgtccttgccatggtgga

SEQ ID NO: 70178 - DNA, 25 bp, Saccharomyces pastorianus
agaactccgtcgaggatttgtcgcc

SEQ ID NO: 70179 - DNA, 25 bp, Saccharomyces pastorianus
agaccggtatcgaagcctttgcgga

SEQ ID NO: 70180 - DNA, 25 bp, Saccharomyces pastorianus
tgcattctacatcgcactggcaaga

SEQ ID NO: 70181 - DNA, 25 bp, Saccharomyces pastorianus
tgatcaaaggttccactcactacgc

SEQ ID NO: 70182 - DNA, 25 bp, Saccharomyces pastorianus
cgatgacccatgaacattctgccat

SEQ ID NO: 70183 - DNA, 25 bp, Saccharomyces pastorianus
gtcactctctagcatttccagacat

SEQ ID NO: 70184 - DNA, 25 bp, Saccharomyces pastorianus
actcatattgctatccgaacggctt

SEQ ID NO: 70185 - DNA, 25 bp, Saccharomyces pastorianus
atgctcatcatactgggcagctgct

SEQ ID NO: 70186 - DNA, 25 bp, Saccharomyces pastorianus
tgctgtggctgcttgtacatcttca

SEQ ID NO: 70187 - DNA, 25 bp, Saccharomyces pastorianus
tctgccatggcatctttatgctcat

SEQ ID NO: 70188 - DNA, 25 bp, Saccharomyces pastorianus
agctgctccaaacctgtcatttgga

SEQ ID NO: 70189 - DNA, 25 bp, Saccharomyces pastorianus
tcattcattgttcaaacagccccga

SEQ ID NO: 70190 - DNA, 25 bp, Saccharomyces pastorianus
gggcatcttaaatatctggtcactc

SEQ ID NO: 70191 - DNA, 25 bp, Saccharomyces pastorianus
aacaatctcttcgatgacccatgaa

SEQ ID NO: 70192 - DNA, 25 bp, Saccharomyces pastorianus
gaacggctttacttgtgtttgctgt

SEQ ID NO: 70193 - DNA, 25 bp, Saccharomyces pastorianus
gaaagcgacgagacctctccaatga

SEQ ID NO: 70194 - DNA, 25 bp, Saccharomyces pastorianus
aaccgctgcttacgttggtactaat

SEQ ID NO: 70195 - DNA, 25 bp, Saccharomyces pastorianus
attcctccgcttctacaatgaactt

SEQ ID NO: 70196 - DNA, 25 bp, Saccharomyces pastorianus
acgatcatttattttcggtctctga

SEQ ID NO: 70197 - DNA, 25 bp, Saccharomyces pastorianus
aacttggattacagattgcccgaat

SEQ ID NO: 70198 - DNA, 25 bp, Saccharomyces pastorianus
gtctgcttcaagttatgccgtatcg

SEQ ID NO: 70199 - DNA, 25 bp, Saccharomyces pastorianus
accttgactccacttttgatgcgaa

SEQ ID NO: 70200 - DNA, 25 bp, Saccharomyces pastorianus
gtaaattgatcatccccggtttgaa

SEQ ID NO: 70201 - DNA, 25 bp, Saccharomyces pastorianus
agaaaggcaaatcccagcgcactgg

SEQ ID NO: 70202 - DNA, 25 bp, Saccharomyces pastorianus
aatacgttgaactgcgccgccaata

SEQ ID NO: 70203 - DNA, 25 bp, Saccharomyces pastorianus
agagcctcctttagtgctcagtctg

SEQ ID NO: 70204 - DNA, 25 bp, Saccharomyces pastorianus
gcaatcacctcaattatgtattcca

SEQ ID NO: 70205 - DNA, 25 bp, Saccharomyces pastorianus
ggtcttgaaatgcaatcacctcaat

SEQ ID NO: 70206 - DNA, 25 bp, Saccharomyces pastorianus
tggtcttgaaatgcaatcacctcaa

SEQ ID NO: 70207 - DNA, 25 bp, Saccharomyces pastorianus
tatgtattccacacagaatcaaaag

SEQ ID NO: 70208 - DNA, 25 bp, Saccharomyces pastorianus
actggtcttgaaatgcaatcacctc

SEQ ID NO: 70209 - DNA, 25 bp, Saccharomyces pastorianus
cactggtcttgaaatgcaatcacct

SEQ ID NO: 70210 - DNA, 25 bp, Saccharomyces pastorianus
tcttgaaatgcaatcacctcaatta

SEQ ID NO: 70211 - DNA, 25 bp, Saccharomyces pastorianus
ctggtcttgaaatgcaatcacctca

SEQ ID NO: 70212 - DNA, 25 bp, Saccharomyces pastorianus
gtcttgaaatgcaatcacctcaatt

SEQ ID NO: 70213 - DNA, 25 bp, Saccharomyces pastorianus
gggtgatccaaacaattatcaacga

SEQ ID NO: 70214 - DNA, 25 bp, Saccharomyces pastorianus
ccactggtcttgaaatgcaatcacc

SEQ ID NO: 70215 - DNA, 25 bp, Saccharomyces pastorianus
aaattgagaaaccaactgtctttga

SEQ ID NO: 70216 - DNA, 25 bp, Saccharomyces pastorianus
aatgtttaccattgatttgccgaat

SEQ ID NO: 70217 - DNA, 25 bp, Saccharomyces pastorianus
tgcgaggatgtcacctacaaaatca

SEQ ID NO: 70218 - DNA, 25 bp, Saccharomyces pastorianus
gaaagactcaaatgcgacttctcga

SEQ ID NO: 70219 - DNA, 25 bp, Saccharomyces pastorianus
gtttctcggataggatcggcaatat

SEQ ID NO: 70220 - DNA, 25 bp, Saccharomyces pastorianus
aatatcgccacatttaatttaccaa

SEQ ID NO: 70221 - DNA, 25 bp, Saccharomyces pastorianus
tataccaggtttttgcgaggatgtc

SEQ ID NO: 70222 - DNA, 25 bp, Saccharomyces pastorianus
aacattttctcattttataccaggt

SEQ ID NO: 70223 - DNA, 25 bp, Saccharomyces pastorianus
ggaaagtttccggttatcattagat

SEQ ID NO: 70224 - DNA, 25 bp, Saccharomyces pastorianus
ttcttggcttctttagtttctcgga

SEQ ID NO: 70225 - DNA, 25 bp, Saccharomyces pastorianus
gaatcactgtcaaacttcttggctt

SEQ ID NO: 70226 - DNA, 25 bp, Saccharomyces pastorianus
atatgcaagtccactgagcctcaat

SEQ ID NO: 70227 - DNA, 25 bp, Saccharomyces pastorianus
ctatatagtaaaggcttcggcacca

SEQ ID NO: 70228 - DNA, 25 bp, Saccharomyces pastorianus
atgctgaatgagtttccctatctag

SEQ ID NO: 70229 - DNA, 25 bp, Saccharomyces pastorianus
tcgacttcgcgctactggaatacaa

SEQ ID NO: 70230 - DNA, 25 bp, Saccharomyces pastorianus
gaaaactactatatcgacttcgcgc

SEQ ID NO: 70231 - DNA, 25 bp, Saccharomyces pastorianus
aaatatactgctttgattcacgatg

SEQ ID NO: 70232 - DNA, 25 bp, Saccharomyces pastorianus
ctagggaatgtttctatgtctcata

SEQ ID NO: 70233 - DNA, 25 bp, Saccharomyces pastorianus
gatgtacttattcttctatgctgaa

SEQ ID NO: 70234 - DNA, 25 bp, Saccharomyces pastorianus
aaggcttcggcaccaatatgcaagt

SEQ ID NO: 70235 - DNA, 25 bp, Saccharomyces pastorianus
tcgagataccctaaaagtttggcat

SEQ ID NO: 70236 - DNA, 25 bp, Saccharomyces pastorianus
gcatattgggagaagttactgaact

SEQ ID NO: 70237 - DNA, 25 bp, Saccharomyces pastorianus
aggacagtatcccatagcatctaat

SEQ ID NO: 70238 - DNA, 25 bp, Saccharomyces pastorianus
ccatagcatctaatgagggacaaag

SEQ ID NO: 70239 - DNA, 25 bp, Saccharomyces pastorianus
ggaagctcaatagtcctgaggcgtt

SEQ ID NO: 70240 - DNA, 25 bp, Saccharomyces pastorianus
gaacaacttatgaagggcagcctac

SEQ ID NO: 70241 - DNA, 25 bp, Saccharomyces pastorianus
gggagtagcgtatcatcatagtaaa

SEQ ID NO: 70242 - DNA, 25 bp, Saccharomyces pastorianus
gaggcgtttcaatcgtttgacatct

SEQ ID NO: 70243 - DNA, 25 bp, Saccharomyces pastorianus
aaaggaccactttcacaaggacagt

SEQ ID NO: 70244 - DNA, 25 bp, Saccharomyces pastorianus
caactagaaaggatgtggaacaact

SEQ ID NO: 70245 - DNA, 25 bp, Saccharomyces pastorianus
gtttcaatcgtttgacatctggaaa

SEQ ID NO: 70246 - DNA, 25 bp, Saccharomyces pastorianus
gtagcgtatcatcatagtaaaccaa

SEQ ID NO: 70247 - DNA, 25 bp, Saccharomyces pastorianus
tagtcctgaggcgtttcaatcgttt

SEQ ID NO: 70248 - DNA, 25 bp, Saccharomyces pastorianus
gtatgcttagtaaaccttgtcttgt

SEQ ID NO: 70249 - DNA, 25 bp, Saccharomyces pastorianus
gtcatttagtatctcgcagtcgaac

SEQ ID NO: 70250 - DNA, 25 bp, Saccharomyces pastorianus
gcggttgtagtatccttgtcattta

SEQ ID NO: 70251 - DNA, 25 bp, Saccharomyces pastorianus
gcagtcgaacccacaatcttctatt

SEQ ID NO: 70252 - DNA, 25 bp, Saccharomyces pastorianus
ccttgtcttgtagttgcggttgtag

SEQ ID NO: 70253 - DNA, 25 bp, Saccharomyces pastorianus
gtagtcaccccattatcgtatgcca

SEQ ID NO: 70254 - DNA, 25 bp, Saccharomyces pastorianus
gatagaatcagtagtcaccccatta

SEQ ID NO: 70255 - DNA, 25 bp, Saccharomyces pastorianus
gaaacgcaggatccacaggtcattc

SEQ ID NO: 70256 - DNA, 25 bp, Saccharomyces pastorianus
acaggtcattccttgtatgcttagt

SEQ ID NO: 70257 - DNA, 25 bp, Saccharomyces pastorianus
caatcttctattgtttccttgatag

SEQ ID NO: 70258 - DNA, 25 bp, Saccharomyces pastorianus
gctaaagctcgtagctgcgtggtaa

SEQ ID NO: 70259 - DNA, 25 bp, Saccharomyces pastorianus
gcaatctcaaaactcgaaacctcaa

SEQ ID NO: 70260 - DNA, 25 bp, Saccharomyces pastorianus
tggaccacgatttgggtgcctatac

SEQ ID NO: 70261 - DNA, 25 bp, Saccharomyces pastorianus
gataaccaagacgtcaaagcaaagc

SEQ ID NO: 70262 - DNA, 25 bp, Saccharomyces pastorianus
taatttgagtaaaacggtgccgaat

SEQ ID NO: 70263 - DNA, 25 bp, Saccharomyces pastorianus
agacatgctgcaaagatgagactca

SEQ ID NO: 70264 - DNA, 25 bp, Saccharomyces pastorianus
aagtgttgcatcacgaatacgttca

SEQ ID NO: 70265 - DNA, 25 bp, Saccharomyces pastorianus
tttcctcattaatcttggaccacga

SEQ ID NO: 70266 - DNA, 25 bp, Saccharomyces pastorianus
ggtgccgaatttacatcgaaaagat

SEQ ID NO: 70267 - DNA, 25 bp, Saccharomyces pastorianus
gaattgggaccaagactaaccttga

SEQ ID NO: 70268 - DNA, 25 bp, Saccharomyces pastorianus
aagaaggctgtcaaagatgctaaga

SEQ ID NO: 70269 - DNA, 25 bp, Saccharomyces pastorianus
gatgacatttcctcattaatcttgg

SEQ ID NO: 70270 - DNA, 25 bp, Saccharomyces pastorianus
tcggcaacaactttgcagcccgcgt

SEQ ID NO: 70271 - DNA, 25 bp, Saccharomyces pastorianus
ggaacggcattgaagcttatactct

SEQ ID NO: 70272 - DNA, 25 bp, Saccharomyces pastorianus
acaagaaagcatacgtccttccctt

SEQ ID NO: 70273 - DNA, 25 bp, Saccharomyces pastorianus
attcattctcacgtctgatggcggc

SEQ ID NO: 70274 - DNA, 25 bp, Saccharomyces pastorianus
tgctggactatggtaggctggcata

SEQ ID NO: 70275 - DNA, 25 bp, Saccharomyces pastorianus
agcttatactctaacggtcttcggc

SEQ ID NO: 70276 - DNA, 25 bp, Saccharomyces pastorianus
tctgatggcggcttcctcctctggg

SEQ ID NO: 70277 - DNA, 25 bp, Saccharomyces pastorianus
tttactcgctccaaaacggcacaat

SEQ ID NO: 70278 - DNA, 25 bp, Saccharomyces pastorianus
ctgcctctgatcatttcggcaacaa

SEQ ID NO: 70279 - DNA, 25 bp, Saccharomyces pastorianus
ccgcgtccagcaacggcttgatgtt

SEQ ID NO: 70280 - DNA, 25 bp, Saccharomyces pastorianus
ggtaggctggcatacgacgtcacaa

SEQ ID NO: 70281 - DNA, 25 bp, Saccharomyces pastorianus
accaccgactatttcagcaagcttt

SEQ ID NO: 70282 - DNA, 25 bp, Saccharomyces pastorianus
aggacaatggccacagggcccttat

SEQ ID NO: 70283 - DNA, 25 bp, Saccharomyces pastorianus
agaaggtgacttcaccaccgactat

SEQ ID NO: 70284 - DNA, 25 bp, Saccharomyces pastorianus
gtacatgagattagacggtgccaca

SEQ ID NO: 70285 - DNA, 25 bp, Saccharomyces pastorianus
gcaagctttccgtaagggacctact

SEQ ID NO: 70286 - DNA, 25 bp, Saccharomyces pastorianus
tacccgggaacgctccaaatgagga

SEQ ID NO: 70287 - DNA, 25 bp, Saccharomyces pastorianus
ggtgcagacaccgttatcttttacg

SEQ ID NO: 70288 - DNA, 25 bp, Saccharomyces pastorianus
gggcccttattttcactcaaatgac

SEQ ID NO: 70289 - DNA, 25 bp, Saccharomyces pastorianus
ggtcagacccgggatgtgcatattt

SEQ ID NO: 70290 - DNA, 25 bp, Saccharomyces pastorianus
gagagatttaacactgattccagga

SEQ ID NO: 70291 - DNA, 25 bp, Saccharomyces pastorianus
gactacagtgtttattctatccagt

SEQ ID NO: 70292 - DNA, 25 bp, Saccharomyces pastorianus
gaatctttacgacatgccttgcgtt

SEQ ID NO: 70293 - DNA, 25 bp, Saccharomyces pastorianus
gtaagtttgcgttctttatctacga

SEQ ID NO: 70294 - DNA, 25 bp, Saccharomyces pastorianus
aaaagaactgtttgaaggctacgca

SEQ ID NO: 70295 - DNA, 25 bp, Saccharomyces pastorianus
atgccttgcgttccaaagatctttc

SEQ ID NO: 70296 - DNA, 25 bp, Saccharomyces pastorianus
caagggtctttagcccagatggtca

SEQ ID NO: 70297 - DNA, 25 bp, Saccharomyces pastorianus
tgaacgattgatgccatattccagc

SEQ ID NO: 70298 - DNA, 25 bp, Saccharomyces pastorianus
gtataaacatatgggcagcgcatcc

SEQ ID NO: 70299 - DNA, 25 bp, Saccharomyces pastorianus
atatgccggagttatcaagggtctt

SEQ ID NO: 70300 - DNA, 25 bp, Saccharomyces pastorianus
agcgcatccccatatcagatattgc

SEQ ID NO: 70301 - DNA, 25 bp, Saccharomyces pastorianus
ggagtaacagagtatgcttcttttt

SEQ ID NO: 70302 - DNA, 25 bp, Saccharomyces pastorianus
gaaggctacgcaaattcgtgatttt

SEQ ID NO: 70303 - DNA, 25 bp, Saccharomyces pastorianus
gcttcgctaaacaacctggtagagt

SEQ ID NO: 70304 - DNA, 25 bp, Saccharomyces pastorianus
tgggaaactgacatcgaattgcgaa

SEQ ID NO: 70305 - DNA, 25 bp, Saccharomyces pastorianus
tggtagagtcaatggtatcatcaat

SEQ ID NO: 70306 - DNA, 25 bp, Saccharomyces pastorianus
ggtatcatcaatgcttattcttcgc

SEQ ID NO: 70307 - DNA, 25 bp, Saccharomyces pastorianus
ggccttgatttctgggaaactgaca

SEQ ID NO: 70308 - DNA, 25 bp, Saccharomyces pastorianus
ttgatttctgggaaactgacatcga

SEQ ID NO: 70309 - DNA, 25 bp, Saccharomyces pastorianus
tattggccttgatttctgggaaact

SEQ ID NO: 70310 - DNA, 25 bp, Saccharomyces pastorianus
gctaaacaacctggtagagtcaatg

SEQ ID NO: 70311 - DNA, 25 bp, Saccharomyces pastorianus
aatgcttattcttcgcattttcctc

SEQ ID NO: 70312 - DNA, 25 bp, Saccharomyces pastorianus
cgaagcttcgctaaacaacctggta

SEQ ID NO: 70313 - DNA, 25 bp, Saccharomyces pastorianus
tgacatcgaattgcgaagcttcgct

SEQ ID NO: 70314 - DNA, 25 bp, Saccharomyces pastorianus
ataatggcgacacccaaacggctgt

SEQ ID NO: 70315 - DNA, 25 bp, Saccharomyces pastorianus
gagctacaccaagggaagcggtcct

SEQ ID NO: 70316 - DNA, 25 bp, Saccharomyces pastorianus
acggccgcctttgaggtactctaag

SEQ ID NO: 70317 - DNA, 25 bp, Saccharomyces pastorianus
ggtccaacaaatggttctcgaagct

SEQ ID NO: 70318 - DNA, 25 bp, Saccharomyces pastorianus
gacatagccgattttatcaactcaa

SEQ ID NO: 70319 - DNA, 25 bp, Saccharomyces pastorianus
aactatctgcaaacacgccagttat

SEQ ID NO: 70320 - DNA, 25 bp, Saccharomyces pastorianus
aagacctcagtcttccggaagttca

SEQ ID NO: 70321 - DNA, 25 bp, Saccharomyces pastorianus
gaagcggtcctgacgattggaaaac

SEQ ID NO: 70322 - DNA, 25 bp, Saccharomyces pastorianus
aaaaaactgtggctacccactgcac

SEQ ID NO: 70323 - DNA, 25 bp, Saccharomyces pastorianus
tgtttttgccctttctctactagat

SEQ ID NO: 70324 - DNA, 25 bp, Saccharomyces pastorianus
acatcggaaccagtgagaagacctc

SEQ ID NO: 70325 - DNA, 25 bp, Saccharomyces pastorianus
aactgtgctttggtcatcagcgaaa

SEQ ID NO: 70326 - DNA, 25 bp, Saccharomyces pastorianus
gagactgtctacgttttttcaaact

SEQ ID NO: 70327 - DNA, 25 bp, Saccharomyces pastorianus
gtcaactctttggacctcaagaaag

SEQ ID NO: 70328 - DNA, 25 bp, Saccharomyces pastorianus
aaactatttcggatagcggcaacaa

SEQ ID NO: 70329 - DNA, 25 bp, Saccharomyces pastorianus
ttcttcagtggtaacccagatgttg

SEQ ID NO: 70330 - DNA, 25 bp, Saccharomyces pastorianus
gtaccagaattcaactgagcagtct

SEQ ID NO: 70331 - DNA, 25 bp, Saccharomyces pastorianus
ggctctccaactaccacaatcaaaa

SEQ ID NO: 70332 - DNA, 25 bp, Saccharomyces pastorianus
ggcagatttgatgctaggctctcca

SEQ ID NO: 70333 - DNA, 25 bp, Saccharomyces pastorianus
gaatttgtcacgtcaactctttgga

SEQ ID NO: 70334 - DNA, 25 bp, Saccharomyces pastorianus
ttgacttcaaagctaaccgcaatag

SEQ ID NO: 70335 - DNA, 25 bp, Saccharomyces pastorianus
atctgatccttattgttttctttct

SEQ ID NO: 70336 - DNA, 25 bp, Saccharomyces pastorianus
tacttcttgcctgagactgttctgc

SEQ ID NO: 70337 - DNA, 25 bp, Saccharomyces pastorianus
ctgccattcgtttgaatacttagcc

SEQ ID NO: 70338 - DNA, 25 bp, Saccharomyces pastorianus
gcattcaataaaggtaagtccgcta

SEQ ID NO: 70339 - DNA, 25 bp, Saccharomyces pastorianus
ggctcctagcacacatacttttgaa

SEQ ID NO: 70340 - DNA, 25 bp, Saccharomyces pastorianus
tagcctgactgcctcaaaaagaaat

SEQ ID NO: 70341 - DNA, 25 bp, Saccharomyces pastorianus
ggatatagcctgactgcctcaaaaa

SEQ ID NO: 70342 - DNA, 25 bp, Saccharomyces pastorianus
gctaaggctttcgaatcagtgacac

SEQ ID NO: 70343 - DNA, 25 bp, Saccharomyces pastorianus
gaagtgcatctattaataatcgtgc

SEQ ID NO: 70344 - DNA, 25 bp, Saccharomyces pastorianus
gactgttctgccattcgtttgaata

SEQ ID NO: 70345 - DNA, 25 bp, Saccharomyces pastorianus
ggtaagtccgctaaggctttcgaat

SEQ ID NO: 70346 - DNA, 25 bp, Saccharomyces pastorianus
atcagtgacactttctacttcttgc

SEQ ID NO: 70347 - DNA, 25 bp, Saccharomyces pastorianus
aagtaacatacctctaacgcagctc

SEQ ID NO: 70348 - DNA, 25 bp, Saccharomyces pastorianus
aacgcagctccctagtggttcagaa

SEQ ID NO: 70349 - DNA, 25 bp, Saccharomyces pastorianus
agctcgacgcctcaattagtggcaa

SEQ ID NO: 70350 - DNA, 25 bp, Saccharomyces pastorianus
tgggatcccatatcacgtcgttata

SEQ ID NO: 70351 - DNA, 25 bp, Saccharomyces pastorianus
gaaacttctccgctaggttcatcta

SEQ ID NO: 70352 - DNA, 25 bp, Saccharomyces pastorianus
atgttttaacaaccacctcttcatc

SEQ ID NO: 70353 - DNA, 25 bp, Saccharomyces pastorianus
gactcgtcgattgatctgggatccc

SEQ ID NO: 70354 - DNA, 25 bp, Saccharomyces pastorianus
gcaagcggtgtttctgactcgtcga

SEQ ID NO: 70355 - DNA, 25 bp, Saccharomyces pastorianus
agcgaactcgatagctggctcaatc

SEQ ID NO: 70356 - DNA, 25 bp, Saccharomyces pastorianus
aagtcggataccttatctacctcag

SEQ ID NO: 70357 - DNA, 25 bp, Saccharomyces pastorianus
ttacgtggccgagtcgtctaaaagt

SEQ ID NO: 70358 - DNA, 25 bp, Saccharomyces pastorianus
ccccattttgttctgtgcgatttta

SEQ ID NO: 70359 - DNA, 25 bp, Saccharomyces pastorianus
gaattggcacaataccccattttgt

SEQ ID NO: 70360 - DNA, 25 bp, Saccharomyces pastorianus
atttaacggttgcacttgctaccac

SEQ ID NO: 70361 - DNA, 25 bp, Saccharomyces pastorianus
gaagcatttttcctcacgatgcatc

SEQ ID NO: 70362 - DNA, 25 bp, Saccharomyces pastorianus
ttgctaccaccctgaatgctaataa

SEQ ID NO: 70363 - DNA, 25 bp, Saccharomyces pastorianus
gatcgattggtactgtgcttgcatt

SEQ ID NO: 70364 - DNA, 25 bp, Saccharomyces pastorianus
atgagtccacaacaacgccatatgt

SEQ ID NO: 70365 - DNA, 25 bp, Saccharomyces pastorianus
ggatgtgtaagtgctgcttctgaca

SEQ ID NO: 70366 - DNA, 25 bp, Saccharomyces pastorianus
tatatcggtccagctaatctgctca

SEQ ID NO: 70367 - DNA, 25 bp, Saccharomyces pastorianus
gattttaactgtttccgctcgctat

SEQ ID NO: 70368 - DNA, 25 bp, Saccharomyces pastorianus
gtaaactctttgcactcatcatgtc

SEQ ID NO: 70369 - DNA, 25 bp, Saccharomyces pastorianus
aatttagaagctgacaacgacaacg

SEQ ID NO: 70370 - DNA, 25 bp, Saccharomyces pastorianus
tatagttactcatatctctgaaacc

SEQ ID NO: 70371 - DNA, 25 bp, Saccharomyces pastorianus
gcagaatcatttagtgtcttgaacc

SEQ ID NO: 70372 - DNA, 25 bp, Saccharomyces pastorianus
tagtgtcttgaacctaaacttagaa

SEQ ID NO: 70373 - DNA, 25 bp, Saccharomyces pastorianus
aaggacgatacgaatttggcacaaa

SEQ ID NO: 70374 - DNA, 25 bp, Saccharomyces pastorianus
aaatgcgttctgacagattgggaac

SEQ ID NO: 70375 - DNA, 25 bp, Saccharomyces pastorianus
gaatacgttctatattactccaata

SEQ ID NO: 70376 - DNA, 25 bp, Saccharomyces pastorianus
caccatttccgctagactctagagg

SEQ ID NO: 70377 - DNA, 25 bp, Saccharomyces pastorianus
tatctctgaaaccacaagcgcaatg

SEQ ID NO: 70378 - DNA, 25 bp, Saccharomyces pastorianus
gaaccaaaggtctttactagcagaa

SEQ ID NO: 70379 - DNA, 25 bp, Saccharomyces pastorianus
ccgcagtaaggctcgcacaggatat

SEQ ID NO: 70380 - DNA, 25 bp, Saccharomyces pastorianus
ataatgagcttttccaaggcccatc

SEQ ID NO: 70381 - DNA, 25 bp, Saccharomyces pastorianus
gaaacattcgatctcattcgcgaca

SEQ ID NO: 70382 - DNA, 25 bp, Saccharomyces pastorianus
cagagagtattttcgatcctttagc

SEQ ID NO: 70383 - DNA, 25 bp, Saccharomyces pastorianus
aactttgaaggaggccacacccgat

SEQ ID NO: 70384 - DNA, 25 bp, Saccharomyces pastorianus
cgatgagctacacctttgccaaagg

SEQ ID NO: 70385 - DNA, 25 bp, Saccharomyces pastorianus
aaggcccatcgttatctgaagaagt

SEQ ID NO: 70386 - DNA, 25 bp, Saccharomyces pastorianus
ggcgattcgccgttagaaggagcaa

SEQ ID NO: 70387 - DNA, 25 bp, Saccharomyces pastorianus
gacattgggctggagttcgtagaac

SEQ ID NO: 70388 - DNA, 25 bp, Saccharomyces pastorianus
tcgcgacaccgcagtaactttgaag

SEQ ID NO: 70389 - DNA, 25 bp, Saccharomyces pastorianus
gaaccgtggacagagctaatcgaac

SEQ ID NO: 70390 - DNA, 25 bp, Saccharomyces pastorianus
aagtggcctaaattcctttgtggat

SEQ ID NO: 70391 - DNA, 25 bp, Saccharomyces pastorianus
aataaagaaggtggccaggccaggc

SEQ ID NO: 70392 - DNA, 25 bp, Saccharomyces pastorianus
aaaggtcgacgctaaggccaagaat

SEQ ID NO: 70393 - DNA, 25 bp, Saccharomyces pastorianus
gaacaagaacgggactccaataaag

SEQ ID NO: 70394 - DNA, 25 bp, Saccharomyces pastorianus
caggccaggcagaaaggtcgacgct

SEQ ID NO: 70395 - DNA, 25 bp, Saccharomyces pastorianus
gcagaaaggtcgacgctaaggccaa

SEQ ID NO: 70396 - DNA, 25 bp, Saccharomyces pastorianus
gggactccaataaagaaggtggcca

SEQ ID NO: 70397 - DNA, 25 bp, Saccharomyces pastorianus
gccaggcagaaaggtcgacgctaag

SEQ ID NO: 70398 - DNA, 25 bp, Saccharomyces pastorianus
ggtgcacaaggtttattgaacaaga

SEQ ID NO: 70399 - DNA, 25 bp, Saccharomyces pastorianus
tttattgaacaagaacgggactcca

SEQ ID NO: 70400 - DNA, 25 bp, Saccharomyces pastorianus
gaacgggactccaataaagaaggtg

SEQ ID NO: 70401 - DNA, 25 bp, Saccharomyces pastorianus
ggtcgacgctaaggccaagaataaa

SEQ ID NO: 70402 - DNA, 25 bp, Saccharomyces pastorianus
gttagtaaccatctcatgggtccaa

SEQ ID NO: 70403 - DNA, 25 bp, Saccharomyces pastorianus
aaagttcaaatttccaagattccag

SEQ ID NO: 70404 - DNA, 25 bp, Saccharomyces pastorianus
gatttgcttaatgacactaattgaa

SEQ ID NO: 70405 - DNA, 25 bp, Saccharomyces pastorianus
tgaacatttagtcatgagagccata

SEQ ID NO: 70406 - DNA, 25 bp, Saccharomyces pastorianus
atttccaagattccagtattagcag

SEQ ID NO: 70407 - DNA, 25 bp, Saccharomyces pastorianus
tttgatgatatctccgaggcaaccc

SEQ ID NO: 70408 - DNA, 25 bp, Saccharomyces pastorianus
gcagaacatgaatcctttttacgac

SEQ ID NO: 70409 - DNA, 25 bp, Saccharomyces pastorianus
gattccaattatgactggctattcc

SEQ ID NO: 70410 - DNA, 25 bp, Saccharomyces pastorianus
gaggcaacccatttaccaaaggata

SEQ ID NO: 70411 - DNA, 25 bp, Saccharomyces pastorianus
gagagccataagtttacgcctatta

SEQ ID NO: 70412 - DNA, 25 bp, Saccharomyces pastorianus
tattgaatgcgttgactgttggtga

SEQ ID NO: 70413 - DNA, 25 bp, Saccharomyces pastorianus
actgtattgagtacacttcgcatgg

SEQ ID NO: 70414 - DNA, 25 bp, Saccharomyces pastorianus
ggaagcagaaccttctttccaccct

SEQ ID NO: 70415 - DNA, 25 bp, Saccharomyces pastorianus
aaccatgaacttgacactgtattga

SEQ ID NO: 70416 - DNA, 25 bp, Saccharomyces pastorianus
gacactgtattgagtacacttcgca

SEQ ID NO: 70417 - DNA, 25 bp, Saccharomyces pastorianus
gataaccatgaacttgacactgtat

SEQ ID NO: 70418 - DNA, 25 bp, Saccharomyces pastorianus
gaacttgacactgtattgagtacac

SEQ ID NO: 70419 - DNA, 25 bp, Saccharomyces pastorianus
atggaagcagaaccttctttccacc

SEQ ID NO: 70420 - DNA, 25 bp, Saccharomyces pastorianus
tttgataaccatgaacttgacactg

SEQ ID NO: 70421 - DNA, 25 bp, Saccharomyces pastorianus
gagtacacttcgcatggaagcagaa

SEQ ID NO: 70422 - DNA, 25 bp, Saccharomyces pastorianus
ttcgcatggaagcagaaccttcttt

SEQ ID NO: 70423 - DNA, 25 bp, Saccharomyces pastorianus
gtattgagtacacttcgcatggaag

SEQ ID NO: 70424 - DNA, 25 bp, Saccharomyces pastorianus
taatgacctccttgaaccagttttg

SEQ ID NO: 70425 - DNA, 25 bp, Saccharomyces pastorianus
ctccttgaaccagttttgtcaaact

SEQ ID NO: 70426 - DNA, 25 bp, Saccharomyces pastorianus
tgcctaatgacctccttgaaccagt

SEQ ID NO: 70427 - DNA, 25 bp, Saccharomyces pastorianus
gaaccagttttgtcaaactatcagg

SEQ ID NO: 70428 - DNA, 25 bp, Saccharomyces pastorianus
ccagttttgtcaaactatcaggatg

SEQ ID NO: 70429 - DNA, 25 bp, Saccharomyces pastorianus
gacctccttgaaccagttttgtcaa

SEQ ID NO: 70430 - DNA, 25 bp, Saccharomyces pastorianus
aatttgcctaatgacctccttgaac

SEQ ID NO: 70431 - DNA, 25 bp, Saccharomyces pastorianus
tttgcctaatgacctccttgaacca

SEQ ID NO: 70432 - DNA, 25 bp, Saccharomyces pastorianus
atgacctccttgaaccagttttgtc

SEQ ID NO: 70433 - DNA, 25 bp, Saccharomyces pastorianus
ctaatgacctccttgaaccagtttt

SEQ ID NO: 70434 - DNA, 25 bp, Saccharomyces pastorianus
aatgacctccttgaaccagttttgt

SEQ ID NO: 70435 - DNA, 25 bp, Saccharomyces pastorianus
atagtcaacgattccaattacgatt

SEQ ID NO: 70436 - DNA, 25 bp, Saccharomyces pastorianus
cgaacgtcaacaattggcctatgat

SEQ ID NO: 70437 - DNA, 25 bp, Saccharomyces pastorianus
agcttctattctacaaattcccagt

SEQ ID NO: 70438 - DNA, 25 bp, Saccharomyces pastorianus
aagcattactttagccgaacgtcaa

SEQ ID NO: 70439 - DNA, 25 bp, Saccharomyces pastorianus
aagattcctatattggctcaacatg

SEQ ID NO: 70440 - DNA, 25 bp, Saccharomyces pastorianus
aaaggattccattccattaaggata

SEQ ID NO: 70441 - DNA, 25 bp, Saccharomyces pastorianus
gatttcaattctttctactacacaa

SEQ ID NO: 70442 - DNA, 25 bp, Saccharomyces pastorianus
ggataacaaacagcttctattctac

SEQ ID NO: 70443 - DNA, 25 bp, Saccharomyces pastorianus
gagtatctcagcattgttaggtgac

SEQ ID NO: 70444 - DNA, 25 bp, Saccharomyces pastorianus
gaacgacctcgttaaggcaagagat

SEQ ID NO: 70445 - DNA, 25 bp, Saccharomyces pastorianus
tattaaatgctctaaccgttggtga

SEQ ID NO: 70446 - DNA, 25 bp, Saccharomyces pastorianus
ttgcctgccaagagataccgtatca

SEQ ID NO: 70447 - DNA, 25 bp, Saccharomyces pastorianus
gttgtttactctaaattgcctgcca

SEQ ID NO: 70448 - DNA, 25 bp, Saccharomyces pastorianus
aggtgaacacatgcacggtcgccca

SEQ ID NO: 70449 - DNA, 25 bp, Saccharomyces pastorianus
gatggtaccggtgctctagaattcc

SEQ ID NO: 70450 - DNA, 25 bp, Saccharomyces pastorianus
gattgtttgttagacctttcccatt

SEQ ID NO: 70451 - DNA, 25 bp, Saccharomyces pastorianus
accaatgcaccaccgtcaagaagga

SEQ ID NO: 70452 - DNA, 25 bp, Saccharomyces pastorianus
ggagaactctcgaacaccagattgt

SEQ ID NO: 70453 - DNA, 25 bp, Saccharomyces pastorianus
taagagttttgctaaccaacctttg

SEQ ID NO: 70454 - DNA, 25 bp, Saccharomyces pastorianus
gtcaagatcttgaacggcttcgcgt

SEQ ID NO: 70455 - DNA, 25 bp, Saccharomyces pastorianus
acggcttcgcgtttgttgaatttga

SEQ ID NO: 70456 - DNA, 25 bp, Saccharomyces pastorianus
gaatccgctgccaaagccattgaag

SEQ ID NO: 70457 - DNA, 25 bp, Saccharomyces pastorianus
attctacgcaaaggagattaagagt

SEQ ID NO: 70458 - DNA, 25 bp, Saccharomyces pastorianus
ccgcttctgaattctacgcaaagga

SEQ ID NO: 70459 - DNA, 25 bp, Saccharomyces pastorianus
cgcttctgaattctacgcaaaggag

SEQ ID NO: 70460 - DNA, 25 bp, Saccharomyces pastorianus
catttaagcaatttactgacttccc

SEQ ID NO: 70461 - DNA, 25 bp, Saccharomyces pastorianus
ttctgaattctacgcaaaggagatt

SEQ ID NO: 70462 - DNA, 25 bp, Saccharomyces pastorianus
gtgcatttaagcaatttactgactt

SEQ ID NO: 70463 - DNA, 25 bp, Saccharomyces pastorianus
cgcaaaggagattaagagtgcattt

SEQ ID NO: 70464 - DNA, 25 bp, Saccharomyces pastorianus
gagtgcatttaagcaatttactgac

SEQ ID NO: 70465 - DNA, 25 bp, Saccharomyces pastorianus
tccgcttctgaattctacgcaaagg

SEQ ID NO: 70466 - DNA, 25 bp, Saccharomyces pastorianus
agtgcatttaagcaatttactgact

SEQ ID NO: 70467 - DNA, 25 bp, Saccharomyces pastorianus
gcatttaagcaatttactgacttcc

SEQ ID NO: 70468 - DNA, 25 bp, Saccharomyces pastorianus
aacagtactgattgacaccacgtta

SEQ ID NO: 70469 - DNA, 25 bp, Saccharomyces pastorianus
gctccgtaaggatttacccgagttg

SEQ ID NO: 70470 - DNA, 25 bp, Saccharomyces pastorianus
aatgcagagactaacccagcgctac

SEQ ID NO: 70471 - DNA, 25 bp, Saccharomyces pastorianus
gcattgactatttttgacgtgtgta

SEQ ID NO: 70472 - DNA, 25 bp, Saccharomyces pastorianus
gcaagttccatcaacaggcgattct

SEQ ID NO: 70473 - DNA, 25 bp, Saccharomyces pastorianus
ggctattatgccatttcagactcta

SEQ ID NO: 70474 - DNA, 25 bp, Saccharomyces pastorianus
atatgtacgatctttcgctccgtaa

SEQ ID NO: 70475 - DNA, 25 bp, Saccharomyces pastorianus
taatcctgatatacctaagctatgg

SEQ ID NO: 70476 - DNA, 25 bp, Saccharomyces pastorianus
ataaattgaatgaactgcccgaagc

SEQ ID NO: 70477 - DNA, 25 bp, Saccharomyces pastorianus
cagcgctacgtggagatattgcatt

SEQ ID NO: 70478 - DNA, 25 bp, Saccharomyces pastorianus
gagaaatctcacatgcaagttccat

SEQ ID NO: 70479 - DNA, 25 bp, Saccharomyces pastorianus
aaatatgttgttctcgcctttgtgc

SEQ ID NO: 70480 - DNA, 25 bp, Saccharomyces pastorianus
caagccccagcttttaagaaaacag

SEQ ID NO: 70481 - DNA, 25 bp, Saccharomyces pastorianus
gtggcttgggtccagtcaatgttcc

SEQ ID NO: 70482 - DNA, 25 bp, Saccharomyces pastorianus
tggcgtggaccaaccttgctagaaa

SEQ ID NO: 70483 - DNA, 25 bp, Saccharomyces pastorianus
gtctgtccaactgaaattgtggcat

SEQ ID NO: 70484 - DNA, 25 bp, Saccharomyces pastorianus
ttagccgacaccaatcattctttgt

SEQ ID NO: 70485 - DNA, 25 bp, Saccharomyces pastorianus
gtgccattagccttttcatttgtct

SEQ ID NO: 70486 - DNA, 25 bp, Saccharomyces pastorianus
gtcaatgttcctttattagccgaca

SEQ ID NO: 70487 - DNA, 25 bp, Saccharomyces pastorianus
aggtgcccaaattctatttgcctcc

SEQ ID NO: 70488 - DNA, 25 bp, Saccharomyces pastorianus
cattttccgatgctgccaagaagtt

SEQ ID NO: 70489 - DNA, 25 bp, Saccharomyces pastorianus
agaagttcgaggagcaaggtgccca

SEQ ID NO: 70490 - DNA, 25 bp, Saccharomyces pastorianus
tattgaacagtcctcttacgacctg

SEQ ID NO: 70491 - DNA, 25 bp, Saccharomyces pastorianus
catctgccgcagtattttcacattt

SEQ ID NO: 70492 - DNA, 25 bp, Saccharomyces pastorianus
aagacgctgtggaggccatgacaat

SEQ ID NO: 70493 - DNA, 25 bp, Saccharomyces pastorianus
atcttctgcggaaattatggcccac

SEQ ID NO: 70494 - DNA, 25 bp, Saccharomyces pastorianus
agaatgttcctacgttcatgccact

SEQ ID NO: 70495 - DNA, 25 bp, Saccharomyces pastorianus
atggcaatgtcgtatccgatcacac

SEQ ID NO: 70496 - DNA, 25 bp, Saccharomyces pastorianus
tacgacctgaacgacatggcaatgt

SEQ ID NO: 70497 - DNA, 25 bp, Saccharomyces pastorianus
ccgtcacttccaattcatcagaatc

SEQ ID NO: 70498 - DNA, 25 bp, Saccharomyces pastorianus
agtattttcacatttcgactcccat

SEQ ID NO: 70499 - DNA, 25 bp, Saccharomyces pastorianus
gaggaagcagcaacagcaccctgat

SEQ ID NO: 70500 - DNA, 25 bp, Saccharomyces pastorianus
ggacccagaatatcttagccaaagc

SEQ ID NO: 70501 - DNA, 25 bp, Saccharomyces pastorianus
aactgaactagctggacaagccgtc

SEQ ID NO: 70502 - DNA, 25 bp, Saccharomyces pastorianus
agctgacttcactaacaaatctttt

SEQ ID NO: 70503 - DNA, 25 bp, Saccharomyces pastorianus
gatgattcggcaaaactcaacaacg

SEQ ID NO: 70504 - DNA, 25 bp, Saccharomyces pastorianus
ttttaatgcaactctccaagccaca

SEQ ID NO: 70505 - DNA, 25 bp, Saccharomyces pastorianus
gtggatgcgtttatgttccgaattt

SEQ ID NO: 70506 - DNA, 25 bp, Saccharomyces pastorianus
gagaacccaacccaatgaccaatgg

SEQ ID NO: 70507 - DNA, 25 bp, Saccharomyces pastorianus
aatctaaagcgctctcaggactata

SEQ ID NO: 70508 - DNA, 25 bp, Saccharomyces pastorianus
aagccacaaccagcactgaactaga

SEQ ID NO: 70509 - DNA, 25 bp, Saccharomyces pastorianus
gtatcaagagcgaaacctgcggcaa

SEQ ID NO: 70510 - DNA, 25 bp, Saccharomyces pastorianus
atatgctacacgcattaccggcgtt

SEQ ID NO: 70511 - DNA, 25 bp, Saccharomyces pastorianus
gacaagccgtcgaaggagaacccaa

SEQ ID NO: 70512 - DNA, 25 bp, Saccharomyces pastorianus
aacaagccccttgcagtgcagaagg

SEQ ID NO: 70513 - DNA, 25 bp, Saccharomyces pastorianus
gacgaatcgctctcggacgagcaaa

SEQ ID NO: 70514 - DNA, 25 bp, Saccharomyces pastorianus
cacagggcagtcaacggcagcgcga

SEQ ID NO: 70515 - DNA, 25 bp, Saccharomyces pastorianus
actggctggaggatgacgaatcgct

SEQ ID NO: 70516 - DNA, 25 bp, Saccharomyces pastorianus
aaggagatgagcacccacatggaga

SEQ ID NO: 70517 - DNA, 25 bp, Saccharomyces pastorianus
aacggcagcgcgacaaggcaattaa

SEQ ID NO: 70518 - DNA, 25 bp, Saccharomyces pastorianus
gcggaataggactcaaatcggcgaa

SEQ ID NO: 70519 - DNA, 25 bp, Saccharomyces pastorianus
aggcaattaacaagcccacccacag

SEQ ID NO: 70520 - DNA, 25 bp, Saccharomyces pastorianus
ggagcaacaacgagtctcttctttg

SEQ ID NO: 70521 - DNA, 25 bp, Saccharomyces pastorianus
atcgctggccagcaacacagatagg

SEQ ID NO: 70522 - DNA, 25 bp, Saccharomyces pastorianus
attgaggttcaggtcagcgagctgc

SEQ ID NO: 70523 - DNA, 25 bp, Saccharomyces pastorianus
ttgatacgattttaacggccgctaa

SEQ ID NO: 70524 - DNA, 25 bp, Saccharomyces pastorianus
actatgtgactatctctattggttc

SEQ ID NO: 70525 - DNA, 25 bp, Saccharomyces pastorianus
gccatcaactggtttacgcatgctt

SEQ ID NO: 70526 - DNA, 25 bp, Saccharomyces pastorianus
ttaaagctgatcctcaacacaatga

SEQ ID NO: 70527 - DNA, 25 bp, Saccharomyces pastorianus
taattacccattatctccgcaagaa

SEQ ID NO: 70528 - DNA, 25 bp, Saccharomyces pastorianus
gaaaggattcctaaggctaccacct

SEQ ID NO: 70529 - DNA, 25 bp, Saccharomyces pastorianus
gggctcctatttttacatgccatca

SEQ ID NO: 70530 - DNA, 25 bp, Saccharomyces pastorianus
aacggccgctaacaggtccatagaa

SEQ ID NO: 70531 - DNA, 25 bp, Saccharomyces pastorianus
tgccgtacttttatctcagaatttc

SEQ ID NO: 70532 - DNA, 25 bp, Saccharomyces pastorianus
tgacagtttaaagccgaattcccag

SEQ ID NO: 70533 - DNA, 25 bp, Saccharomyces pastorianus
attggttcgatatttctcaacgtca

SEQ ID NO: 70534 - DNA, 25 bp, Saccharomyces pastorianus
cgtgctttgcgttcgtactagattt

SEQ ID NO: 70535 - DNA, 25 bp, Saccharomyces pastorianus
gcgttcgtactagatttaggtctga

SEQ ID NO: 70536 - DNA, 25 bp, Saccharomyces pastorianus
cttcctcttcttcaaatgcaacgtg

SEQ ID NO: 70537 - DNA, 25 bp, Saccharomyces pastorianus
gctttgcgttcgtactagatttagg

SEQ ID NO: 70538 - DNA, 25 bp, Saccharomyces pastorianus
ctcttcttcaaatgcaacgtgcttt

SEQ ID NO: 70539 - DNA, 25 bp, Saccharomyces pastorianus
tatctaaagcagcatccacgtcttc

SEQ ID NO: 70540 - DNA, 25 bp, Saccharomyces pastorianus
tcgtactagatttaggtctgatatc

SEQ ID NO: 70541 - DNA, 25 bp, Saccharomyces pastorianus
gcaacgtgctttgcgttcgtactag

SEQ ID NO: 70542 - DNA, 25 bp, Saccharomyces pastorianus
aaagcagcatccacgtcttcgtctt

SEQ ID NO: 70543 - DNA, 25 bp, Saccharomyces pastorianus
ggtctgatatctaaagcagcatcca

SEQ ID NO: 70544 - DNA, 25 bp, Saccharomyces pastorianus
aatgcaacgtgctttgcgttcgtac

SEQ ID NO: 70545 - DNA, 25 bp, Saccharomyces pastorianus
gcgttcgtactagatttaggtctga

SEQ ID NO: 70546 - DNA, 25 bp, Saccharomyces pastorianus
cttcctcttcttcaaatgcaacgtg

SEQ ID NO: 70547 - DNA, 25 bp, Saccharomyces pastorianus
acgtgctttgcgttcgtactagatt

SEQ ID NO: 70548 - DNA, 25 bp, Saccharomyces pastorianus
gctttgcgttcgtactagatttagg

SEQ ID NO: 70549 - DNA, 25 bp, Saccharomyces pastorianus
tcatcggcatcgttatcgttttctt

SEQ ID NO: 70550 - DNA, 25 bp, Saccharomyces pastorianus
ctcttcttcaaatgcaacgtgcttt

SEQ ID NO: 70551 - DNA, 25 bp, Saccharomyces pastorianus
tatctaaagcagcatccacgtcttc

SEQ ID NO: 70552 - DNA, 25 bp, Saccharomyces pastorianus
aaagcagcatccacgtcttcgtctt

SEQ ID NO: 70553 - DNA, 25 bp, Saccharomyces pastorianus
aggtctgatatctaaagcagcatcc

SEQ ID NO: 70554 - DNA, 25 bp, Saccharomyces pastorianus
atcgttatcgttttcttcttcttct

SEQ ID NO: 70555 - DNA, 25 bp, Saccharomyces pastorianus
aatgcaacgtgctttgcgttcgtac

SEQ ID NO: 70556 - DNA, 25 bp, Saccharomyces pastorianus
accccgcaatcgtcttcaatgaaaa

SEQ ID NO: 70557 - DNA, 25 bp, Saccharomyces pastorianus
aatggctttaactttcaatctcaga

SEQ ID NO: 70558 - DNA, 25 bp, Saccharomyces pastorianus
aggaacaggagctcggccagccgta

SEQ ID NO: 70559 - DNA, 25 bp, Saccharomyces pastorianus
gtcttcctctattcttgattctgaa

SEQ ID NO: 70560 - DNA, 25 bp, Saccharomyces pastorianus
tacgatatagcatctctcactgaag

SEQ ID NO: 70561 - DNA, 25 bp, Saccharomyces pastorianus
cggagaacccctgcatgtatacaat

SEQ ID NO: 70562 - DNA, 25 bp, Saccharomyces pastorianus
gatccattactcctgtatcctgtaa

SEQ ID NO: 70563 - DNA, 25 bp, Saccharomyces pastorianus
gaaaggattagatcgaccccgcaat

SEQ ID NO: 70564 - DNA, 25 bp, Saccharomyces pastorianus
gaaagacccacagattcgcaaactt

SEQ ID NO: 70565 - DNA, 25 bp, Saccharomyces pastorianus
agcagagttctattacttccttatt

SEQ ID NO: 70566 - DNA, 25 bp, Saccharomyces pastorianus
atgatctagatacccctgcatcaaa

SEQ ID NO: 70567 - DNA, 25 bp, Saccharomyces pastorianus
cggacgtaccgtgattctcaatgaa

SEQ ID NO: 70568 - DNA, 25 bp, Saccharomyces pastorianus
gacactatcccaggtggtttctgaa

SEQ ID NO: 70569 - DNA, 25 bp, Saccharomyces pastorianus
taaggctgatccattcggacgtacc

SEQ ID NO: 70570 - DNA, 25 bp, Saccharomyces pastorianus
attacaagcatactcttctttcgcc

SEQ ID NO: 70571 - DNA, 25 bp, Saccharomyces pastorianus
gaatttggtaccgacgtgaccccag

SEQ ID NO: 70572 - DNA, 25 bp, Saccharomyces pastorianus
gttcaaaagcaatgtccccaggacg

SEQ ID NO: 70573 - DNA, 25 bp, Saccharomyces pastorianus
ggtagaatcgctgcagaatccattg

SEQ ID NO: 70574 - DNA, 25 bp, Saccharomyces pastorianus
gctactgaagggtctatacgccgct

SEQ ID NO: 70575 - DNA, 25 bp, Saccharomyces pastorianus
tggtgtccacggtgccaatagacta

SEQ ID NO: 70576 - DNA, 25 bp, Saccharomyces pastorianus
ggtattctattaaaccctgccaccg

SEQ ID NO: 70577 - DNA, 25 bp, Saccharomyces pastorianus
atacgccgctggtgaagtttctggt

SEQ ID NO: 70578 - DNA, 25 bp, Saccharomyces pastorianus
acagtccgtgaaacacctttctact

SEQ ID NO: 70579 - DNA, 25 bp, Saccharomyces pastorianus
gttggagtataaacgcatgaaatcc

SEQ ID NO: 70580 - DNA, 25 bp, Saccharomyces pastorianus
atgcacgtttgttccttgttggtaa

SEQ ID NO: 70581 - DNA, 25 bp, Saccharomyces pastorianus
gcacgtttgttccttgttggtaagc

SEQ ID NO: 70582 - DNA, 25 bp, Saccharomyces pastorianus
tccttgttggtaagcttggaagttg

SEQ ID NO: 70583 - DNA, 25 bp, Saccharomyces pastorianus
gtccgtgaaacacctttctactaag

SEQ ID NO: 70584 - DNA, 25 bp, Saccharomyces pastorianus
gaaacacctttctactaagttggag

SEQ ID NO: 70585 - DNA, 25 bp, Saccharomyces pastorianus
gtttgttccttgttggtaagcttgg

SEQ ID NO: 70586 - DNA, 25 bp, Saccharomyces pastorianus
gtcgttgacacagtccgtgaaacac

SEQ ID NO: 70587 - DNA, 25 bp, Saccharomyces pastorianus
acacctttctactaagttggagtat

SEQ ID NO: 70588 - DNA, 25 bp, Saccharomyces pastorianus
cttggaagttgtgaagtcgttgaca

SEQ ID NO: 70589 - DNA, 25 bp, Saccharomyces pastorianus
cattttttctttccattcattcttc

SEQ ID NO: 70590 - DNA, 25 bp, Saccharomyces pastorianus
tttttctttccattcattcttcttt

SEQ ID NO: 70591 - DNA, 25 bp, Saccharomyces pastorianus
ttttttctttccattcattcttctt

SEQ ID NO: 70592 - DNA, 25 bp, Saccharomyces pastorianus
tccattcattcttctttttttcctt

SEQ ID NO: 70593 - DNA, 25 bp, Saccharomyces pastorianus
ttttctttccattcattcttctttt

SEQ ID NO: 70594 - DNA, 25 bp, Saccharomyces pastorianus
ttatcaattataggaaagggttcat

SEQ ID NO: 70595 - DNA, 25 bp, Saccharomyces pastorianus
tttctttccattcattcttcttttt

SEQ ID NO: 70596 - DNA, 25 bp, Saccharomyces pastorianus
attttttctttccattcattcttct

SEQ ID NO: 70597 - DNA, 25 bp, Saccharomyces pastorianus
tctttccattcattcttcttttttt

SEQ ID NO: 70598 - DNA, 25 bp, Saccharomyces pastorianus
tcaattataggaaagggttcatttt

SEQ ID NO: 70599 - DNA, 25 bp, Saccharomyces pastorianus
ttctttccattcattcttctttttt

SEQ ID NO: 70600 - DNA, 25 bp, Saccharomyces pastorianus
aaagcagcgctgacatcgaagacca

SEQ ID NO: 70601 - DNA, 25 bp, Saccharomyces pastorianus
gacggaaatctcttgtgttgaaaat

SEQ ID NO: 70602 - DNA, 25 bp, Saccharomyces pastorianus
aattgagtcgtatggcattggcaca

SEQ ID NO: 70603 - DNA, 25 bp, Saccharomyces pastorianus
gaaattacccataacttttgtccag

SEQ ID NO: 70604 - DNA, 25 bp, Saccharomyces pastorianus
ataatctgccggaaactgaaactag

SEQ ID NO: 70605 - DNA, 25 bp, Saccharomyces pastorianus
gaagaccaggcaactttctatgagg

SEQ ID NO: 70606 - DNA, 25 bp, Saccharomyces pastorianus
gatgtatttcatctccaaggtttta

SEQ ID NO: 70607 - DNA, 25 bp, Saccharomyces pastorianus
aattcttcccagcttcacagtaagg

SEQ ID NO: 70608 - DNA, 25 bp, Saccharomyces pastorianus
gggtcaacctgactcatgaaaactg

SEQ ID NO: 70609 - DNA, 25 bp, Saccharomyces pastorianus
atgatattagtctgccacgttggaa

SEQ ID NO: 70610 - DNA, 25 bp, Saccharomyces pastorianus
gatgatctgaatatcgcatttcctt

SEQ ID NO: 70611 - DNA, 25 bp, Saccharomyces pastorianus
taaaatatcgttgccacccataggg

SEQ ID NO: 70612 - DNA, 25 bp, Saccharomyces pastorianus
aataccggccattagtgcagaggaa

SEQ ID NO: 70613 - DNA, 25 bp, Saccharomyces pastorianus
cagagtcctcagtgttttcgaaatc

SEQ ID NO: 70614 - DNA, 25 bp, Saccharomyces pastorianus
aatcaatcgagtaccttgctgcttt

SEQ ID NO: 70615 - DNA, 25 bp, Saccharomyces pastorianus
gcaactcgctagaccattatcaaca

SEQ ID NO: 70616 - DNA, 25 bp, Saccharomyces pastorianus
aggagtggtcacatgcacacagcaa

SEQ ID NO: 70617 - DNA, 25 bp, Saccharomyces pastorianus
ttcacctcttctgtatacgacgaca

SEQ ID NO: 70618 - DNA, 25 bp, Saccharomyces pastorianus
gagaaccagctacaatccctaaaat

SEQ ID NO: 70619 - DNA, 25 bp, Saccharomyces pastorianus
agtctcgattcgttagccaattcta

SEQ ID NO: 70620 - DNA, 25 bp, Saccharomyces pastorianus
taagacccatatccacttcaagcag

SEQ ID NO: 70621 - DNA, 25 bp, Saccharomyces pastorianus
taacagctgtgcatccataccgtat

SEQ ID NO: 70622 - DNA, 25 bp, Saccharomyces pastorianus
tctgtttttggtgccgaattgggtt

SEQ ID NO: 70623 - DNA, 25 bp, Saccharomyces pastorianus
ttacgaaaaatggtcatgggtgccc

SEQ ID NO: 70624 - DNA, 25 bp, Saccharomyces pastorianus
aatgggtaggtggttctactactgc

SEQ ID NO: 70625 - DNA, 25 bp, Saccharomyces pastorianus
gattctttccagatatttggtcggt

SEQ ID NO: 70626 - DNA, 25 bp, Saccharomyces pastorianus
gttacggcaaggattttctccttca

SEQ ID NO: 70627 - DNA, 25 bp, Saccharomyces pastorianus
ggttctactactgcgggtggtgttc

SEQ ID NO: 70628 - DNA, 25 bp, Saccharomyces pastorianus
tgtgaacacatctgtttccgctcaa

SEQ ID NO: 70629 - DNA, 25 bp, Saccharomyces pastorianus
ggtcattattgctcaacttgccaaa

SEQ ID NO: 70630 - DNA, 25 bp, Saccharomyces pastorianus
ttagttgctggcctagcgttccctc

SEQ ID NO: 70631 - DNA, 25 bp, Saccharomyces pastorianus
catctatttatggttttgctgcagg

SEQ ID NO: 70632 - DNA, 25 bp, Saccharomyces pastorianus
gattttcttttccttagttgctggc

SEQ ID NO: 70633 - DNA, 25 bp, Saccharomyces pastorianus
gatattgttcagtagttggataaca

SEQ ID NO: 70634 - DNA, 25 bp, Saccharomyces pastorianus
gttgttgcgaaacagaagtgaagtt

SEQ ID NO: 70635 - DNA, 25 bp, Saccharomyces pastorianus
gctcaacttctctctttgtactgat

SEQ ID NO: 70636 - DNA, 25 bp, Saccharomyces pastorianus
cttctctctttgtactgatattgtt

SEQ ID NO: 70637 - DNA, 25 bp, Saccharomyces pastorianus
gataacagtggacctagtagccgaa

SEQ ID NO: 70638 - DNA, 25 bp, Saccharomyces pastorianus
aacagtggacctagtagccgaagag

SEQ ID NO: 70639 - DNA, 25 bp, Saccharomyces pastorianus
aacttctctctttgtactgatattg

SEQ ID NO: 70640 - DNA, 25 bp, Saccharomyces pastorianus
cagtagttggataacagtggaccta

SEQ ID NO: 70641 - DNA, 25 bp, Saccharomyces pastorianus
atattgctcaacttctctctttgta

SEQ ID NO: 70642 - DNA, 25 bp, Saccharomyces pastorianus
gacagcaaactgttgttgcgaaaca

SEQ ID NO: 70643 - DNA, 25 bp, Saccharomyces pastorianus
agtgaagttttttaaatattgctca

SEQ ID NO: 70644 - DNA, 25 bp, Saccharomyces pastorianus
aaattggcccgacttaggcactttg

SEQ ID NO: 70645 - DNA, 25 bp, Saccharomyces pastorianus
gattccatcctctcgaatttcgaaa

SEQ ID NO: 70646 - DNA, 25 bp, Saccharomyces pastorianus
gacaatatatcattgacctcgctaa

SEQ ID NO: 70647 - DNA, 25 bp, Saccharomyces pastorianus
aatccaacctcgatcgtgcaagcaa

SEQ ID NO: 70648 - DNA, 25 bp, Saccharomyces pastorianus
gaagaaccggcactttatgtacagt

SEQ ID NO: 70649 - DNA, 25 bp, Saccharomyces pastorianus
atgtacagtggattccatcctctcg

SEQ ID NO: 70650 - DNA, 25 bp, Saccharomyces pastorianus
aaccctatgaggtgttacagattca

SEQ ID NO: 70651 - DNA, 25 bp, Saccharomyces pastorianus
gatattggtacattgttccgcaggt

SEQ ID NO: 70652 - DNA, 25 bp, Saccharomyces pastorianus
tcttttcagccaacaccaaaggtga

SEQ ID NO: 70653 - DNA, 25 bp, Saccharomyces pastorianus
gacgatcaacttcctacgatattgg

SEQ ID NO: 70654 - DNA, 25 bp, Saccharomyces pastorianus
ttaggcactttgctcaatccaacct

SEQ ID NO: 70655 - DNA, 25 bp, Saccharomyces pastorianus
gaaagcatccctctttggatcgtta

SEQ ID NO: 70656 - DNA, 25 bp, Saccharomyces pastorianus
ttggaaatccttgctacacacctac

SEQ ID NO: 70657 - DNA, 25 bp, Saccharomyces pastorianus
gtgatacatttgatcgtacctactc

SEQ ID NO: 70658 - DNA, 25 bp, Saccharomyces pastorianus
cacttcatttggtttaccggaaatg

SEQ ID NO: 70659 - DNA, 25 bp, Saccharomyces pastorianus
tacacacctactggaggagccaata

SEQ ID NO: 70660 - DNA, 25 bp, Saccharomyces pastorianus
taccggaaatgaatcttttagtggt

SEQ ID NO: 70661 - DNA, 25 bp, Saccharomyces pastorianus
tttgatcgtacctactcttttggaa

SEQ ID NO: 70662 - DNA, 25 bp, Saccharomyces pastorianus
ggatcgttatcgtctgttagttttg

SEQ ID NO: 70663 - DNA, 25 bp, Saccharomyces pastorianus
ttgtttgtcattcttcagccaggaa

SEQ ID NO: 70664 - DNA, 25 bp, Saccharomyces pastorianus
agtaaatcttttctccttctgttgt

SEQ ID NO: 70665 - DNA, 25 bp, Saccharomyces pastorianus
ttcagccaggaaccccaagtgtact

SEQ ID NO: 70666 - DNA, 25 bp, Saccharomyces pastorianus
ttctgtcggttcagttaatttccca

SEQ ID NO: 70667 - DNA, 25 bp, Saccharomyces pastorianus
gatgttgtcacaatcatggctttgg

SEQ ID NO: 70668 - DNA, 25 bp, Saccharomyces pastorianus
gccaaacattattctgacacctcac

SEQ ID NO: 70669 - DNA, 25 bp, Saccharomyces pastorianus
gtacctgccacttcagagaccacaa

SEQ ID NO: 70670 - DNA, 25 bp, Saccharomyces pastorianus
gacttcagaattagtttcgttgcca

SEQ ID NO: 70671 - DNA, 25 bp, Saccharomyces pastorianus
gaagtggctacctcattggctaaat

SEQ ID NO: 70672 - DNA, 25 bp, Saccharomyces pastorianus
tgctagacaggtttccaccttggat

SEQ ID NO: 70673 - DNA, 25 bp, Saccharomyces pastorianus
ttacccacacgaaccagctaagaat

SEQ ID NO: 70674 - DNA, 25 bp, Saccharomyces pastorianus
tgctccacaatttgccgccatgaag

SEQ ID NO: 70675 - DNA, 25 bp, Saccharomyces pastorianus
catggctttgggtactgctagacag

SEQ ID NO: 70676 - DNA, 25 bp, Saccharomyces pastorianus
gatttcgtatctttacacgtacctg

SEQ ID NO: 70677 - DNA, 25 bp, Saccharomyces pastorianus
gacggttcggtctttggctccagtc

SEQ ID NO: 70678 - DNA, 25 bp, Saccharomyces pastorianus
cactcaatgtagtggtcaactctac

SEQ ID NO: 70679 - DNA, 25 bp, Saccharomyces pastorianus
tggtctcctgcaacagctgcaaatg

SEQ ID NO: 70680 - DNA, 25 bp, Saccharomyces pastorianus
gccttgaggtcaatcaactcgtatt

SEQ ID NO: 70681 - DNA, 25 bp, Saccharomyces pastorianus
tattcttctgtgtatgaacctcaag

SEQ ID NO: 70682 - DNA, 25 bp, Saccharomyces pastorianus
aactcgtatttggaacactcaatgt

SEQ ID NO: 70683 - DNA, 25 bp, Saccharomyces pastorianus
tggtcctcttctccctttatatagg

SEQ ID NO: 70684 - DNA, 25 bp, Saccharomyces pastorianus
gaacctcaagacattggtctcctgc

SEQ ID NO: 70685 - DNA, 25 bp, Saccharomyces pastorianus
aaaccacctctctattcttctgtgt

SEQ ID NO: 70686 - DNA, 25 bp, Saccharomyces pastorianus
atctgtatttcctttgccttgaggt

SEQ ID NO: 70687 - DNA, 25 bp, Saccharomyces pastorianus
ctctacagataacttggtcctcttc

SEQ ID NO: 70688 - DNA, 25 bp, Saccharomyces pastorianus
atatatgcgtgatgatacttactgc

SEQ ID NO: 70689 - DNA, 25 bp, Saccharomyces pastorianus
tctgttgcctgtacttaaattttat

SEQ ID NO: 70690 - DNA, 25 bp, Saccharomyces pastorianus
aaggtgtatgatctttgattttaga

SEQ ID NO: 70691 - DNA, 25 bp, Saccharomyces pastorianus
cagttgtacaatctcgtcgaagtgc

SEQ ID NO: 70692 - DNA, 25 bp, Saccharomyces pastorianus
tgcagttcagactcacccagttgta

SEQ ID NO: 70693 - DNA, 25 bp, Saccharomyces pastorianus
agttcagactcacccagttgtacaa

SEQ ID NO: 70694 - DNA, 25 bp, Saccharomyces pastorianus
gatacttactgcagttcagactcac

SEQ ID NO: 70695 - DNA, 25 bp, Saccharomyces pastorianus
ctttgattttagatatatgcgtgat

SEQ ID NO: 70696 - DNA, 25 bp, Saccharomyces pastorianus
cacccagttgtacaatctcgtcgaa

SEQ ID NO: 70697 - DNA, 25 bp, Saccharomyces pastorianus
agactcacccagttgtacaatctcg

SEQ ID NO: 70698 - DNA, 25 bp, Saccharomyces pastorianus
tctttgttctgttgcctgtacttaa

SEQ ID NO: 70699 - DNA, 25 bp, Saccharomyces pastorianus
attgtccatttcatttattaccatt

SEQ ID NO: 70700 - DNA, 25 bp, Saccharomyces pastorianus
gaattcaggcgagttgtccaacgag

SEQ ID NO: 70701 - DNA, 25 bp, Saccharomyces pastorianus
cggtaagccgaatctgtctggttta

SEQ ID NO: 70702 - DNA, 25 bp, Saccharomyces pastorianus
taatcgtactagtctcgtttggtgt

SEQ ID NO: 70703 - DNA, 25 bp, Saccharomyces pastorianus
cacaggtgggactattttttgaatt

SEQ ID NO: 70704 - DNA, 25 bp, Saccharomyces pastorianus
ctatattgtgttttgtccttggcgc

SEQ ID NO: 70705 - DNA, 25 bp, Saccharomyces pastorianus
aacacggattccaccaaatatctga

SEQ ID NO: 70706 - DNA, 25 bp, Saccharomyces pastorianus
gaactctatttatatggtgaccaag

SEQ ID NO: 70707 - DNA, 25 bp, Saccharomyces pastorianus
ttgtccttggcgcattcatggcgtc

SEQ ID NO: 70708 - DNA, 25 bp, Saccharomyces pastorianus
atttacatccaagtcatgcataggg

SEQ ID NO: 70709 - DNA, 25 bp, Saccharomyces pastorianus
tcatggcgtctttcgtcggaacaag

SEQ ID NO: 70710 - DNA, 25 bp, Saccharomyces pastorianus
atatcttcaatatcgttggccctcg

SEQ ID NO: 70711 - DNA, 25 bp, Saccharomyces pastorianus
gtctcatgggtcatcgccattgcgg

SEQ ID NO: 70712 - DNA, 25 bp, Saccharomyces pastorianus
gcaaggacacacgtatggccactga

SEQ ID NO: 70713 - DNA, 25 bp, Saccharomyces pastorianus
gggtcatcgccattgcgggttccat

SEQ ID NO: 70714 - DNA, 25 bp, Saccharomyces pastorianus
atatcgttggccctcgtctcatggg

SEQ ID NO: 70715 - DNA, 25 bp, Saccharomyces pastorianus
ttctatgctgatccgttcgctatat

SEQ ID NO: 70716 - DNA, 25 bp, Saccharomyces pastorianus
tgaagaacttctatgctgatccgtt

SEQ ID NO: 70717 - DNA, 25 bp, Saccharomyces pastorianus
gccactgaccattccttcaatatga

SEQ ID NO: 70718 - DNA, 25 bp, Saccharomyces pastorianus
tgatccgttcgctatatcttcaata

SEQ ID NO: 70719 - DNA, 25 bp, Saccharomyces pastorianus
ttctgcatccactaaagagtccttc

SEQ ID NO: 70720 - DNA, 25 bp, Saccharomyces pastorianus
attgcgggttccatctcttctgcat

SEQ ID NO: 70721 - DNA, 25 bp, Saccharomyces pastorianus
tttccagaacttcgatgccgttccg

SEQ ID NO: 70722 - DNA, 25 bp, Saccharomyces pastorianus
tatctccgatcgtctctttccagaa

SEQ ID NO: 70723 - DNA, 25 bp, Saccharomyces pastorianus
gtctctttccagaacttcgatgccg

SEQ ID NO: 70724 - DNA, 25 bp, Saccharomyces pastorianus
gatcgtctctttccagaacttcgat

SEQ ID NO: 70725 - DNA, 25 bp, Saccharomyces pastorianus
atgccgttccgcagcactgtgtcaa

SEQ ID NO: 70726 - DNA, 25 bp, Saccharomyces pastorianus
ggtatcagagcgtatctccgatcgt

SEQ ID NO: 70727 - DNA, 25 bp, Saccharomyces pastorianus
gcactgtgtcaagaccattggcgtc

SEQ ID NO: 70728 - DNA, 25 bp, Saccharomyces pastorianus
aagaccattggcgtccatcacgctg

SEQ ID NO: 70729 - DNA, 25 bp, Saccharomyces pastorianus
ttccgcagcactgtgtcaagaccat

SEQ ID NO: 70730 - DNA, 25 bp, Saccharomyces pastorianus
gtgtcaagaccattggcgtccatca

SEQ ID NO: 70731 - DNA, 25 bp, Saccharomyces pastorianus
attggcgtccatcacgctggtgccg

SEQ ID NO: 70732 - DNA, 25 bp, Saccharomyces pastorianus
ttggtctcgtcctccgggtcgatga

SEQ ID NO: 70733 - DNA, 25 bp, Saccharomyces pastorianus
aacagcgtcctccagtatgacgttg

SEQ ID NO: 70734 - DNA, 25 bp, Saccharomyces pastorianus
attctgccgtggtgttgcatgacct

SEQ ID NO: 70735 - DNA, 25 bp, Saccharomyces pastorianus
actctctggttgattgttttgtcta

SEQ ID NO: 70736 - DNA, 25 bp, Saccharomyces pastorianus
tgcatgaccttcttgttcttggtct

SEQ ID NO: 70737 - DNA, 25 bp, Saccharomyces pastorianus
atggcgatgttgttgccgctcaaaa

SEQ ID NO: 70738 - DNA, 25 bp, Saccharomyces pastorianus
agcacgatcagcactctctggttga

SEQ ID NO: 70739 - DNA, 25 bp, Saccharomyces pastorianus
gctcaaaagcattctgccgtggtgt

SEQ ID NO: 70740 - DNA, 25 bp, Saccharomyces pastorianus
gaagtcgtcgaagccgaccagcgtg

SEQ ID NO: 70741 - DNA, 25 bp, Saccharomyces pastorianus
gggtcgatgagccactcaacagcgt

SEQ ID NO: 70742 - DNA, 25 bp, Saccharomyces pastorianus
gcgtgccctcaaattcgcggttcga

SEQ ID NO: 70743 - DNA, 25 bp, Saccharomyces pastorianus
ggatctccggcaagtgctttgacat

SEQ ID NO: 70744 - DNA, 25 bp, Saccharomyces pastorianus
atctcatgaactgcacggtgggcat

SEQ ID NO: 70745 - DNA, 25 bp, Saccharomyces pastorianus
atcgctgctaaattgctacaccgtg

SEQ ID NO: 70746 - DNA, 25 bp, Saccharomyces pastorianus
gctcaagaaggcgttgctgctgcag

SEQ ID NO: 70747 - DNA, 25 bp, Saccharomyces pastorianus
ggatgctcgaacacgacctggagga

SEQ ID NO: 70748 - DNA, 25 bp, Saccharomyces pastorianus
acgtagtcgggatatggcatctcat

SEQ ID NO: 70749 - DNA, 25 bp, Saccharomyces pastorianus
tgctgctgcaggtgctggtgaacta

SEQ ID NO: 70750 - DNA, 25 bp, Saccharomyces pastorianus
acggtgatgattctgtggctgttca

SEQ ID NO: 70751 - DNA, 25 bp, Saccharomyces pastorianus
tgcgggagacggacctgcagttcaa

SEQ ID NO: 70752 - DNA, 25 bp, Saccharomyces pastorianus
tctggtggcacgtcgagcgaagtaa

SEQ ID NO: 70753 - DNA, 25 bp, Saccharomyces pastorianus
ggccgagtacatgtcgaagcttcgc

SEQ ID NO: 70754 - DNA, 25 bp, Saccharomyces pastorianus
aacgcgacgttttccaagctgattg

SEQ ID NO: 70755 - DNA, 25 bp, Saccharomyces pastorianus
aacgcgaaccttgccagacagttgt

SEQ ID NO: 70756 - DNA, 25 bp, Saccharomyces pastorianus
gatctgtctattccgagagagccgc

SEQ ID NO: 70757 - DNA, 25 bp, Saccharomyces pastorianus
gcatcgcgtacttgagatctgtcta

SEQ ID NO: 70758 - DNA, 25 bp, Saccharomyces pastorianus
tgaccgcggcgctcgagaagtacat

SEQ ID NO: 70759 - DNA, 25 bp, Saccharomyces pastorianus
gaatggtgcatctcgacagggtcac

SEQ ID NO: 70760 - DNA, 25 bp, Saccharomyces pastorianus
atgccaaggaaatcgccggtgttct

SEQ ID NO: 70761 - DNA, 25 bp, Saccharomyces pastorianus
agaagcacaacgttatcctggccag

SEQ ID NO: 70762 - DNA, 25 bp, Saccharomyces pastorianus
ggttcggctaccacgagtcgatcaa

SEQ ID NO: 70763 - DNA, 25 bp, Saccharomyces pastorianus
gacagttgtctaagggtggcgccaa

SEQ ID NO: 70764 - DNA, 25 bp, Saccharomyces pastorianus
tgaacggcggctacttcagctggat

SEQ ID NO: 70765 - DNA, 25 bp, Saccharomyces pastorianus
ggctgccccggcagcgtgtccatct

SEQ ID NO: 70766 - DNA, 25 bp, Saccharomyces pastorianus
tgctcctgcggctgctgtagctggg

SEQ ID NO: 70767 - DNA, 25 bp, Saccharomyces pastorianus
tgcggctgctgtagctgggcggcta

SEQ ID NO: 70768 - DNA, 25 bp, Saccharomyces pastorianus
gggaagtcccgcagccgcagtggcg

SEQ ID NO: 70769 - DNA, 25 bp, Saccharomyces pastorianus
gctgctgtagctgggcggctacgcc

SEQ ID NO: 70770 - DNA, 25 bp, Saccharomyces pastorianus
accgccctggccaactgcgggaagt

SEQ ID NO: 70771 - DNA, 25 bp, Saccharomyces pastorianus
ggaagtcccgcagccgcagtggcgg

SEQ ID NO: 70772 - DNA, 25 bp, Saccharomyces pastorianus
tagctgggcggctacgcccaccgcc

SEQ ID NO: 70773 - DNA, 25 bp, Saccharomyces pastorianus
gccctggccaactgcgggaagtccc

SEQ ID NO: 70774 - DNA, 25 bp, Saccharomyces pastorianus
gctgcctgctcctgcggctgctgta

SEQ ID NO: 70775 - DNA, 25 bp, Saccharomyces pastorianus
tcctgcggctgctgtagctgggcgg

SEQ ID NO: 70776 - DNA, 25 bp, Saccharomyces pastorianus
tacgtgttgcccgtcgggttcgcaa

SEQ ID NO: 70777 - DNA, 25 bp, Saccharomyces pastorianus
agcatgtcgtacttccgggcaatgt

SEQ ID NO: 70778 - DNA, 25 bp, Saccharomyces pastorianus
caatgtcgatgagtctgcgtctggt

SEQ ID NO: 70779 - DNA, 25 bp, Saccharomyces pastorianus
gtggtgtagtccaggatgtcgtaca

SEQ ID NO: 70780 - DNA, 25 bp, Saccharomyces pastorianus
tcatcggtgatgaccagcatgtcgt

SEQ ID NO: 70781 - DNA, 25 bp, Saccharomyces pastorianus
gtacttccgggcaatgtcgatgagt

SEQ ID NO: 70782 - DNA, 25 bp, Saccharomyces pastorianus
gatgagtctgcgtctggtttcggac

SEQ ID NO: 70783 - DNA, 25 bp, Saccharomyces pastorianus
tgatgaccagcatgtcgtacttccg

SEQ ID NO: 70784 - DNA, 25 bp, Saccharomyces pastorianus
tttcggacgagtacgtgttgcccgt

SEQ ID NO: 70785 - DNA, 25 bp, Saccharomyces pastorianus
ggatgtcgtacacatcatcggtgat

SEQ ID NO: 70786 - DNA, 25 bp, Saccharomyces pastorianus
gtctgcgtctggtttcggacgagta

SEQ ID NO: 70787 - DNA, 25 bp, Saccharomyces pastorianus
gtcgtattctgtatcatcgttaaaa

SEQ ID NO: 70788 - DNA, 25 bp, Saccharomyces pastorianus
gggaggcccgatatgtgtatcttcg

SEQ ID NO: 70789 - DNA, 25 bp, Saccharomyces pastorianus
cgatatgtgtatcttcgttgctact

SEQ ID NO: 70790 - DNA, 25 bp, Saccharomyces pastorianus
aaaactaactcgtggccgactgtat

SEQ ID NO: 70791 - DNA, 25 bp, Saccharomyces pastorianus
cgtggccgactgtattcattagctg

SEQ ID NO: 70792 - DNA, 25 bp, Saccharomyces pastorianus
gcctcttcgcgtttacttttgggtg

SEQ ID NO: 70793 - DNA, 25 bp, Saccharomyces pastorianus
tgtattcattagctggtacgccatc

SEQ ID NO: 70794 - DNA, 25 bp, Saccharomyces pastorianus
aaagtgaattcttcagcctcttcgc

SEQ ID NO: 70795 - DNA, 25 bp, Saccharomyces pastorianus
gtggttcgtcattaaaactaactcg

SEQ ID NO: 70796 - DNA, 25 bp, Saccharomyces pastorianus
atggttgtcgtattctgtatcatcg

SEQ ID NO: 70797 - DNA, 25 bp, Saccharomyces pastorianus
tagctggtacgccatcattgacatg

SEQ ID NO: 70798 - DNA, 25 bp, Saccharomyces pastorianus
tggtgttgtattcaaaacggcctta

SEQ ID NO: 70799 - DNA, 25 bp, Saccharomyces pastorianus
atgacattcatggatcttctcgctt

SEQ ID NO: 70800 - DNA, 25 bp, Saccharomyces pastorianus
ggttatccctttttaattcatggtg

SEQ ID NO: 70801 - DNA, 25 bp, Saccharomyces pastorianus
tgtacaagtgattgcccctgaagag

SEQ ID NO: 70802 - DNA, 25 bp, Saccharomyces pastorianus
ggcattgaatacaccaggcgggatt

SEQ ID NO: 70803 - DNA, 25 bp, Saccharomyces pastorianus
gggattgccataccaccaagaattt

SEQ ID NO: 70804 - DNA, 25 bp, Saccharomyces pastorianus
tggtggaatcctagcaacagtaatt

SEQ ID NO: 70805 - DNA, 25 bp, Saccharomyces pastorianus
ccatggaccattttcggcggaagtt

SEQ ID NO: 70806 - DNA, 25 bp, Saccharomyces pastorianus
gggatggtacttaacgcaacatatg

SEQ ID NO: 70807 - DNA, 25 bp, Saccharomyces pastorianus
gttcctcacattagccaatcagttt

SEQ ID NO: 70808 - DNA, 25 bp, Saccharomyces pastorianus
agcgtttcatacaagttcctcacat

SEQ ID NO: 70809 - DNA, 25 bp, Saccharomyces pastorianus
ttcctttgaacgttatcaccggtct

SEQ ID NO: 70810 - DNA, 25 bp, Saccharomyces pastorianus
aggtgtaatgctagttcctttgaac

SEQ ID NO: 70811 - DNA, 25 bp, Saccharomyces pastorianus
aacgaagctgcggaaagcggtgcca

SEQ ID NO: 70812 - DNA, 25 bp, Saccharomyces pastorianus
gggtttcttgattttactgggcatt

SEQ ID NO: 70813 - DNA, 25 bp, Saccharomyces pastorianus
actatgtgctcacaacttcacaacc

SEQ ID NO: 70814 - DNA, 25 bp, Saccharomyces pastorianus
atcggtcatatccagttttttgcca

SEQ ID NO: 70815 - DNA, 25 bp, Saccharomyces pastorianus
ggctcagttgcaagtagaatcattt

SEQ ID NO: 70816 - DNA, 25 bp, Saccharomyces pastorianus
acgttatcaccggtctgtttggtat

SEQ ID NO: 70817 - DNA, 25 bp, Saccharomyces pastorianus
agcggtgccaaatcggtcatatcca

SEQ ID NO: 70818 - DNA, 25 bp, Saccharomyces pastorianus
caaagtatttggctcagttgcaagt

SEQ ID NO: 70819 - DNA, 25 bp, Saccharomyces pastorianus
ggcattgcaggttggctcttagcga

SEQ ID NO: 70820 - DNA, 25 bp, Saccharomyces pastorianus
aaatttctgcctcaatgatgacgac

SEQ ID NO: 70821 - DNA, 25 bp, Saccharomyces pastorianus
ttaccctcgtctgaataaatcgcca

SEQ ID NO: 70822 - DNA, 25 bp, Saccharomyces pastorianus
gagtgtcactacaacgtttaacgag

SEQ ID NO: 70823 - DNA, 25 bp, Saccharomyces pastorianus
tccatatatttaccctcgtctgaat

SEQ ID NO: 70824 - DNA, 25 bp, Saccharomyces pastorianus
gtcaaagggttcgatcctccatata

SEQ ID NO: 70825 - DNA, 25 bp, Saccharomyces pastorianus
gaaaaatctgcgctcctggaaaggt

SEQ ID NO: 70826 - DNA, 25 bp, Saccharomyces pastorianus
ggaacactcaggaaaccagcagtat

SEQ ID NO: 70827 - DNA, 25 bp, Saccharomyces pastorianus
atcgctgcccttaaaatccacggaa

SEQ ID NO: 70828 - DNA, 25 bp, Saccharomyces pastorianus
tggaaatttgaatcgctgcccttaa

SEQ ID NO: 70829 - DNA, 25 bp, Saccharomyces pastorianus
gagcacttacacgacgctgtttttg

SEQ ID NO: 70830 - DNA, 25 bp, Saccharomyces pastorianus
aaacgttcccaggtggatgagttca

SEQ ID NO: 70831 - DNA, 25 bp, Saccharomyces pastorianus
gaaatccgggacttccaactggaga

SEQ ID NO: 70832 - DNA, 25 bp, Saccharomyces pastorianus
aaccgcagcgtcgaaatggcagtca

SEQ ID NO: 70833 - DNA, 25 bp, Saccharomyces pastorianus
cacgaggcggttgcgatcgagtacc

SEQ ID NO: 70834 - DNA, 25 bp, Saccharomyces pastorianus
aagtggcattgcatccggatcgatt

SEQ ID NO: 70835 - DNA, 25 bp, Saccharomyces pastorianus
atgttgttgagcgtgaggttcctga

SEQ ID NO: 70836 - DNA, 25 bp, Saccharomyces pastorianus
agaaccagcccgtggcgacggaaga

SEQ ID NO: 70837 - DNA, 25 bp, Saccharomyces pastorianus
aaaccggtcagaatcgcgaacgtcg

SEQ ID NO: 70838 - DNA, 25 bp, Saccharomyces pastorianus
gagctggagcccatcgatgagtttg

SEQ ID NO: 70839 - DNA, 25 bp, Saccharomyces pastorianus
acatggtcaaggcatactcgctggg

SEQ ID NO: 70840 - DNA, 25 bp, Saccharomyces pastorianus
gaacccagacgaactgccgatgtgc

SEQ ID NO: 70841 - DNA, 25 bp, Saccharomyces pastorianus
aggttcctgaaagctacgcggacga

SEQ ID NO: 70842 - DNA, 25 bp, Saccharomyces pastorianus
gctggttgtcagtgtcatcggtctc

SEQ ID NO: 70843 - DNA, 25 bp, Saccharomyces pastorianus
ttaatgtgctggaacgacgtgcgat

SEQ ID NO: 70844 - DNA, 25 bp, Saccharomyces pastorianus
gtttaaattcagatccgggtcgaga

SEQ ID NO: 70845 - DNA, 25 bp, Saccharomyces pastorianus
cgcgccgttaagattcatgtccgaa

SEQ ID NO: 70846 - DNA, 25 bp, Saccharomyces pastorianus
atcggtctcgttgttagtcgtcgcc

SEQ ID NO: 70847 - DNA, 25 bp, Saccharomyces pastorianus
gtgcgattgtgcaggcgccaagaaa

SEQ ID NO: 70848 - DNA, 25 bp, Saccharomyces pastorianus
ggctctgttcttgctcataacttta

SEQ ID NO: 70849 - DNA, 25 bp, Saccharomyces pastorianus
gagtctggcaatattttctgcgcgc

SEQ ID NO: 70850 - DNA, 25 bp, Saccharomyces pastorianus
tgcgcgctcgagtacagattccaaa

SEQ ID NO: 70851 - DNA, 25 bp, Saccharomyces pastorianus
atccatgtcgttcagcaggtcggag

SEQ ID NO: 70852 - DNA, 25 bp, Saccharomyces pastorianus
aaacacgttctcgaacacggacgcg

SEQ ID NO: 70853 - DNA, 25 bp, Saccharomyces pastorianus
accaccattgtcatcaccgtagtag

SEQ ID NO: 70854 - DNA, 25 bp, Saccharomyces pastorianus
gtagtagttgttttcgacatagaca

SEQ ID NO: 70855 - DNA, 25 bp, Saccharomyces pastorianus
acattatcttggtcgtggttatcaa

SEQ ID NO: 70856 - DNA, 25 bp, Saccharomyces pastorianus
gttttcgacatagacattatcttgg

SEQ ID NO: 70857 - DNA, 25 bp, Saccharomyces pastorianus
tcaccgtagtagttgttttcgacat

SEQ ID NO: 70858 - DNA, 25 bp, Saccharomyces pastorianus
aaatgcattttccagcatggctcca

SEQ ID NO: 70859 - DNA, 25 bp, Saccharomyces pastorianus
accattgtcatcaccgtagtagttg

SEQ ID NO: 70860 - DNA, 25 bp, Saccharomyces pastorianus
gccgtcatagccaccgtcgaagtca

SEQ ID NO: 70861 - DNA, 25 bp, Saccharomyces pastorianus
gtcgaagtcaccaccattgtcatca

SEQ ID NO: 70862 - DNA, 25 bp, Saccharomyces pastorianus
ggtcgtggttatcaaatgcattttc

SEQ ID NO: 70863 - DNA, 25 bp, Saccharomyces pastorianus
tgtcatcaccgtagtagttgttttc

SEQ ID NO: 70864 - DNA, 25 bp, Saccharomyces pastorianus
aacgcttgccaggtagcctattgga

SEQ ID NO: 70865 - DNA, 25 bp, Saccharomyces pastorianus
gggagcctcctgctgaagacttttc

SEQ ID NO: 70866 - DNA, 25 bp, Saccharomyces pastorianus
aagacttttcccttgatcgccaaat

SEQ ID NO: 70867 - DNA, 25 bp, Saccharomyces pastorianus
gattgctactacgagtccagcgaaa

SEQ ID NO: 70868 - DNA, 25 bp, Saccharomyces pastorianus
cgctgcagaccaaacactcatgtga

SEQ ID NO: 70869 - DNA, 25 bp, Saccharomyces pastorianus
agtacgtgccttaatgacaatttcg

SEQ ID NO: 70870 - DNA, 25 bp, Saccharomyces pastorianus
gccttgctagctgtgacgataaacg

SEQ ID NO: 70871 - DNA, 25 bp, Saccharomyces pastorianus
ttttagcttcctacgacgggtctgt

SEQ ID NO: 70872 - DNA, 25 bp, Saccharomyces pastorianus
gacaatttcgaggaacgcttgccag

SEQ ID NO: 70873 - DNA, 25 bp, Saccharomyces pastorianus
gaatgccttgatgtagcgttatcgt

SEQ ID NO: 70874 - DNA, 25 bp, Saccharomyces pastorianus
gcgttatcgtcaccatcgtacataa

SEQ ID NO: 70875 - DNA, 25 bp, Saccharomyces pastorianus
atgatggtcgatcccttgtatagcg

SEQ ID NO: 70876 - DNA, 25 bp, Saccharomyces pastorianus
ggttgacaaaaccattctgttcgtc

SEQ ID NO: 70877 - DNA, 25 bp, Saccharomyces pastorianus
tctgttcgtctggattacgaccaat

SEQ ID NO: 70878 - DNA, 25 bp, Saccharomyces pastorianus
ggattacgaccaataacggtcagtt

SEQ ID NO: 70879 - DNA, 25 bp, Saccharomyces pastorianus
gacaaaaccattctgttcgtctgga

SEQ ID NO: 70880 - DNA, 25 bp, Saccharomyces pastorianus
tggtcgatcccttgtatagcggcgg

SEQ ID NO: 70881 - DNA, 25 bp, Saccharomyces pastorianus
ttgcgtagtgatatcgaaagttgac

SEQ ID NO: 70882 - DNA, 25 bp, Saccharomyces pastorianus
taacggtcagttgcgtagtgatatc

SEQ ID NO: 70883 - DNA, 25 bp, Saccharomyces pastorianus
tagcggcgggttgacaaaaccattc

SEQ ID NO: 70884 - DNA, 25 bp, Saccharomyces pastorianus
atcccttgtatagcggcgggttgac

SEQ ID NO: 70885 - DNA, 25 bp, Saccharomyces pastorianus
aaccattctgttcgtctggattacg

SEQ ID NO: 70886 - DNA, 25 bp, Saccharomyces pastorianus
gacctagcggcttggttgggaaaca

SEQ ID NO: 70887 - DNA, 25 bp, Saccharomyces pastorianus
attgccagctggctttgcgaggaat

SEQ ID NO: 70888 - DNA, 25 bp, Saccharomyces pastorianus
ttggtctaacctctgctaatcaaga

SEQ ID NO: 70889 - DNA, 25 bp, Saccharomyces pastorianus
ctcatcgcggttttgctttacgaat

SEQ ID NO: 70890 - DNA, 25 bp, Saccharomyces pastorianus
caaaggttcctctgggttattctct

SEQ ID NO: 70891 - DNA, 25 bp, Saccharomyces pastorianus
ggttattctctatcgtcctcaaaga

SEQ ID NO: 70892 - DNA, 25 bp, Saccharomyces pastorianus
ggtcaacttacgatgcgatggctat

SEQ ID NO: 70893 - DNA, 25 bp, Saccharomyces pastorianus
gtcctgggcacaagtactggttacg

SEQ ID NO: 70894 - DNA, 25 bp, Saccharomyces pastorianus
atcaagaatgctggccactattacg

SEQ ID NO: 70895 - DNA, 25 bp, Saccharomyces pastorianus
tttaggtgggcattctgactttctc

SEQ ID NO: 70896 - DNA, 25 bp, Saccharomyces pastorianus
ttaccaggtgccgacgattgccagc

SEQ ID NO: 70897 - DNA, 25 bp, Saccharomyces pastorianus
agcaacggcaatactccagagacaa

SEQ ID NO: 70898 - DNA, 25 bp, Saccharomyces pastorianus
gaagacctttcaatctccaatttca

SEQ ID NO: 70899 - DNA, 25 bp, Saccharomyces pastorianus
gaaaatgcatcgtccaacaataaga

SEQ ID NO: 70900 - DNA, 25 bp, Saccharomyces pastorianus
gaaattatcttgtggaaactcgacc

SEQ ID NO: 70901 - DNA, 25 bp, Saccharomyces pastorianus
acttgttttgaactacttggaggca

SEQ ID NO: 70902 - DNA, 25 bp, Saccharomyces pastorianus
ctccctctgtacctgaaaaatgcct

SEQ ID NO: 70903 - DNA, 25 bp, Saccharomyces pastorianus
catagccattgtgtgcggtgggtct

SEQ ID NO: 70904 - DNA, 25 bp, Saccharomyces pastorianus
ccgtcgtactacgtgactcaggaat

SEQ ID NO: 70905 - DNA, 25 bp, Saccharomyces pastorianus
agcatagttttactcttcacaagga

SEQ ID NO: 70906 - DNA, 25 bp, Saccharomyces pastorianus
acaagtcatagtcctacggccaaga

SEQ ID NO: 70907 - DNA, 25 bp, Saccharomyces pastorianus
tcttttggcctaccagtatttaggt

SEQ ID NO: 70908 - DNA, 25 bp, Saccharomyces pastorianus
gaattctaacgagccaaaacacact

SEQ ID NO: 70909 - DNA, 25 bp, Saccharomyces pastorianus
gcattttggcacatttacgtatgca

SEQ ID NO: 70910 - DNA, 25 bp, Saccharomyces pastorianus
gggagcacacacttttagaatctgg

SEQ ID NO: 70911 - DNA, 25 bp, Saccharomyces pastorianus
aaccccgataacgtcattgagatag

SEQ ID NO: 70912 - DNA, 25 bp, Saccharomyces pastorianus
ttcggtactggtctgcaagcatttt

SEQ ID NO: 70913 - DNA, 25 bp, Saccharomyces pastorianus
gcctacatcgacaccgaacttgttt

SEQ ID NO: 70914 - DNA, 25 bp, Saccharomyces pastorianus
cacacttacatctcgctaattggga

SEQ ID NO: 70915 - DNA, 25 bp, Saccharomyces pastorianus
tatttttggttgtctgcctacatcg

SEQ ID NO: 70916 - DNA, 25 bp, Saccharomyces pastorianus
caaatgatgctgtttctagtagtga

SEQ ID NO: 70917 - DNA, 25 bp, Saccharomyces pastorianus
gattccgaaatcaaccccgataacg

SEQ ID NO: 70918 - DNA, 25 bp, Saccharomyces pastorianus
tttgccagttgacatgtttcggtac

SEQ ID NO: 70919 - DNA, 25 bp, Saccharomyces pastorianus
tgtccttccttttcctttgcctctt

SEQ ID NO: 70920 - DNA, 25 bp, Saccharomyces pastorianus
tttgcctcttcctcttgttcttctc

SEQ ID NO: 70921 - DNA, 25 bp, Saccharomyces pastorianus
ttttcctttgcctcttcctcttgtt

SEQ ID NO: 70922 - DNA, 25 bp, Saccharomyces pastorianus
ttccttttcctttgcctcttcctct

SEQ ID NO: 70923 - DNA, 25 bp, Saccharomyces pastorianus
tttcctttgcctcttcctcttgttc

SEQ ID NO: 70924 - DNA, 25 bp, Saccharomyces pastorianus
ttcctttgcctcttcctcttgttct

SEQ ID NO: 70925 - DNA, 25 bp, Saccharomyces pastorianus
ttgcctcttcctcttgttcttctca

SEQ ID NO: 70926 - DNA, 25 bp, Saccharomyces pastorianus
cttttcctttgcctcttcctcttgt

SEQ ID NO: 70927 - DNA, 25 bp, Saccharomyces pastorianus
ctttgcctcttcctcttgttcttct

SEQ ID NO: 70928 - DNA, 25 bp, Saccharomyces pastorianus
ttgtccttccttttcctttgcctct

SEQ ID NO: 70929 - DNA, 25 bp, Saccharomyces pastorianus
tcctttgcctcttcctcttgttctt

SEQ ID NO: 70930 - DNA, 25 bp, Saccharomyces pastorianus
cagcaggtgttactgttagcatcaa

SEQ ID NO: 70931 - DNA, 25 bp, Saccharomyces pastorianus
tccagcaggtgttactgttagcatc

SEQ ID NO: 70932 - DNA, 25 bp, Saccharomyces pastorianus
tcgtcaaggtcgaaggtccaagagg

SEQ ID NO: 70933 - DNA, 25 bp, Saccharomyces pastorianus
aacgttccagcaggtgttactgtta

SEQ ID NO: 70934 - DNA, 25 bp, Saccharomyces pastorianus
ttaacgttccagcaggtgttactgt

SEQ ID NO: 70935 - DNA, 25 bp, Saccharomyces pastorianus
actgaacaacaaattaacgttccag

SEQ ID NO: 70936 - DNA, 25 bp, Saccharomyces pastorianus
agaatcgtcaaggtcgaaggtccaa

SEQ ID NO: 70937 - DNA, 25 bp, Saccharomyces pastorianus
aattaacgttccagcaggtgttact

SEQ ID NO: 70938 - DNA, 25 bp, Saccharomyces pastorianus
gttccagcaggtgttactgttagca

SEQ ID NO: 70939 - DNA, 25 bp, Saccharomyces pastorianus
caggtgttactgttagcatcaagtc

SEQ ID NO: 70940 - DNA, 25 bp, Saccharomyces pastorianus
atcgtcaaggtcgaaggtccaagag

SEQ ID NO: 70941 - DNA, 25 bp, Saccharomyces pastorianus
acagccctgcgaaagtggttgatct

SEQ ID NO: 70942 - DNA, 25 bp, Saccharomyces pastorianus
gtggttgatctgattccgaatggtt

SEQ ID NO: 70943 - DNA, 25 bp, Saccharomyces pastorianus
aaaatttgtcacatccgttcctcag

SEQ ID NO: 70944 - DNA, 25 bp, Saccharomyces pastorianus
tgaaatcgatgagcccaacagccct

SEQ ID NO: 70945 - DNA, 25 bp, Saccharomyces pastorianus
tgtaattattgctccacactggatg

SEQ ID NO: 70946 - DNA, 25 bp, Saccharomyces pastorianus
aattgctgaactactcgaacggatt

SEQ ID NO: 70947 - DNA, 25 bp, Saccharomyces pastorianus
cgttcctcaggctccgttacaggat

SEQ ID NO: 70948 - DNA, 25 bp, Saccharomyces pastorianus
acggattcttatcttccttttcaga

SEQ ID NO: 70949 - DNA, 25 bp, Saccharomyces pastorianus
ggacgatcagacaattgtggacttt

SEQ ID NO: 70950 - DNA, 25 bp, Saccharomyces pastorianus
tccttttcagatctcggaagttatg

SEQ ID NO: 70951 - DNA, 25 bp, Saccharomyces pastorianus
aaacctgtttcagcgtttcacggag

SEQ ID NO: 70952 - DNA, 25 bp, Saccharomyces pastorianus
atgtttcttcatcaatcttgcctaa

SEQ ID NO: 70953 - DNA, 25 bp, Saccharomyces pastorianus
tatcgactcagacccgacattatgg

SEQ ID NO: 70954 - DNA, 25 bp, Saccharomyces pastorianus
ggaattctttcacaccaagttcagt

SEQ ID NO: 70955 - DNA, 25 bp, Saccharomyces pastorianus
attagatttctactgccttctcgca

SEQ ID NO: 70956 - DNA, 25 bp, Saccharomyces pastorianus
gaactttgtcagaagactctcgtgg

SEQ ID NO: 70957 - DNA, 25 bp, Saccharomyces pastorianus
ttgcaaaactgctcatccctaattt

SEQ ID NO: 70958 - DNA, 25 bp, Saccharomyces pastorianus
gaaggcatattcacattccagggaa

SEQ ID NO: 70959 - DNA, 25 bp, Saccharomyces pastorianus
gactatgtttccgacgaaggccacg

SEQ ID NO: 70960 - DNA, 25 bp, Saccharomyces pastorianus
gcgttatattgcaagttctcccaat

SEQ ID NO: 70961 - DNA, 25 bp, Saccharomyces pastorianus
aagaactccgttctgatcactttac

SEQ ID NO: 70962 - DNA, 25 bp, Saccharomyces pastorianus
agctaatccgctcttttcagtttta

SEQ ID NO: 70963 - DNA, 25 bp, Saccharomyces pastorianus
ggcatctataaataagaccccgttg

SEQ ID NO: 70964 - DNA, 25 bp, Saccharomyces pastorianus
agcacttcaagaggcatctataaat

SEQ ID NO: 70965 - DNA, 25 bp, Saccharomyces pastorianus
gaggcatctataaataagaccccgt

SEQ ID NO: 70966 - DNA, 25 bp, Saccharomyces pastorianus
atgagagcacttcaagaggcatcta

SEQ ID NO: 70967 - DNA, 25 bp, Saccharomyces pastorianus
tataaataagaccccgttgcctcaa

SEQ ID NO: 70968 - DNA, 25 bp, Saccharomyces pastorianus
tctataaataagaccccgttgcctc

SEQ ID NO: 70969 - DNA, 25 bp, Saccharomyces pastorianus
atttcttgtataatgagagcacttc

SEQ ID NO: 70970 - DNA, 25 bp, Saccharomyces pastorianus
taatgagagcacttcaagaggcatc

SEQ ID NO: 70971 - DNA, 25 bp, Saccharomyces pastorianus
gagcacttcaagaggcatctataaa

SEQ ID NO: 70972 - DNA, 25 bp, Saccharomyces pastorianus
ctataaataagaccccgttgcctca

SEQ ID NO: 70973 - DNA, 25 bp, Saccharomyces pastorianus
gagagcacttcaagaggcatctata

SEQ ID NO: 70974 - DNA, 25 bp, Saccharomyces pastorianus
ttccctcccaggatgatattctgac

SEQ ID NO: 70975 - DNA, 25 bp, Saccharomyces pastorianus
gcgcgctacagcttacaaagggtta

SEQ ID NO: 70976 - DNA, 25 bp, Saccharomyces pastorianus
gatattctgacaagttttgccaaga

SEQ ID NO: 70977 - DNA, 25 bp, Saccharomyces pastorianus
gtggcgctgatagttcaggttttct

SEQ ID NO: 70978 - DNA, 25 bp, Saccharomyces pastorianus
atggagcttctttatgccactgggc

SEQ ID NO: 70979 - DNA, 25 bp, Saccharomyces pastorianus
taaagaggcattggcgcgcgctaca

SEQ ID NO: 70980 - DNA, 25 bp, Saccharomyces pastorianus
tatttactaggttcaccctatgtga

SEQ ID NO: 70981 - DNA, 25 bp, Saccharomyces pastorianus
tttggtgctgttcctgggttttact

SEQ ID NO: 70982 - DNA, 25 bp, Saccharomyces pastorianus
agagtttaccagtcttgtctaccca

SEQ ID NO: 70983 - DNA, 25 bp, Saccharomyces pastorianus
caagagatgtttggccgttgggtac

SEQ ID NO: 70984 - DNA, 25 bp, Saccharomyces pastorianus
gtatctatattgtcatgcttgcggc

SEQ ID NO: 70985 - DNA, 25 bp, Saccharomyces pastorianus
agaccattaccaatccgttgatttg

SEQ ID NO: 70986 - DNA, 25 bp, Saccharomyces pastorianus
ggcgaatacttctggtgttagcata

SEQ ID NO: 70987 - DNA, 25 bp, Saccharomyces pastorianus
atattttaccttgtgaaccgccgca

SEQ ID NO: 70988 - DNA, 25 bp, Saccharomyces pastorianus
ggcctggtctcaagtagcacatcaa

SEQ ID NO: 70989 - DNA, 25 bp, Saccharomyces pastorianus
taccgcgagattttcactactgatg

SEQ ID NO: 70990 - DNA, 25 bp, Saccharomyces pastorianus
gtgtgaactctatccaggccaatat

SEQ ID NO: 70991 - DNA, 25 bp, Saccharomyces pastorianus
tgctcgaggaggaattaacccattt

SEQ ID NO: 70992 - DNA, 25 bp, Saccharomyces pastorianus
gtttcaagtacgaacagcacgctaa

SEQ ID NO: 70993 - DNA, 25 bp, Saccharomyces pastorianus
atgtatgaaccttggccccagacag

SEQ ID NO: 70994 - DNA, 25 bp, Saccharomyces pastorianus
catgacctaatacggcttttctttt

SEQ ID NO: 70995 - DNA, 25 bp, Saccharomyces pastorianus
aaacttgaggtctagagctgcattc

SEQ ID NO: 70996 - DNA, 25 bp, Saccharomyces pastorianus
aagatactccccagcctgatgagtt

SEQ ID NO: 70997 - DNA, 25 bp, Saccharomyces pastorianus
tagaagaatctacctgcagcaataa

SEQ ID NO: 70998 - DNA, 25 bp, Saccharomyces pastorianus
gcctgcccataccaaatacatgttg

SEQ ID NO: 70999 - DNA, 25 bp, Saccharomyces pastorianus
gatagtgctaatgtttcaccaccag

SEQ ID NO: 71000 - DNA, 25 bp, Saccharomyces pastorianus
gcagcaatcctaacttacctcagta

SEQ ID NO: 71001 - DNA, 25 bp, Saccharomyces pastorianus
tcttccctggtgaaattgtgtatct

SEQ ID NO: 71002 - DNA, 25 bp, Saccharomyces pastorianus
gatgatgaaccttccactgttgcaa

SEQ ID NO: 71003 - DNA, 25 bp, Saccharomyces pastorianus
cagggatcgttctactttcactaaa

SEQ ID NO: 71004 - DNA, 25 bp, Saccharomyces pastorianus
gcaccttggtgcgttaaacctgaat

SEQ ID NO: 71005 - DNA, 25 bp, Saccharomyces pastorianus
aagaaatagcgatgcctgcccatac

SEQ ID NO: 71006 - DNA, 25 bp, Saccharomyces pastorianus
tgaccaagggcagatttacagggat

SEQ ID NO: 71007 - DNA, 25 bp, Saccharomyces pastorianus
gaaagtgcatccaactctaaatctg

SEQ ID NO: 71008 - DNA, 25 bp, Saccharomyces pastorianus
acaagggcagatgacgcagcagcaa

SEQ ID NO: 71009 - DNA, 25 bp, Saccharomyces pastorianus
aaagccggataactcaagtcccaca

SEQ ID NO: 71010 - DNA, 25 bp, Saccharomyces pastorianus
ggtccgccttactcattgaagtttt

SEQ ID NO: 71011 - DNA, 25 bp, Saccharomyces pastorianus
gaagtttttactgcattattgcgtc

SEQ ID NO: 71012 - DNA, 25 bp, Saccharomyces pastorianus
gcaaagaaatccgttcatccgtgaa

SEQ ID NO: 71013 - DNA, 25 bp, Saccharomyces pastorianus
cacctctctgaaatgtacggacgca

SEQ ID NO: 71014 - DNA, 25 bp, Saccharomyces pastorianus
gattatccatgacgatccagcaaca

SEQ ID NO: 71015 - DNA, 25 bp, Saccharomyces pastorianus
ttgaccagttcatcacctctctgaa

SEQ ID NO: 71016 - DNA, 25 bp, Saccharomyces pastorianus
gggtagcagctcactcttgaaaaca

SEQ ID NO: 71017 - DNA, 25 bp, Saccharomyces pastorianus
ttatctcacttcagtcttgaccagt

SEQ ID NO: 71018 - DNA, 25 bp, Saccharomyces pastorianus
tcttcgacgcagtcggtcacgtgaa

SEQ ID NO: 71019 - DNA, 25 bp, Saccharomyces pastorianus
tggtacgtgttcaggcgctacgcca

SEQ ID NO: 71020 - DNA, 25 bp, Saccharomyces pastorianus
atctggttcggcgtgggcccgatca

SEQ ID NO: 71021 - DNA, 25 bp, Saccharomyces pastorianus
ggcccgatcatggacctggtgtttg

SEQ ID NO: 71022 - DNA, 25 bp, Saccharomyces pastorianus
atggcgcactcgttcaggcgctacg

SEQ ID NO: 71023 - DNA, 25 bp, Saccharomyces pastorianus
aaacgctgaacaaggacggactggt

SEQ ID NO: 71024 - DNA, 25 bp, Saccharomyces pastorianus
acggactggtgaacgctgtgttcgt

SEQ ID NO: 71025 - DNA, 25 bp, Saccharomyces pastorianus
gatacctcataaacgcgtacggctg

SEQ ID NO: 71026 - DNA, 25 bp, Saccharomyces pastorianus
tacgtgttcacgcagggcatctggt

SEQ ID NO: 71027 - DNA, 25 bp, Saccharomyces pastorianus
gacttccagggctcggagactcgga

SEQ ID NO: 71028 - DNA, 25 bp, Saccharomyces pastorianus
gtggtggtgcatcatacgctacctg

SEQ ID NO: 71029 - DNA, 25 bp, Saccharomyces pastorianus
tatcagctttctctggcgttgtgaa

SEQ ID NO: 71030 - DNA, 25 bp, Saccharomyces pastorianus
gggcgttgtagactatttcctcact

SEQ ID NO: 71031 - DNA, 25 bp, Saccharomyces pastorianus
tgcgacacgtttcaatccattagcc

SEQ ID NO: 71032 - DNA, 25 bp, Saccharomyces pastorianus
gagttccaactcctatatcagcttt

SEQ ID NO: 71033 - DNA, 25 bp, Saccharomyces pastorianus
ccaaggcccttggtatggctggtga

SEQ ID NO: 71034 - DNA, 25 bp, Saccharomyces pastorianus
gatagagcctcagggagttccaact

SEQ ID NO: 71035 - DNA, 25 bp, Saccharomyces pastorianus
taggtagatcgtgtccccatgctca

SEQ ID NO: 71036 - DNA, 25 bp, Saccharomyces pastorianus
gaatatccaaactgcccaaagcctt

SEQ ID NO: 71037 - DNA, 25 bp, Saccharomyces pastorianus
ccatgctcatccaactaaagtgtgt

SEQ ID NO: 71038 - DNA, 25 bp, Saccharomyces pastorianus
atagccagcgttttactcaacgtgg

SEQ ID NO: 71039 - DNA, 25 bp, Saccharomyces pastorianus
atgcaccccaattcatgcctattga

SEQ ID NO: 71040 - DNA, 25 bp, Saccharomyces pastorianus
atactctctaccatattccaaggac

SEQ ID NO: 71041 - DNA, 25 bp, Saccharomyces pastorianus
aagccgttcgattctatggtagcac

SEQ ID NO: 71042 - DNA, 25 bp, Saccharomyces pastorianus
atgcaactgtcgtttggtcgcaaca

SEQ ID NO: 71043 - DNA, 25 bp, Saccharomyces pastorianus
tccacggtgaactcgtttctgcaaa

SEQ ID NO: 71044 - DNA, 25 bp, Saccharomyces pastorianus
caagggctttaacaaactgcaggaa

SEQ ID NO: 71045 - DNA, 25 bp, Saccharomyces pastorianus
gtagcactgttaatcccggaatcct

SEQ ID NO: 71046 - DNA, 25 bp, Saccharomyces pastorianus
atcataatgttctacagcggtgtca

SEQ ID NO: 71047 - DNA, 25 bp, Saccharomyces pastorianus
aatgcagacctatccgcgttgagag

SEQ ID NO: 71048 - DNA, 25 bp, Saccharomyces pastorianus
tagacgacaccaccaacgaggagat

SEQ ID NO: 71049 - DNA, 25 bp, Saccharomyces pastorianus
ggagaatgattttgactacgtctac

SEQ ID NO: 71050 - DNA, 25 bp, Saccharomyces pastorianus
aaagctactacttggcatgaacgta

SEQ ID NO: 71051 - DNA, 25 bp, Saccharomyces pastorianus
ttgttgaaaaatacagctcttgctg

SEQ ID NO: 71052 - DNA, 25 bp, Saccharomyces pastorianus
gaaaaatacagctcttgctgcccac

SEQ ID NO: 71053 - DNA, 25 bp, Saccharomyces pastorianus
tagcgatatacctttcagcaatttg

SEQ ID NO: 71054 - DNA, 25 bp, Saccharomyces pastorianus
aacatagcgatatacctttcagcaa

SEQ ID NO: 71055 - DNA, 25 bp, Saccharomyces pastorianus
gctcttctctacaccaatttgatac

SEQ ID NO: 71056 - DNA, 25 bp, Saccharomyces pastorianus
aaatacagctcttgctgcccacaaa

SEQ ID NO: 71057 - DNA, 25 bp, Saccharomyces pastorianus
atttgatacgacaacatagcgatat

SEQ ID NO: 71058 - DNA, 25 bp, Saccharomyces pastorianus
aattgcgctcttctctacaccaatt

SEQ ID NO: 71059 - DNA, 25 bp, Saccharomyces pastorianus
gacaacatagcgatatacctttcag

SEQ ID NO: 71060 - DNA, 25 bp, Saccharomyces pastorianus
ttctctacaccaatttgatacgaca

SEQ ID NO: 71061 - DNA, 25 bp, Saccharomyces pastorianus
gatatacctttcagcaatttgttga

SEQ ID NO: 71062 - DNA, 25 bp, Saccharomyces pastorianus
gttgtaagcgcctctaagttagcaa

SEQ ID NO: 71063 - DNA, 25 bp, Saccharomyces pastorianus
tttcatccatcttgtttgaccctat

SEQ ID NO: 71064 - DNA, 25 bp, Saccharomyces pastorianus
agtgtgctaatatcctatctaggct

SEQ ID NO: 71065 - DNA, 25 bp, Saccharomyces pastorianus
agagttccctgctcttcaaggacgt

SEQ ID NO: 71066 - DNA, 25 bp, Saccharomyces pastorianus
ttaagagctcttccaacacaatcga

SEQ ID NO: 71067 - DNA, 25 bp, Saccharomyces pastorianus
gttagaagctctcgttcaatcccat

SEQ ID NO: 71068 - DNA, 25 bp, Saccharomyces pastorianus
ccatacgttgttgagagttccctgc

SEQ ID NO: 71069 - DNA, 25 bp, Saccharomyces pastorianus
tgttggtcaaattactgccgaagtt

SEQ ID NO: 71070 - DNA, 25 bp, Saccharomyces pastorianus
ttgaccctatttcttacccatacga

SEQ ID NO: 71071 - DNA, 25 bp, Saccharomyces pastorianus
agacatcatcaactaacctcgtgga

SEQ ID NO: 71072 - DNA, 25 bp, Saccharomyces pastorianus
atgaccctagggttcgtgatttagc

SEQ ID NO: 71073 - DNA, 25 bp, Saccharomyces pastorianus
gaaacatcgaaaacggtcgactcgt

SEQ ID NO: 71074 - DNA, 25 bp, Saccharomyces pastorianus
atcgtgaagttcctgcatgttgtaa

SEQ ID NO: 71075 - DNA, 25 bp, Saccharomyces pastorianus
ttgcttgaccttcctttagggcaac

SEQ ID NO: 71076 - DNA, 25 bp, Saccharomyces pastorianus
tgaagttcctgcatgttgtaatgtt

SEQ ID NO: 71077 - DNA, 25 bp, Saccharomyces pastorianus
agccctatcatgaacgattccaaga

SEQ ID NO: 71078 - DNA, 25 bp, Saccharomyces pastorianus
aaataacagccctatcatgaacgat

SEQ ID NO: 71079 - DNA, 25 bp, Saccharomyces pastorianus
agcataatcgtgaagttcctgcatg

SEQ ID NO: 71080 - DNA, 25 bp, Saccharomyces pastorianus
gaacgattccaagagcaaattgctt

SEQ ID NO: 71081 - DNA, 25 bp, Saccharomyces pastorianus
tgaaaagatcgtttcgaaactctta

SEQ ID NO: 71082 - DNA, 25 bp, Saccharomyces pastorianus
agagcaaattgcttgaccttccttt

SEQ ID NO: 71083 - DNA, 25 bp, Saccharomyces pastorianus
cggtcgactcgttgattaatggtat

SEQ ID NO: 71084 - DNA, 25 bp, Saccharomyces pastorianus
cagcttgttagtgagcgagggtaca

SEQ ID NO: 71085 - DNA, 25 bp, Saccharomyces pastorianus
agcgatggatgaagctaagctttca

SEQ ID NO: 71086 - DNA, 25 bp, Saccharomyces pastorianus
gtggtctctgcaaaatccagatcga

SEQ ID NO: 71087 - DNA, 25 bp, Saccharomyces pastorianus
ggagttcgttagttgtattaccatg

SEQ ID NO: 71088 - DNA, 25 bp, Saccharomyces pastorianus
gctgaaagtggtctctgcaaaatcc

SEQ ID NO: 71089 - DNA, 25 bp, Saccharomyces pastorianus
atccagatcgaggaagatgccgtgt

SEQ ID NO: 71090 - DNA, 25 bp, Saccharomyces pastorianus
aattaaaggtggacagcttgttagt

SEQ ID NO: 71091 - DNA, 25 bp, Saccharomyces pastorianus
tgccgtgttagaagcgatggatgaa

SEQ ID NO: 71092 - DNA, 25 bp, Saccharomyces pastorianus
atcgaggaagatgccgtgttagaag

SEQ ID NO: 71093 - DNA, 25 bp, Saccharomyces pastorianus
ggaagatgctgaaagtggtctctgc

SEQ ID NO: 71094 - DNA, 25 bp, Saccharomyces pastorianus
agttcgttagttgtattaccatggt

SEQ ID NO: 71095 - DNA, 25 bp, Saccharomyces pastorianus
ggaattggaatcatcggcgattata

SEQ ID NO: 71096 - DNA, 25 bp, Saccharomyces pastorianus
gtggcaaaaccaatctctgagttaa

SEQ ID NO: 71097 - DNA, 25 bp, Saccharomyces pastorianus
gctgacttatttgcaatggctgata

SEQ ID NO: 71098 - DNA, 25 bp, Saccharomyces pastorianus
gtggtgaccctattgaatgagaaaa

SEQ ID NO: 71099 - DNA, 25 bp, Saccharomyces pastorianus
aagtgtgtggcgatgatattccaga

SEQ ID NO: 71100 - DNA, 25 bp, Saccharomyces pastorianus
gattctgaactcattaatacggaag

SEQ ID NO: 71101 - DNA, 25 bp, Saccharomyces pastorianus
tgcagaatttaatttatgcccagtt

SEQ ID NO: 71102 - DNA, 25 bp, Saccharomyces pastorianus
atatatgttgcctcgctagataata

SEQ ID NO: 71103 - DNA, 25 bp, Saccharomyces pastorianus
acgagagctattgtggtgaccctat

SEQ ID NO: 71104 - DNA, 25 bp, Saccharomyces pastorianus
tgttgtgtcaacgattcatacagaa

SEQ ID NO: 71105 - DNA, 25 bp, Saccharomyces pastorianus
actgaatgaggttttgcggcgtaat

SEQ ID NO: 71106 - DNA, 25 bp, Saccharomyces pastorianus
agcttggtaaagactctatacggga

SEQ ID NO: 71107 - DNA, 25 bp, Saccharomyces pastorianus
gaagcatcgctgatgtttgactcat

SEQ ID NO: 71108 - DNA, 25 bp, Saccharomyces pastorianus
ggaggacgtagtgctcccctcggta

SEQ ID NO: 71109 - DNA, 25 bp, Saccharomyces pastorianus
ggtgaaaatatcattcggttgtaag

SEQ ID NO: 71110 - DNA, 25 bp, Saccharomyces pastorianus
cctcggtacgatcattggtgaaaat

SEQ ID NO: 71111 - DNA, 25 bp, Saccharomyces pastorianus
tcttcaatagcagtggaggacgtag

SEQ ID NO: 71112 - DNA, 25 bp, Saccharomyces pastorianus
ggtcgccccagtatttgcaatattg

SEQ ID NO: 71113 - DNA, 25 bp, Saccharomyces pastorianus
attggtcgccccagtatttgcaata

SEQ ID NO: 71114 - DNA, 25 bp, Saccharomyces pastorianus
gccccagtatttgcaatattgttca

SEQ ID NO: 71115 - DNA, 25 bp, Saccharomyces pastorianus
tcccctcggtacgatcattggtgaa

SEQ ID NO: 71116 - DNA, 25 bp, Saccharomyces pastorianus
gactctatacgggaagcatcgctga

SEQ ID NO: 71117 - DNA, 25 bp, Saccharomyces pastorianus
gaacacgggaccctccagcagcagg

SEQ ID NO: 71118 - DNA, 25 bp, Saccharomyces pastorianus
gggagccctcgggatgtgtttcctt

SEQ ID NO: 71119 - DNA, 25 bp, Saccharomyces pastorianus
ttgctgttgtactgcgcgaacacgg

SEQ ID NO: 71120 - DNA, 25 bp, Saccharomyces pastorianus
agccctcgggatgtgtttccttgtc

SEQ ID NO: 71121 - DNA, 25 bp, Saccharomyces pastorianus
acagccggcgcagcttgctgttgta

SEQ ID NO: 71122 - DNA, 25 bp, Saccharomyces pastorianus
gcagcaggcctgcagcgggagccct

SEQ ID NO: 71123 - DNA, 25 bp, Saccharomyces pastorianus
agcttgctgttgtactgcgcgaaca

SEQ ID NO: 71124 - DNA, 25 bp, Saccharomyces pastorianus
tgtgtttccttgtcgcggcgacgag

SEQ ID NO: 71125 - DNA, 25 bp, Saccharomyces pastorianus
ggatgtgtttccttgtcgcggcgac

SEQ ID NO: 71126 - DNA, 25 bp, Saccharomyces pastorianus
atttcgcggtacaacagccggcgca

SEQ ID NO: 71127 - DNA, 25 bp, Saccharomyces pastorianus
ttgtactgcgcgaacacgggaccct

SEQ ID NO: 71128 - DNA, 25 bp, Saccharomyces pastorianus
gaaagtcgagcgcacggacatccga

SEQ ID NO: 71129 - DNA, 25 bp, Saccharomyces pastorianus
tttgtgcgtcttatcattcagtttg

SEQ ID NO: 71130 - DNA, 25 bp, Saccharomyces pastorianus
ttacgtgcggcgcaacaatcccgtt

SEQ ID NO: 71131 - DNA, 25 bp, Saccharomyces pastorianus
gttgagtatggatttgtgcgtctta

SEQ ID NO: 71132 - DNA, 25 bp, Saccharomyces pastorianus
tcaaagctcgtttcgtgcgtgctaa

SEQ ID NO: 71133 - DNA, 25 bp, Saccharomyces pastorianus
aacaatcccgttctcaaagctcgtt

SEQ ID NO: 71134 - DNA, 25 bp, Saccharomyces pastorianus
ttcgtgcgtgctaagtgatggattc

SEQ ID NO: 71135 - DNA, 25 bp, Saccharomyces pastorianus
actcgattcgaccagctggtgcaag

SEQ ID NO: 71136 - DNA, 25 bp, Saccharomyces pastorianus
gtgatggattcacccgagaattagt

SEQ ID NO: 71137 - DNA, 25 bp, Saccharomyces pastorianus
gaccatatttgttacgtgcggcgca

SEQ ID NO: 71138 - DNA, 25 bp, Saccharomyces pastorianus
ttggaaggaacttcgccactcgatt

SEQ ID NO: 71139 - DNA, 25 bp, Saccharomyces pastorianus
ttcggccaaagtgcaaaaaatcatt

SEQ ID NO: 71140 - DNA, 25 bp, Saccharomyces pastorianus
tgatttttcggccaaagtgcaaaaa

SEQ ID NO: 71141 - DNA, 25 bp, Saccharomyces pastorianus
atggacggaacactagaagtcattg

SEQ ID NO: 71142 - DNA, 25 bp, Saccharomyces pastorianus
gtcattgggtatgatttttcggcca

SEQ ID NO: 71143 - DNA, 25 bp, Saccharomyces pastorianus
ggcgatttctcggacctggtcatat

SEQ ID NO: 71144 - DNA, 25 bp, Saccharomyces pastorianus
gatttctcggacctggtcatatcac

SEQ ID NO: 71145 - DNA, 25 bp, Saccharomyces pastorianus
cggaacactagaagtcattgggtat

SEQ ID NO: 71146 - DNA, 25 bp, Saccharomyces pastorianus
ttctcggacctggtcatatcacacg

SEQ ID NO: 71147 - DNA, 25 bp, Saccharomyces pastorianus
attggcgatttctcggacctggtca

SEQ ID NO: 71148 - DNA, 25 bp, Saccharomyces pastorianus
aatcattggcgatttctcggacctg

SEQ ID NO: 71149 - DNA, 25 bp, Saccharomyces pastorianus
gggtatgatttttcggccaaagtgc

SEQ ID NO: 71150 - DNA, 25 bp, Saccharomyces pastorianus
atttgccatggcttcatcgtgttct

SEQ ID NO: 71151 - DNA, 25 bp, Saccharomyces pastorianus
aacaagttttttctcgatcattatg

SEQ ID NO: 71152 - DNA, 25 bp, Saccharomyces pastorianus
gaattccttcattgcatgccttaaa

SEQ ID NO: 71153 - DNA, 25 bp, Saccharomyces pastorianus
atctttgtccattagaatcttgatc

SEQ ID NO: 71154 - DNA, 25 bp, Saccharomyces pastorianus
gaatcttgatcatttgccatggctt

SEQ ID NO: 71155 - DNA, 25 bp, Saccharomyces pastorianus
catcgtgttctcttcagtggcagaa

SEQ ID NO: 71156 - DNA, 25 bp, Saccharomyces pastorianus
ttgcagctctgatttgaattccttc

SEQ ID NO: 71157 - DNA, 25 bp, Saccharomyces pastorianus
gaagtcccatctaaattaacaagtt

SEQ ID NO: 71158 - DNA, 25 bp, Saccharomyces pastorianus
gttctcttcagtggcagaagtccca

SEQ ID NO: 71159 - DNA, 25 bp, Saccharomyces pastorianus
gcatgccttaaatctttgtccatta

SEQ ID NO: 71160 - DNA, 25 bp, Saccharomyces pastorianus
atggcttcatcgtgttctcttcagt

SEQ ID NO: 71161 - DNA, 25 bp, Saccharomyces pastorianus
tgtttcagcgagagagcactgcccc

SEQ ID NO: 71162 - DNA, 25 bp, Saccharomyces pastorianus
atatttcgtttgcttacctgcccag

SEQ ID NO: 71163 - DNA, 25 bp, Saccharomyces pastorianus
tttcctccggaaaaacttgtgagca

SEQ ID NO: 71164 - DNA, 25 bp, Saccharomyces pastorianus
gcccagcttagctatcgtgatcaag

SEQ ID NO: 71165 - DNA, 25 bp, Saccharomyces pastorianus
gctccgcctttgtttcagcgagaga

SEQ ID NO: 71166 - DNA, 25 bp, Saccharomyces pastorianus
cccgacttcgggaaaatctggagtg

SEQ ID NO: 71167 - DNA, 25 bp, Saccharomyces pastorianus
ttttggctctttgtccatttgtgct

SEQ ID NO: 71168 - DNA, 25 bp, Saccharomyces pastorianus
agcacctgggtgatttttggctctt

SEQ ID NO: 71169 - DNA, 25 bp, Saccharomyces pastorianus
agctatcgtgatcaagcacctgggt

SEQ ID NO: 71170 - DNA, 25 bp, Saccharomyces pastorianus
gggcggcatatttcgtttgcttacc

SEQ ID NO: 71171 - DNA, 25 bp, Saccharomyces pastorianus
ccatgacgacagacgcccagcggga

SEQ ID NO: 71172 - DNA, 25 bp, Saccharomyces pastorianus
gaggcgatcattcccgcagacgtca

SEQ ID NO: 71173 - DNA, 25 bp, Saccharomyces pastorianus
gatcattcccgcagacgtcaagtta

SEQ ID NO: 71174 - DNA, 25 bp, Saccharomyces pastorianus
ccgcagacgtcaagttagaggactt

SEQ ID NO: 71175 - DNA, 25 bp, Saccharomyces pastorianus
tcattcccgcagacgtcaagttaga

SEQ ID NO: 71176 - DNA, 25 bp, Saccharomyces pastorianus
ttggaagtgacgctggccaacaacg

SEQ ID NO: 71177 - DNA, 25 bp, Saccharomyces pastorianus
gacttggaagtgacgctggccaaca

SEQ ID NO: 71178 - DNA, 25 bp, Saccharomyces pastorianus
attcccgcagacgtcaagttagagg

SEQ ID NO: 71179 - DNA, 25 bp, Saccharomyces pastorianus
atcattcccgcagacgtcaagttag

SEQ ID NO: 71180 - DNA, 25 bp, Saccharomyces pastorianus
tggaggcgatcattcccgcagacgt

SEQ ID NO: 71181 - DNA, 25 bp, Saccharomyces pastorianus
atggaggcgatcattcccgcagacg

SEQ ID NO: 71182 - DNA, 25 bp, Saccharomyces pastorianus
aggacttggaagtgacgctggccaa

SEQ ID NO: 71183 - DNA, 25 bp, Saccharomyces pastorianus
tgaaacccgaaaacttccaattcat

SEQ ID NO: 71184 - DNA, 25 bp, Saccharomyces pastorianus
atatcctcgcctcattttgtcgaga

SEQ ID NO: 71185 - DNA, 25 bp, Saccharomyces pastorianus
cccatagacacggatgttgcgttct

SEQ ID NO: 71186 - DNA, 25 bp, Saccharomyces pastorianus
gatgttgcgttctacaacgttgttt

SEQ ID NO: 71187 - DNA, 25 bp, Saccharomyces pastorianus
aatgcctgcagagattgaaacccga

SEQ ID NO: 71188 - DNA, 25 bp, Saccharomyces pastorianus
gatttccttaaatcctcatggtaca

SEQ ID NO: 71189 - DNA, 25 bp, Saccharomyces pastorianus
gaattgcactcacgaagatatcctc

SEQ ID NO: 71190 - DNA, 25 bp, Saccharomyces pastorianus
tgattctttacgtccttacactgtt

SEQ ID NO: 71191 - DNA, 25 bp, Saccharomyces pastorianus
caacgttgtttggatcacggaacta

SEQ ID NO: 71192 - DNA, 25 bp, Saccharomyces pastorianus
gatgccatttgtgaaaactgtattg

SEQ ID NO: 71193 - DNA, 25 bp, Saccharomyces pastorianus
tccaattcatttttgatgccatttg

SEQ ID NO: 71194 - DNA, 25 bp, Saccharomyces pastorianus
aaatcacccacttaactcaaactct

SEQ ID NO: 71195 - DNA, 25 bp, Saccharomyces pastorianus
taattcacaatctgtcgccttctta

SEQ ID NO: 71196 - DNA, 25 bp, Saccharomyces pastorianus
atccatgcaaccattccacatgttg

SEQ ID NO: 71197 - DNA, 25 bp, Saccharomyces pastorianus
aatgggcgcacaattccaacctttt

SEQ ID NO: 71198 - DNA, 25 bp, Saccharomyces pastorianus
ggcaagactggcactgataacgaca

SEQ ID NO: 71199 - DNA, 25 bp, Saccharomyces pastorianus
aggtcacccacacaatatatcttca

SEQ ID NO: 71200 - DNA, 25 bp, Saccharomyces pastorianus
gccaatccatctaggtccagtttta

SEQ ID NO: 71201 - DNA, 25 bp, Saccharomyces pastorianus
tatggaatcaggtctcctttcccta

SEQ ID NO: 71202 - DNA, 25 bp, Saccharomyces pastorianus
aaaaggacagcagccctacgactta

SEQ ID NO: 71203 - DNA, 25 bp, Saccharomyces pastorianus
ttatgctgcagcatacccttatggg

SEQ ID NO: 71204 - DNA, 25 bp, Saccharomyces pastorianus
tcgatgaatcctacccttggaccat

SEQ ID NO: 71205 - DNA, 25 bp, Saccharomyces pastorianus
gaacggtgtccatatcgaagcagat

SEQ ID NO: 71206 - DNA, 25 bp, Saccharomyces pastorianus
gcagattctggagccgaaacgacta

SEQ ID NO: 71207 - DNA, 25 bp, Saccharomyces pastorianus
attcatgcgagtgtacgttcaccac

SEQ ID NO: 71208 - DNA, 25 bp, Saccharomyces pastorianus
ttccctgcgccagctgcgaaatata

SEQ ID NO: 71209 - DNA, 25 bp, Saccharomyces pastorianus
gactgactccagttctagttctgtt

SEQ ID NO: 71210 - DNA, 25 bp, Saccharomyces pastorianus
ttggccggcagggttcgcaaaccga

SEQ ID NO: 71211 - DNA, 25 bp, Saccharomyces pastorianus
caaacttggagggagcgacgattca

SEQ ID NO: 71212 - DNA, 25 bp, Saccharomyces pastorianus
tcaccactcggcatggtagcagacg

SEQ ID NO: 71213 - DNA, 25 bp, Saccharomyces pastorianus
ttcccaatcctcagttgtgtgcaga

SEQ ID NO: 71214 - DNA, 25 bp, Saccharomyces pastorianus
gtgtgcagatggaccttgctcaata

SEQ ID NO: 71215 - DNA, 25 bp, Saccharomyces pastorianus
acgactatggactcaaacggttttg

SEQ ID NO: 71216 - DNA, 25 bp, Saccharomyces pastorianus
tagattactaatcgatccgcctttt

SEQ ID NO: 71217 - DNA, 25 bp, Saccharomyces pastorianus
tgtcatcgcgatagtcagtgcccca

SEQ ID NO: 71218 - DNA, 25 bp, Saccharomyces pastorianus
gaaggcgctgatgaaaacactgtca

SEQ ID NO: 71219 - DNA, 25 bp, Saccharomyces pastorianus
tgttggctggaaaagatcacttctt

SEQ ID NO: 71220 - DNA, 25 bp, Saccharomyces pastorianus
taatcgatccgccttttttgaacga

SEQ ID NO: 71221 - DNA, 25 bp, Saccharomyces pastorianus
gagcatatttacctgtttgaattcg

SEQ ID NO: 71222 - DNA, 25 bp, Saccharomyces pastorianus
gagatgccctattagaaggcgctga

SEQ ID NO: 71223 - DNA, 25 bp, Saccharomyces pastorianus
gactacaacaaacctctcgaattta

SEQ ID NO: 71224 - DNA, 25 bp, Saccharomyces pastorianus
ggcaactctctcaattttggtacag

SEQ ID NO: 71225 - DNA, 25 bp, Saccharomyces pastorianus
catcggtttacgctgcgatccaaaa

SEQ ID NO: 71226 - DNA, 25 bp, Saccharomyces pastorianus
gaaacagccgcaatcctaggagatg

SEQ ID NO: 71227 - DNA, 25 bp, Saccharomyces pastorianus
gaatttaggtgttacgcaaacttcg

SEQ ID NO: 71228 - DNA, 25 bp, Saccharomyces pastorianus
tcttccagagcattctaatggttta

SEQ ID NO: 71229 - DNA, 25 bp, Saccharomyces pastorianus
ggtttattcaaccacaagaattaca

SEQ ID NO: 71230 - DNA, 25 bp, Saccharomyces pastorianus
catttcttccagagcattctaatgg

SEQ ID NO: 71231 - DNA, 25 bp, Saccharomyces pastorianus
ttacgcaaacttcgagtgtaaatct

SEQ ID NO: 71232 - DNA, 25 bp, Saccharomyces pastorianus
gaattacaacatttcttccagagca

SEQ ID NO: 71233 - DNA, 25 bp, Saccharomyces pastorianus
agagcattctaatggtttaagtaac

SEQ ID NO: 71234 - DNA, 25 bp, Saccharomyces pastorianus
ggtgttacgcaaacttcgagtgtaa

SEQ ID NO: 71235 - DNA, 25 bp, Saccharomyces pastorianus
taggtgttacgcaaacttcgagtgt

SEQ ID NO: 71236 - DNA, 25 bp, Saccharomyces pastorianus
gccaaggtttattcaaccacaagaa

SEQ ID NO: 71237 - DNA, 25 bp, Saccharomyces pastorianus
acaacatttcttccagagcattcta

SEQ ID NO: 71238 - DNA, 25 bp, Saccharomyces pastorianus
tctttcttgctttcacacgatatca

SEQ ID NO: 71239 - DNA, 25 bp, Saccharomyces pastorianus
tacaacgatatttcatctacgaagg

SEQ ID NO: 71240 - DNA, 25 bp, Saccharomyces pastorianus
tcttccaaactctgttatcagatac

SEQ ID NO: 71241 - DNA, 25 bp, Saccharomyces pastorianus
atctacgaaggtacgtcttttcatc

SEQ ID NO: 71242 - DNA, 25 bp, Saccharomyces pastorianus
cagacgtggcatgtcagtacaatac

SEQ ID NO: 71243 - DNA, 25 bp, Saccharomyces pastorianus
gtggcatgtcagtacaataccttct

SEQ ID NO: 71244 - DNA, 25 bp, Saccharomyces pastorianus
gaaggaatattctcattatcaaaca

SEQ ID NO: 71245 - DNA, 25 bp, Saccharomyces pastorianus
aactctgttatcagatacatccaag

SEQ ID NO: 71246 - DNA, 25 bp, Saccharomyces pastorianus
tttcttgctttcacacgatatcatg

SEQ ID NO: 71247 - DNA, 25 bp, Saccharomyces pastorianus
gaaggtacgtcttttcatcagacgt

SEQ ID NO: 71248 - DNA, 25 bp, Saccharomyces pastorianus
catgtcagtacaataccttcttcca

SEQ ID NO: 71249 - DNA, 25 bp, Saccharomyces pastorianus
tatcgacgacgagcgtagcctctgt

SEQ ID NO: 71250 - DNA, 25 bp, Saccharomyces pastorianus
gacgctgccgttacatgtattttca

SEQ ID NO: 71251 - DNA, 25 bp, Saccharomyces pastorianus
ccttactattttgtcgacttcgtct

SEQ ID NO: 71252 - DNA, 25 bp, Saccharomyces pastorianus
attttcacaggagttggcccaggcc

SEQ ID NO: 71253 - DNA, 25 bp, Saccharomyces pastorianus
tagcctctgtttcgttcacttcttt

SEQ ID NO: 71254 - DNA, 25 bp, Saccharomyces pastorianus
atctcgctttctgcgcttgattcat

SEQ ID NO: 71255 - DNA, 25 bp, Saccharomyces pastorianus
gtttaccgtcgcaacatcgagcagc

SEQ ID NO: 71256 - DNA, 25 bp, Saccharomyces pastorianus
gagcagcctaagtctatcgacgacg

SEQ ID NO: 71257 - DNA, 25 bp, Saccharomyces pastorianus
tggtctgccgggtggttctcatagc

SEQ ID NO: 71258 - DNA, 25 bp, Saccharomyces pastorianus
atagcggtgttgttgacgctgccgt

SEQ ID NO: 71259 - DNA, 25 bp, Saccharomyces pastorianus
gcttgattcatccacgtttaccgtc

SEQ ID NO: 71260 - DNA, 25 bp, Saccharomyces pastorianus
gctattttaccccaatgttacatcg

SEQ ID NO: 71261 - DNA, 25 bp, Saccharomyces pastorianus
gccaaatgacgaaaacgctctcaaa

SEQ ID NO: 71262 - DNA, 25 bp, Saccharomyces pastorianus
aaagtttggatacgtgaggcagttc

SEQ ID NO: 71263 - DNA, 25 bp, Saccharomyces pastorianus
ttacgattttggtaagccaaatgac

SEQ ID NO: 71264 - DNA, 25 bp, Saccharomyces pastorianus
gaatgcatgcgcgaagaaccttgtt

SEQ ID NO: 71265 - DNA, 25 bp, Saccharomyces pastorianus
cgctctcaaattaatgaatgcatgc

SEQ ID NO: 71266 - DNA, 25 bp, Saccharomyces pastorianus
cacgatgctattttaccccaatgtt

SEQ ID NO: 71267 - DNA, 25 bp, Saccharomyces pastorianus
ggcagttcgaaacgcacgatgctat

SEQ ID NO: 71268 - DNA, 25 bp, Saccharomyces pastorianus
aaacgcacgatgctattttacccca

SEQ ID NO: 71269 - DNA, 25 bp, Saccharomyces pastorianus
atacgtgaggcagttcgaaacgcac

SEQ ID NO: 71270 - DNA, 25 bp, Saccharomyces pastorianus
accccaatgttacatcgtggtaaga

SEQ ID NO: 71271 - DNA, 25 bp, Saccharomyces pastorianus
aggtccactggatctttcttatgat

SEQ ID NO: 71272 - DNA, 25 bp, Saccharomyces pastorianus
gaacccgcaattatgctccatgatg

SEQ ID NO: 71273 - DNA, 25 bp, Saccharomyces pastorianus
aatactgctcgaacaacgggcttca

SEQ ID NO: 71274 - DNA, 25 bp, Saccharomyces pastorianus
gtatcggccgaaacctcaataagcg

SEQ ID NO: 71275 - DNA, 25 bp, Saccharomyces pastorianus
tgaacacccaggatgggcccattat

SEQ ID NO: 71276 - DNA, 25 bp, Saccharomyces pastorianus
catcccttccattctatggcgaaga

SEQ ID NO: 71277 - DNA, 25 bp, Saccharomyces pastorianus
ttaagaaaccatgggtcctcgccgc

SEQ ID NO: 71278 - DNA, 25 bp, Saccharomyces pastorianus
gggacgtgtacctgttggacttaag

SEQ ID NO: 71279 - DNA, 25 bp, Saccharomyces pastorianus
atactacacggcttgttcgggaaca

SEQ ID NO: 71280 - DNA, 25 bp, Saccharomyces pastorianus
aacgggcttcagtattgtgactcca

SEQ ID NO: 71281 - DNA, 25 bp, Saccharomyces pastorianus
ggaccgcccattattatactacacg

SEQ ID NO: 71282 - DNA, 25 bp, Saccharomyces pastorianus
gtgggatcaagaggccatgccgcaa

SEQ ID NO: 71283 - DNA, 25 bp, Saccharomyces pastorianus
ggatcaagaggccatgccgcaatct

SEQ ID NO: 71284 - DNA, 25 bp, Saccharomyces pastorianus
atctcgcctttcacgatggcgtctt

SEQ ID NO: 71285 - DNA, 25 bp, Saccharomyces pastorianus
atgccgcaatctcgcctttcacgat

SEQ ID NO: 71286 - DNA, 25 bp, Saccharomyces pastorianus
aatctcgcctttcacgatggcgtct

SEQ ID NO: 71287 - DNA, 25 bp, Saccharomyces pastorianus
tctcgcctttcacgatggcgtcttt

SEQ ID NO: 71288 - DNA, 25 bp, Saccharomyces pastorianus
atcaagaggccatgccgcaatctcg

SEQ ID NO: 71289 - DNA, 25 bp, Saccharomyces pastorianus
gaggccatgccgcaatctcgccttt

SEQ ID NO: 71290 - DNA, 25 bp, Saccharomyces pastorianus
gcaatctcgcctttcacgatggcgt

SEQ ID NO: 71291 - DNA, 25 bp, Saccharomyces pastorianus
gatcaagaggccatgccgcaatctc

SEQ ID NO: 71292 - DNA, 25 bp, Saccharomyces pastorianus
ctcgcctttcacgatggcgtctttt

SEQ ID NO: 71293 - DNA, 25 bp, Saccharomyces pastorianus
atattctaccgctgctcatgttgtt

SEQ ID NO: 71294 - DNA, 25 bp, Saccharomyces pastorianus
ggtgctcaacacttatctcgaagat

SEQ ID NO: 71295 - DNA, 25 bp, Saccharomyces pastorianus
actaggcggtactgtggcatgcata

SEQ ID NO: 71296 - DNA, 25 bp, Saccharomyces pastorianus
gtatccggagggtatagccaaaatc

SEQ ID NO: 71297 - DNA, 25 bp, Saccharomyces pastorianus
gttcctggttgcatctagttactaa

SEQ ID NO: 71298 - DNA, 25 bp, Saccharomyces pastorianus
aaatcgctgcgaccttatgcgaatg

SEQ ID NO: 71299 - DNA, 25 bp, Saccharomyces pastorianus
aactaggctgatcgatttgccagca

SEQ ID NO: 71300 - DNA, 25 bp, Saccharomyces pastorianus
ttataaatgggccacggcggcacta

SEQ ID NO: 71301 - DNA, 25 bp, Saccharomyces pastorianus
gtccgattatcttcatttttgccta

SEQ ID NO: 71302 - DNA, 25 bp, Saccharomyces pastorianus
gagatcacaacaaaaccgtcggtta

SEQ ID NO: 71303 - DNA, 25 bp, Saccharomyces pastorianus
actggtcaacaatcaacctttggca

SEQ ID NO: 71304 - DNA, 25 bp, Saccharomyces pastorianus
taaggtcgcaaactatatatcgtac

SEQ ID NO: 71305 - DNA, 25 bp, Saccharomyces pastorianus
acgacttgcccttctattgtattgg

SEQ ID NO: 71306 - DNA, 25 bp, Saccharomyces pastorianus
atctcaaattgacgacttgcccttc

SEQ ID NO: 71307 - DNA, 25 bp, Saccharomyces pastorianus
agagaatgccgagtttttgttgaga

SEQ ID NO: 71308 - DNA, 25 bp, Saccharomyces pastorianus
gaagaaaccgctgcttatgaaaata

SEQ ID NO: 71309 - DNA, 25 bp, Saccharomyces pastorianus
tattgtaccgtgtggaaaacccaga

SEQ ID NO: 71310 - DNA, 25 bp, Saccharomyces pastorianus
tgcacctgaatatacgttgcgtact

SEQ ID NO: 71311 - DNA, 25 bp, Saccharomyces pastorianus
gggctattaagctattgtaccgtgt

SEQ ID NO: 71312 - DNA, 25 bp, Saccharomyces pastorianus
gggtttatgaattactcaagggcta

SEQ ID NO: 71313 - DNA, 25 bp, Saccharomyces pastorianus
aattctcaagagtcactttactgga

SEQ ID NO: 71314 - DNA, 25 bp, Saccharomyces pastorianus
ttcgtgaagacgaccaattctcaag

SEQ ID NO: 71315 - DNA, 25 bp, Saccharomyces pastorianus
gatgatgctaacttgtatttcgcca

SEQ ID NO: 71316 - DNA, 25 bp, Saccharomyces pastorianus
ggccaggttgaacaaatagatacgt

SEQ ID NO: 71317 - DNA, 25 bp, Saccharomyces pastorianus
tcattggcatgaagcagagcgaaat

SEQ ID NO: 71318 - DNA, 25 bp, Saccharomyces pastorianus
gaagcagagcgaaatataaaccaaa

SEQ ID NO: 71319 - DNA, 25 bp, Saccharomyces pastorianus
gtatttcgccaagaattatttactg

SEQ ID NO: 71320 - DNA, 25 bp, Saccharomyces pastorianus
gtaaaatcattttgtcattggcatg

SEQ ID NO: 71321 - DNA, 25 bp, Saccharomyces pastorianus
atacccgaggttcaaggccaggttg

SEQ ID NO: 71322 - DNA, 25 bp, Saccharomyces pastorianus
atttactgggatcactggaatctac

SEQ ID NO: 71323 - DNA, 25 bp, Saccharomyces pastorianus
gaatctacagttccaatacccgagg

SEQ ID NO: 71324 - DNA, 25 bp, Saccharomyces pastorianus
gccattatactttgggcaaaacagt

SEQ ID NO: 71325 - DNA, 25 bp, Saccharomyces pastorianus
agtgccatcgccaacgtatcttgga

SEQ ID NO: 71326 - DNA, 25 bp, Saccharomyces pastorianus
catgcccaataaagcagtgcccttg

SEQ ID NO: 71327 - DNA, 25 bp, Saccharomyces pastorianus
gaagacactgtgcatctcagcatag

SEQ ID NO: 71328 - DNA, 25 bp, Saccharomyces pastorianus
gataaattcaaccttagaagaccgt

SEQ ID NO: 71329 - DNA, 25 bp, Saccharomyces pastorianus
gaggcatgtagccatggtgcataat

SEQ ID NO: 71330 - DNA, 25 bp, Saccharomyces pastorianus
tttgccgcgcatttagataaattca

SEQ ID NO: 71331 - DNA, 25 bp, Saccharomyces pastorianus
taataatgccgattcgaggttcaat

SEQ ID NO: 71332 - DNA, 25 bp, Saccharomyces pastorianus
agtatccagggctcagttgtccatt

SEQ ID NO: 71333 - DNA, 25 bp, Saccharomyces pastorianus
aagcagtgcccttggaaaatattag

SEQ ID NO: 71334 - DNA, 25 bp, Saccharomyces pastorianus
ggatttctgcaagcaacaggtttaa

SEQ ID NO: 71335 - DNA, 25 bp, Saccharomyces pastorianus
ttagaagaccgtacacatgcccaat

SEQ ID NO: 71336 - DNA, 25 bp, Saccharomyces pastorianus
cagttgtccattttctatttgccag

SEQ ID NO: 71337 - DNA, 25 bp, Saccharomyces pastorianus
gcttgcatgctatgtgggatagttc

SEQ ID NO: 71338 - DNA, 25 bp, Saccharomyces pastorianus
cagaccacgaacgagtttaatagag

SEQ ID NO: 71339 - DNA, 25 bp, Saccharomyces pastorianus
ttcagaccacgaacgagtttaatag

SEQ ID NO: 71340 - DNA, 25 bp, Saccharomyces pastorianus
cacgaacgagtttaatagagagggt

SEQ ID NO: 71341 - DNA, 25 bp, Saccharomyces pastorianus
atgtgggatagttcagaccacgaac

SEQ ID NO: 71342 - DNA, 25 bp, Saccharomyces pastorianus
gaccacgaacgagtttaatagagag

SEQ ID NO: 71343 - DNA, 25 bp, Saccharomyces pastorianus
gatagttcagaccacgaacgagttt

SEQ ID NO: 71344 - DNA, 25 bp, Saccharomyces pastorianus
tagttcagaccacgaacgagtttaa

SEQ ID NO: 71345 - DNA, 25 bp, Saccharomyces pastorianus
taatagagagggttgtcctaactgt

SEQ ID NO: 71346 - DNA, 25 bp, Saccharomyces pastorianus
atgctatgtgggatagttcagacca

SEQ ID NO: 71347 - DNA, 25 bp, Saccharomyces pastorianus
gggatagttcagaccacgaacgagt

SEQ ID NO: 71348 - DNA, 25 bp, Saccharomyces pastorianus
catgctattgcgacttctctgaaag

SEQ ID NO: 71349 - DNA, 25 bp, Saccharomyces pastorianus
gaattcgggccctcaacatcaaaga

SEQ ID NO: 71350 - DNA, 25 bp, Saccharomyces pastorianus
atccgttgctgctgatgcgagatca

SEQ ID NO: 71351 - DNA, 25 bp, Saccharomyces pastorianus
tcaagaggttccttatccgttgctg

SEQ ID NO: 71352 - DNA, 25 bp, Saccharomyces pastorianus
attctctacccttacttgatttact

SEQ ID NO: 71353 - DNA, 25 bp, Saccharomyces pastorianus
gcagcccttccgtaaaacttcaaga

SEQ ID NO: 71354 - DNA, 25 bp, Saccharomyces pastorianus
aatcaatcacatcgtgcttaccact

SEQ ID NO: 71355 - DNA, 25 bp, Saccharomyces pastorianus
tctggtcagactcctttatcgcata

SEQ ID NO: 71356 - DNA, 25 bp, Saccharomyces pastorianus
cataccacatcctgttacatgctat

SEQ ID NO: 71357 - DNA, 25 bp, Saccharomyces pastorianus
aacaattttgattcctcctcaggta

SEQ ID NO: 71358 - DNA, 25 bp, Saccharomyces pastorianus
atatctaactggtcatgcttcgctc

SEQ ID NO: 71359 - DNA, 25 bp, Saccharomyces pastorianus
gatgatgtcaacttaattggcgcat

SEQ ID NO: 71360 - DNA, 25 bp, Saccharomyces pastorianus
gccccattaaagttcacacatacct

SEQ ID NO: 71361 - DNA, 25 bp, Saccharomyces pastorianus
gatattagttttgatggctctcact

SEQ ID NO: 71362 - DNA, 25 bp, Saccharomyces pastorianus
tattttgcttcttctgccccattaa

SEQ ID NO: 71363 - DNA, 25 bp, Saccharomyces pastorianus
attcgggatgacctgttacgctata

SEQ ID NO: 71364 - DNA, 25 bp, Saccharomyces pastorianus
agaattacacacgaactgcccaatg

SEQ ID NO: 71365 - DNA, 25 bp, Saccharomyces pastorianus
ttgttctcacagatcattcgggatg

SEQ ID NO: 71366 - DNA, 25 bp, Saccharomyces pastorianus
ggtgagtttaccagaatccgaagat

SEQ ID NO: 71367 - DNA, 25 bp, Saccharomyces pastorianus
tggcgcatttttgtacccatcaata

SEQ ID NO: 71368 - DNA, 25 bp, Saccharomyces pastorianus
atacgaaactctacttttgccaaag

SEQ ID NO: 71369 - DNA, 25 bp, Saccharomyces pastorianus
tccgaagatcttttgttctcacaga

SEQ ID NO: 71370 - DNA, 25 bp, Saccharomyces pastorianus
tagtctaaacctatcctcactcgtt

SEQ ID NO: 71371 - DNA, 25 bp, Saccharomyces pastorianus
atagcttccgaagggttgccactaa

SEQ ID NO: 71372 - DNA, 25 bp, Saccharomyces pastorianus
gaggaattccattcttacagatagt

SEQ ID NO: 71373 - DNA, 25 bp, Saccharomyces pastorianus
ctcactcgtttctttgaacttcaca

SEQ ID NO: 71374 - DNA, 25 bp, Saccharomyces pastorianus
ctcccctgacaacaaccttgataaa

SEQ ID NO: 71375 - DNA, 25 bp, Saccharomyces pastorianus
tttctttcctttccgcgactaatag

SEQ ID NO: 71376 - DNA, 25 bp, Saccharomyces pastorianus
ccaactaccgttctttgacattcaa

SEQ ID NO: 71377 - DNA, 25 bp, Saccharomyces pastorianus
atgcgagaaactcacttcagcccaa

SEQ ID NO: 71378 - DNA, 25 bp, Saccharomyces pastorianus
aaaagtgatgcgtccttgcctgtaa

SEQ ID NO: 71379 - DNA, 25 bp, Saccharomyces pastorianus
atacggaggatattcgagcacaact

SEQ ID NO: 71380 - DNA, 25 bp, Saccharomyces pastorianus
gggttgccactaaatttctctgaga

SEQ ID NO: 71381 - DNA, 25 bp, Saccharomyces pastorianus
gataatctatcaacgtttcctgcta

SEQ ID NO: 71382 - DNA, 25 bp, Saccharomyces pastorianus
tgaccagcttcataacctcaacttg

SEQ ID NO: 71383 - DNA, 25 bp, Saccharomyces pastorianus
gtggtaccgttctttaactcgatgg

SEQ ID NO: 71384 - DNA, 25 bp, Saccharomyces pastorianus
ctttaactcgatggtaacttgctca

SEQ ID NO: 71385 - DNA, 25 bp, Saccharomyces pastorianus
ggtaacttgctcattacgcagtttt

SEQ ID NO: 71386 - DNA, 25 bp, Saccharomyces pastorianus
ctgtggtaccgttctttaactcgat

SEQ ID NO: 71387 - DNA, 25 bp, Saccharomyces pastorianus
aaagttgaccagcttcataacctca

SEQ ID NO: 71388 - DNA, 25 bp, Saccharomyces pastorianus
acgtttcctgctaatttggcaatcc

SEQ ID NO: 71389 - DNA, 25 bp, Saccharomyces pastorianus
atctatcaacgtttcctgctaattt

SEQ ID NO: 71390 - DNA, 25 bp, Saccharomyces pastorianus
gcttcataacctcaacttggataat

SEQ ID NO: 71391 - DNA, 25 bp, Saccharomyces pastorianus
gctcattacgcagttttttcaaaaa

SEQ ID NO: 71392 - DNA, 25 bp, Saccharomyces pastorianus
ggctcacacatatacacgcagggca

SEQ ID NO: 71393 - DNA, 25 bp, Saccharomyces pastorianus
aaaggcttcggctgcaaggaaactc

SEQ ID NO: 71394 - DNA, 25 bp, Saccharomyces pastorianus
ggatcccagacttgcagaataccct

SEQ ID NO: 71395 - DNA, 25 bp, Saccharomyces pastorianus
aggacgctgagcctatgcttctgca

SEQ ID NO: 71396 - DNA, 25 bp, Saccharomyces pastorianus
agctcctttcatcgagaacgtcaag

SEQ ID NO: 71397 - DNA, 25 bp, Saccharomyces pastorianus
caggaacggctctctaagtacaagt

SEQ ID NO: 71398 - DNA, 25 bp, Saccharomyces pastorianus
gatccgagcgactttgagctgtgct

SEQ ID NO: 71399 - DNA, 25 bp, Saccharomyces pastorianus
gaagatatgccagagcctgcgcaac

SEQ ID NO: 71400 - DNA, 25 bp, Saccharomyces pastorianus
gctgtgcttcggcaagttccaggaa

SEQ ID NO: 71401 - DNA, 25 bp, Saccharomyces pastorianus
tgaagcaattgcaaacccggatccc

SEQ ID NO: 71402 - DNA, 25 bp, Saccharomyces pastorianus
agggcactatggacacgctattcaa

SEQ ID NO: 71403 - DNA, 25 bp, Saccharomyces pastorianus
tactgccggttcattatctaagaag

SEQ ID NO: 71404 - DNA, 25 bp, Saccharomyces pastorianus
gcctatcattatcaccactgctcgt

SEQ ID NO: 71405 - DNA, 25 bp, Saccharomyces pastorianus
tatctaagaagtccacgggagacga

SEQ ID NO: 71406 - DNA, 25 bp, Saccharomyces pastorianus
accctcgcgaggtcacagatggcga

SEQ ID NO: 71407 - DNA, 25 bp, Saccharomyces pastorianus
ggtaccgaacaaggtcattactaag

SEQ ID NO: 71408 - DNA, 25 bp, Saccharomyces pastorianus
tgcggtcgaggccacgcctatcatt

SEQ ID NO: 71409 - DNA, 25 bp, Saccharomyces pastorianus
gtcacagatggcgatgacggtctcg

SEQ ID NO: 71410 - DNA, 25 bp, Saccharomyces pastorianus
tgaagaagacggaccctcgcgaggt

SEQ ID NO: 71411 - DNA, 25 bp, Saccharomyces pastorianus
atttcaggtaccgaacaaggtcatt

SEQ ID NO: 71412 - DNA, 25 bp, Saccharomyces pastorianus
tcattactaaggaggacatcacccc

SEQ ID NO: 71413 - DNA, 25 bp, Saccharomyces pastorianus
ccctgtccagatcgcacgtgaagaa

SEQ ID NO: 71414 - DNA, 25 bp, Saccharomyces pastorianus
aggaagacccatgtctgatgtcggt

SEQ ID NO: 71415 - DNA, 25 bp, Saccharomyces pastorianus
atatggactccaagataagaatcgt

SEQ ID NO: 71416 - DNA, 25 bp, Saccharomyces pastorianus
aaaagcctttttgcatcaaccaaag

SEQ ID NO: 71417 - DNA, 25 bp, Saccharomyces pastorianus
gaatttccaaatcctctgttagacg

SEQ ID NO: 71418 - DNA, 25 bp, Saccharomyces pastorianus
gatgtccatgaggatctaccgtatg

SEQ ID NO: 71419 - DNA, 25 bp, Saccharomyces pastorianus
ggaatcggatccaaaagcctttttg

SEQ ID NO: 71420 - DNA, 25 bp, Saccharomyces pastorianus
gagcgctaattttgacggaatttcc

SEQ ID NO: 71421 - DNA, 25 bp, Saccharomyces pastorianus
gtctgatgtcggtgtgagcgctaat

SEQ ID NO: 71422 - DNA, 25 bp, Saccharomyces pastorianus
aaacacattcttgtcacagctgaaa

SEQ ID NO: 71423 - DNA, 25 bp, Saccharomyces pastorianus
ggatgcaagatctacttacttcttt

SEQ ID NO: 71424 - DNA, 25 bp, Saccharomyces pastorianus
ggatctaccgtatgacttggaatcg

SEQ ID NO: 71425 - DNA, 25 bp, Saccharomyces pastorianus
tggacttatgccacgatggccattt

SEQ ID NO: 71426 - DNA, 25 bp, Saccharomyces pastorianus
gatgaaggcttccaaactccaactt

SEQ ID NO: 71427 - DNA, 25 bp, Saccharomyces pastorianus
agatgaccgtttcctcttatcaaat

SEQ ID NO: 71428 - DNA, 25 bp, Saccharomyces pastorianus
acgacttggaagcttctttggctgc

SEQ ID NO: 71429 - DNA, 25 bp, Saccharomyces pastorianus
tggctacaacaacgcggattttcat

SEQ ID NO: 71430 - DNA, 25 bp, Saccharomyces pastorianus
gaatttaccgttttaatggctgcat

SEQ ID NO: 71431 - DNA, 25 bp, Saccharomyces pastorianus
caatgtcgtccaagaccaattctca

SEQ ID NO: 71432 - DNA, 25 bp, Saccharomyces pastorianus
gatgtctcattctggttcattaggt

SEQ ID NO: 71433 - DNA, 25 bp, Saccharomyces pastorianus
aacaagattctgcttcacggctttt

SEQ ID NO: 71434 - DNA, 25 bp, Saccharomyces pastorianus
ggcttttcatcctaccaactattta

SEQ ID NO: 71435 - DNA, 25 bp, Saccharomyces pastorianus
aactcttctagttcgttcgcttcta

SEQ ID NO: 71436 - DNA, 25 bp, Saccharomyces pastorianus
gatttgttattcacacctggattaa

SEQ ID NO: 71437 - DNA, 25 bp, Saccharomyces pastorianus
tgttattgacttgaggacgcctgta

SEQ ID NO: 71438 - DNA, 25 bp, Saccharomyces pastorianus
ggactgcaacattgttcctgtggat

SEQ ID NO: 71439 - DNA, 25 bp, Saccharomyces pastorianus
gcgccatcccaatttccggaagatt

SEQ ID NO: 71440 - DNA, 25 bp, Saccharomyces pastorianus
ggacgcctgtaggtttgaagtcatc

SEQ ID NO: 71441 - DNA, 25 bp, Saccharomyces pastorianus
gaacttactacaaacacatggcctg

SEQ ID NO: 71442 - DNA, 25 bp, Saccharomyces pastorianus
aatggacccaacatatcaacttgta

SEQ ID NO: 71443 - DNA, 25 bp, Saccharomyces pastorianus
atatcactaatgaccaggcgccatc

SEQ ID NO: 71444 - DNA, 25 bp, Saccharomyces pastorianus
aaacctctattcaagggaccgcaca

SEQ ID NO: 71445 - DNA, 25 bp, Saccharomyces pastorianus
tattccattgcctatcgccacaaga

SEQ ID NO: 71446 - DNA, 25 bp, Saccharomyces pastorianus
agtcatcgtgtggtattctttcaat

SEQ ID NO: 71447 - DNA, 25 bp, Saccharomyces pastorianus
tgatcgtggctcttggtcctgtgaa

SEQ ID NO: 71448 - DNA, 25 bp, Saccharomyces pastorianus
gtcccaatcacacttacctgtttaa

SEQ ID NO: 71449 - DNA, 25 bp, Saccharomyces pastorianus
gatttgctcaaccaccaagagacgg

SEQ ID NO: 71450 - DNA, 25 bp, Saccharomyces pastorianus
ttcggtaaagtaggtcccaatcaca

SEQ ID NO: 71451 - DNA, 25 bp, Saccharomyces pastorianus
tcagcaagcttgtctgatttcaagg

SEQ ID NO: 71452 - DNA, 25 bp, Saccharomyces pastorianus
gtgggcagatcctcaagaagctaac

SEQ ID NO: 71453 - DNA, 25 bp, Saccharomyces pastorianus
tatgggtccttctcaacgtggtcta

SEQ ID NO: 71454 - DNA, 25 bp, Saccharomyces pastorianus
cggtgattttgttgatcgtggctct

SEQ ID NO: 71455 - DNA, 25 bp, Saccharomyces pastorianus
gtcctgtgaagttgcgttgttgttt

SEQ ID NO: 71456 - DNA, 25 bp, Saccharomyces pastorianus
gtttaccattggctacgctaattaa

SEQ ID NO: 71457 - DNA, 25 bp, Saccharomyces pastorianus
agctaacggtatgggtccttctcaa

SEQ ID NO: 71458 - DNA, 25 bp, Saccharomyces pastorianus
gaccaagaggcccattgttcaaaaa

SEQ ID NO: 71459 - DNA, 25 bp, Saccharomyces pastorianus
gactacgccgtattgatgggaaact

SEQ ID NO: 71460 - DNA, 25 bp, Saccharomyces pastorianus
gatccttctttgaacttttatgcgt

SEQ ID NO: 71461 - DNA, 25 bp, Saccharomyces pastorianus
cccatggtggcggtactgcttataa

SEQ ID NO: 71462 - DNA, 25 bp, Saccharomyces pastorianus
ggaaccacggtatctttggatgagt

SEQ ID NO: 71463 - DNA, 25 bp, Saccharomyces pastorianus
gactggctttctttcaagggttctt

SEQ ID NO: 71464 - DNA, 25 bp, Saccharomyces pastorianus
gagtttctctatgtcagcgattcaa

SEQ ID NO: 71465 - DNA, 25 bp, Saccharomyces pastorianus
gaacgcacgcgcattacgcatcagt

SEQ ID NO: 71466 - DNA, 25 bp, Saccharomyces pastorianus
gaaatggtgccctttccaatggaaa

SEQ ID NO: 71467 - DNA, 25 bp, Saccharomyces pastorianus
acgcatcagtaggtcagcattcgca

SEQ ID NO: 71468 - DNA, 25 bp, Saccharomyces pastorianus
gtgattttactgacagaggcccatt

SEQ ID NO: 71469 - DNA, 25 bp, Saccharomyces pastorianus
tttaaagactactgagcttctttgt

SEQ ID NO: 71470 - DNA, 25 bp, Saccharomyces pastorianus
gaaacttggtgcctcttatatttaa

SEQ ID NO: 71471 - DNA, 25 bp, Saccharomyces pastorianus
ggtgcctcttatatttaaagactac

SEQ ID NO: 71472 - DNA, 25 bp, Saccharomyces pastorianus
cttgtttttacgatcttcagctgga

SEQ ID NO: 71473 - DNA, 25 bp, Saccharomyces pastorianus
gggtacttgtttttacgatcttcag

SEQ ID NO: 71474 - DNA, 25 bp, Saccharomyces pastorianus
catcctctttttccctaccattagg

SEQ ID NO: 71475 - DNA, 25 bp, Saccharomyces pastorianus
gtttttacgatcttcagctggaacg

SEQ ID NO: 71476 - DNA, 25 bp, Saccharomyces pastorianus
ggagacttgaaacttggtgcctctt

SEQ ID NO: 71477 - DNA, 25 bp, Saccharomyces pastorianus
gctggaacgtggagacttgaaactt

SEQ ID NO: 71478 - DNA, 25 bp, Saccharomyces pastorianus
gatcttcagctggaacgtggagact

SEQ ID NO: 71479 - DNA, 25 bp, Saccharomyces pastorianus
gacttgaaacttggtgcctcttata

SEQ ID NO: 71480 - DNA, 25 bp, Saccharomyces pastorianus
ggcctaatggccgagaattcaaaaa

SEQ ID NO: 71481 - DNA, 25 bp, Saccharomyces pastorianus
gacatgtatttatttctcgactctt

SEQ ID NO: 71482 - DNA, 25 bp, Saccharomyces pastorianus
gggtgccacaaatccagagtagcaa

SEQ ID NO: 71483 - DNA, 25 bp, Saccharomyces pastorianus
aatcgagcataggtaccggtcaagt

SEQ ID NO: 71484 - DNA, 25 bp, Saccharomyces pastorianus
atggcagtagtgacgcgattgaaca

SEQ ID NO: 71485 - DNA, 25 bp, Saccharomyces pastorianus
aatgcacggttattttctctgagct

SEQ ID NO: 71486 - DNA, 25 bp, Saccharomyces pastorianus
tgtcaggccgtgtgggtgccacaaa

SEQ ID NO: 71487 - DNA, 25 bp, Saccharomyces pastorianus
tttaagaagtgtgggcctaatggcc

SEQ ID NO: 71488 - DNA, 25 bp, Saccharomyces pastorianus
attttctctgagctgcaatggcgca

SEQ ID NO: 71489 - DNA, 25 bp, Saccharomyces pastorianus
ggaacaagtctctttaacggtgata

SEQ ID NO: 71490 - DNA, 25 bp, Saccharomyces pastorianus
gtacagtgtcgcctagtttaaagtt

SEQ ID NO: 71491 - DNA, 25 bp, Saccharomyces pastorianus
aagaaggttactaggcccggctgct

SEQ ID NO: 71492 - DNA, 25 bp, Saccharomyces pastorianus
ggcatttagttacactactggtggt

SEQ ID NO: 71493 - DNA, 25 bp, Saccharomyces pastorianus
gctgtatatggtccacgttccatta

SEQ ID NO: 71494 - DNA, 25 bp, Saccharomyces pastorianus
agatttcaacgaatacgccacccaa

SEQ ID NO: 71495 - DNA, 25 bp, Saccharomyces pastorianus
gagatactttctttacatacgggat

SEQ ID NO: 71496 - DNA, 25 bp, Saccharomyces pastorianus
ggctgctgccaagcctatggcattt

SEQ ID NO: 71497 - DNA, 25 bp, Saccharomyces pastorianus
ggacctgctttggtagaagccagaa

SEQ ID NO: 71498 - DNA, 25 bp, Saccharomyces pastorianus
tacgccacccaaatacagcgaaggt

SEQ ID NO: 71499 - DNA, 25 bp, Saccharomyces pastorianus
agacgtcattaattaccgctgtata

SEQ ID NO: 71500 - DNA, 25 bp, Saccharomyces pastorianus
tcgagaattgtaacggacctgcttt

SEQ ID NO: 71501 - DNA, 25 bp, Saccharomyces pastorianus
gaaactcaaagcatcagacgtcatt

SEQ ID NO: 71502 - DNA, 25 bp, Saccharomyces pastorianus
cattcatcatcgatggaccatgata

SEQ ID NO: 71503 - DNA, 25 bp, Saccharomyces pastorianus
tccttctttaaccattcatcatcga

SEQ ID NO: 71504 - DNA, 25 bp, Saccharomyces pastorianus
ttctttaaccattcatcatcgatgg

SEQ ID NO: 71505 - DNA, 25 bp, Saccharomyces pastorianus
cttctttaaccattcatcatcgatg

SEQ ID NO: 71506 - DNA, 25 bp, Saccharomyces pastorianus
accattcatcatcgatggaccatga

SEQ ID NO: 71507 - DNA, 25 bp, Saccharomyces pastorianus
tttaaccattcatcatcgatggacc

SEQ ID NO: 71508 - DNA, 25 bp, Saccharomyces pastorianus
taaccattcatcatcgatggaccat

SEQ ID NO: 71509 - DNA, 25 bp, Saccharomyces pastorianus
ttcatcatcgatggaccatgatagt

SEQ ID NO: 71510 - DNA, 25 bp, Saccharomyces pastorianus
ttccttctttaaccattcatcatcg

SEQ ID NO: 71511 - DNA, 25 bp, Saccharomyces pastorianus
ccttctttaaccattcatcatcgat

SEQ ID NO: 71512 - DNA, 25 bp, Saccharomyces pastorianus
aaccattcatcatcgatggaccatg

SEQ ID NO: 71513 - DNA, 25 bp, Saccharomyces pastorianus
gtggactcttctaataccggcaatg

SEQ ID NO: 71514 - DNA, 25 bp, Saccharomyces pastorianus
gagattggcattaacttcgaccata

SEQ ID NO: 71515 - DNA, 25 bp, Saccharomyces pastorianus
aatggtggtggcttctaccaaccgt

SEQ ID NO: 71516 - DNA, 25 bp, Saccharomyces pastorianus
ggtcttttcctattgatggctggca

SEQ ID NO: 71517 - DNA, 25 bp, Saccharomyces pastorianus
atgcgcatgaacctccattgttgga

SEQ ID NO: 71518 - DNA, 25 bp, Saccharomyces pastorianus
gggtattctacatgctctttctaca

SEQ ID NO: 71519 - DNA, 25 bp, Saccharomyces pastorianus
gctggcaaagtccatttcgggtata

SEQ ID NO: 71520 - DNA, 25 bp, Saccharomyces pastorianus
aacaatctgggtgttgcccctgatc

SEQ ID NO: 71521 - DNA, 25 bp, Saccharomyces pastorianus
atgtctttctacaaccccaatgata

SEQ ID NO: 71522 - DNA, 25 bp, Saccharomyces pastorianus
aatttgccgtgcctcaaggatctat

SEQ ID NO: 71523 - DNA, 25 bp, Saccharomyces pastorianus
tcgggtatatctacggtgttgcttt

SEQ ID NO: 71524 - DNA, 25 bp, Saccharomyces pastorianus
atagctctttgcttaagttggtgtt

SEQ ID NO: 71525 - DNA, 25 bp, Saccharomyces pastorianus
gttggtgttgttgatatcttcttgt

SEQ ID NO: 71526 - DNA, 25 bp, Saccharomyces pastorianus
tgttgatatcttcttgttgtacgtc

SEQ ID NO: 71527 - DNA, 25 bp, Saccharomyces pastorianus
ctttgcttaagttggtgttgttgat

SEQ ID NO: 71528 - DNA, 25 bp, Saccharomyces pastorianus
gatgtctcacagatagctctttgct

SEQ ID NO: 71529 - DNA, 25 bp, Saccharomyces pastorianus
tggcaccaccgacggctaaggtcaa

SEQ ID NO: 71530 - DNA, 25 bp, Saccharomyces pastorianus
gtctcacagatagctctttgcttaa

SEQ ID NO: 71531 - DNA, 25 bp, Saccharomyces pastorianus
ttcttgttgtacgtcatcaccacca

SEQ ID NO: 71532 - DNA, 25 bp, Saccharomyces pastorianus
ttgtacgtcatcaccaccacggaag

SEQ ID NO: 71533 - DNA, 25 bp, Saccharomyces pastorianus
ggctaaggtcaaaagatgtctcaca

SEQ ID NO: 71534 - DNA, 25 bp, Saccharomyces pastorianus
atcttcttgttgtacgtcatcacca

SEQ ID NO: 71535 - DNA, 25 bp, Saccharomyces pastorianus
ggaggccttgtttcagcaatactac

SEQ ID NO: 71536 - DNA, 25 bp, Saccharomyces pastorianus
acgttgttagcatctgttcctggca

SEQ ID NO: 71537 - DNA, 25 bp, Saccharomyces pastorianus
tgaccgtatcctaatggccccttta

SEQ ID NO: 71538 - DNA, 25 bp, Saccharomyces pastorianus
agtactgtgcagtcgatgtctgcca

SEQ ID NO: 71539 - DNA, 25 bp, Saccharomyces pastorianus
gttcctggcacatggcgcatatata

SEQ ID NO: 71540 - DNA, 25 bp, Saccharomyces pastorianus
gagcaacgtcactactacttacaac

SEQ ID NO: 71541 - DNA, 25 bp, Saccharomyces pastorianus
gaactcgctattcaattcttcagat

SEQ ID NO: 71542 - DNA, 25 bp, Saccharomyces pastorianus
acagacaccctgtacaattctttaa

SEQ ID NO: 71543 - DNA, 25 bp, Saccharomyces pastorianus
tctgccatcataccgacgttgttag

SEQ ID NO: 71544 - DNA, 25 bp, Saccharomyces pastorianus
agagcaactattctacccttgatgc

SEQ ID NO: 71545 - DNA, 25 bp, Saccharomyces pastorianus
cacgaaggagtatcttccctcattg

SEQ ID NO: 71546 - DNA, 25 bp, Saccharomyces pastorianus
aatcccggttggtatagtttcatcg

SEQ ID NO: 71547 - DNA, 25 bp, Saccharomyces pastorianus
gattgtcgccaagttgaggtttaac

SEQ ID NO: 71548 - DNA, 25 bp, Saccharomyces pastorianus
tggtctactctctcaggacgttaaa

SEQ ID NO: 71549 - DNA, 25 bp, Saccharomyces pastorianus
gttggcccatgtgaatacgatccct

SEQ ID NO: 71550 - DNA, 25 bp, Saccharomyces pastorianus
aatacgatccctccggagtcaaatg

SEQ ID NO: 71551 - DNA, 25 bp, Saccharomyces pastorianus
gagtcaaatggccttcttttcgaat

SEQ ID NO: 71552 - DNA, 25 bp, Saccharomyces pastorianus
gaaggcgaagtttcctagtgcaaat

SEQ ID NO: 71553 - DNA, 25 bp, Saccharomyces pastorianus
tccctttatcctttttctctacatt

SEQ ID NO: 71554 - DNA, 25 bp, Saccharomyces pastorianus
tagtttcatcgtctcttctatggag

SEQ ID NO: 71555 - DNA, 25 bp, Saccharomyces pastorianus
ttatactatcgtggtctactctctc

SEQ ID NO: 71556 - DNA, 25 bp, Saccharomyces pastorianus
aagctaccgttgacagtccctttat

SEQ ID NO: 71557 - DNA, 25 bp, Saccharomyces pastorianus
tatccccctttacaacaaatatggc

SEQ ID NO: 71558 - DNA, 25 bp, Saccharomyces pastorianus
aaatatggcaaagatttcccacgag

SEQ ID NO: 71559 - DNA, 25 bp, Saccharomyces pastorianus
atggcaaagatttcccacgagaaac

SEQ ID NO: 71560 - DNA, 25 bp, Saccharomyces pastorianus
gagctattacgaaatatcccccttt

SEQ ID NO: 71561 - DNA, 25 bp, Saccharomyces pastorianus
aataacgttgaggagctattacgaa

SEQ ID NO: 71562 - DNA, 25 bp, Saccharomyces pastorianus
tgaacaataacgttgaggagctatt

SEQ ID NO: 71563 - DNA, 25 bp, Saccharomyces pastorianus
ttcccacgagaaacagtaaccagat

SEQ ID NO: 71564 - DNA, 25 bp, Saccharomyces pastorianus
gcaaagatttcccacgagaaacagt

SEQ ID NO: 71565 - DNA, 25 bp, Saccharomyces pastorianus
tgaggagctattacgaaatatcccc

SEQ ID NO: 71566 - DNA, 25 bp, Saccharomyces pastorianus
aacagtaaccagattacagatgcct

SEQ ID NO: 71567 - DNA, 25 bp, Saccharomyces pastorianus
gatttcccacgagaaacagtaacca

SEQ ID NO: 71568 - DNA, 25 bp, Saccharomyces pastorianus
atgcccagggatccattgattggta

SEQ ID NO: 71569 - DNA, 25 bp, Saccharomyces pastorianus
gtaggagcatttccctttaccacga

SEQ ID NO: 71570 - DNA, 25 bp, Saccharomyces pastorianus
gtgcggcggtaggagcatttccctt

SEQ ID NO: 71571 - DNA, 25 bp, Saccharomyces pastorianus
ttaccacgatcgagccaaatcaggc

SEQ ID NO: 71572 - DNA, 25 bp, Saccharomyces pastorianus
aagccatcttcagggaaatccacca

SEQ ID NO: 71573 - DNA, 25 bp, Saccharomyces pastorianus
gtgggtaagccatcttcagggaaat

SEQ ID NO: 71574 - DNA, 25 bp, Saccharomyces pastorianus
ggtattgtgggtaagccatcttcag

SEQ ID NO: 71575 - DNA, 25 bp, Saccharomyces pastorianus
agcatttccctttaccacgatcgag

SEQ ID NO: 71576 - DNA, 25 bp, Saccharomyces pastorianus
tccaccacattaaattctttgacgg

SEQ ID NO: 71577 - DNA, 25 bp, Saccharomyces pastorianus
attctttgacggacgcaggtgcggc

SEQ ID NO: 71578 - DNA, 25 bp, Saccharomyces pastorianus
atcttcagggaaatccaccacatta

SEQ ID NO: 71579 - DNA, 25 bp, Saccharomyces pastorianus
tgacttgactccagaagacgcccaa

SEQ ID NO: 71580 - DNA, 25 bp, Saccharomyces pastorianus
atgtccttaccagctacttttgact

SEQ ID NO: 71581 - DNA, 25 bp, Saccharomyces pastorianus
aagacgcccaactattgttggctgc

SEQ ID NO: 71582 - DNA, 25 bp, Saccharomyces pastorianus
gacgcccaactattgttggctgcta

SEQ ID NO: 71583 - DNA, 25 bp, Saccharomyces pastorianus
gactccagaagacgcccaactattg

SEQ ID NO: 71584 - DNA, 25 bp, Saccharomyces pastorianus
tttgacttgactccagaagacgccc

SEQ ID NO: 71585 - DNA, 25 bp, Saccharomyces pastorianus
ttgactccagaagacgcccaactat

SEQ ID NO: 71586 - DNA, 25 bp, Saccharomyces pastorianus
cgcccaactattgttggctgctaac

SEQ ID NO: 71587 - DNA, 25 bp, Saccharomyces pastorianus
agaagacgcccaactattgttggct

SEQ ID NO: 71588 - DNA, 25 bp, Saccharomyces pastorianus
tacttttgacttgactccagaagac

SEQ ID NO: 71589 - DNA, 25 bp, Saccharomyces pastorianus
ttttgacttgactccagaagacgcc

SEQ ID NO: 71590 - DNA, 25 bp, Saccharomyces pastorianus
agctggtgctggaacacttgcaatc

SEQ ID NO: 71591 - DNA, 25 bp, Saccharomyces pastorianus
ggaacacttgcaatcgacaggaaga

SEQ ID NO: 71592 - DNA, 25 bp, Saccharomyces pastorianus
gaagagtacttggaactgtggaaac

SEQ ID NO: 71593 - DNA, 25 bp, Saccharomyces pastorianus
gtggaaacaaaaacttctgctggaa

SEQ ID NO: 71594 - DNA, 25 bp, Saccharomyces pastorianus
gcggccaatttaccatgggctgact

SEQ ID NO: 71595 - DNA, 25 bp, Saccharomyces pastorianus
gactttgtgtcaattttgccggaga

SEQ ID NO: 71596 - DNA, 25 bp, Saccharomyces pastorianus
gtggtcatcagcaactgcaggtgaa

SEQ ID NO: 71597 - DNA, 25 bp, Saccharomyces pastorianus
gaagctataacccatatttggtcag

SEQ ID NO: 71598 - DNA, 25 bp, Saccharomyces pastorianus
gtgaagaaacctttgatcttacagt

SEQ ID NO: 71599 - DNA, 25 bp, Saccharomyces pastorianus
gaatcaatacaaaaaccgcggccaa

SEQ ID NO: 71600 - DNA, 25 bp, Saccharomyces pastorianus
aatcagcttttagtggtggtcatca

SEQ ID NO: 71601 - DNA, 25 bp, Saccharomyces pastorianus
gtactcacaatagcactctgatcaa

SEQ ID NO: 71602 - DNA, 25 bp, Saccharomyces pastorianus
tggcacaagccatcccctaaagaat

SEQ ID NO: 71603 - DNA, 25 bp, Saccharomyces pastorianus
aaaacccagtgtttgacgctcatcg

SEQ ID NO: 71604 - DNA, 25 bp, Saccharomyces pastorianus
ttacgagatgcgttttagccccaac

SEQ ID NO: 71605 - DNA, 25 bp, Saccharomyces pastorianus
ttgacgctcatcgaagtgctaatag

SEQ ID NO: 71606 - DNA, 25 bp, Saccharomyces pastorianus
aacaaactcgcatgaccattcgcat

SEQ ID NO: 71607 - DNA, 25 bp, Saccharomyces pastorianus
ccagggcaccctaataagagtattc

SEQ ID NO: 71608 - DNA, 25 bp, Saccharomyces pastorianus
ttggctggtgccaagataccaacaa

SEQ ID NO: 71609 - DNA, 25 bp, Saccharomyces pastorianus
aaatatttggactccgtgtggtcaa

SEQ ID NO: 71610 - DNA, 25 bp, Saccharomyces pastorianus
cggtagcaaattggccgcattgtca

SEQ ID NO: 71611 - DNA, 25 bp, Saccharomyces pastorianus
aacgcggcacacgatgatgaatttt

SEQ ID NO: 71612 - DNA, 25 bp, Saccharomyces pastorianus
gaaccagtctttgtttttcaaacag

SEQ ID NO: 71613 - DNA, 25 bp, Saccharomyces pastorianus
gagtcaaatcgcacattccttatcg

SEQ ID NO: 71614 - DNA, 25 bp, Saccharomyces pastorianus
gatgcgccttgcttgagaaatgact

SEQ ID NO: 71615 - DNA, 25 bp, Saccharomyces pastorianus
gccaggcgaggtatgtaagttcttt

SEQ ID NO: 71616 - DNA, 25 bp, Saccharomyces pastorianus
gggttgttccgtgtacatttggtca

SEQ ID NO: 71617 - DNA, 25 bp, Saccharomyces pastorianus
gtgtcgccgccgaaaagctttcaaa

SEQ ID NO: 71618 - DNA, 25 bp, Saccharomyces pastorianus
aaacggcagtgtaagtctattcgaa

SEQ ID NO: 71619 - DNA, 25 bp, Saccharomyces pastorianus
ccttatcgtgtattggatgcgcctt

SEQ ID NO: 71620 - DNA, 25 bp, Saccharomyces pastorianus
gggcagtgtccatcttagatcatca

SEQ ID NO: 71621 - DNA, 25 bp, Saccharomyces pastorianus
gaattcttccattccaccaaaaagg

SEQ ID NO: 71622 - DNA, 25 bp, Saccharomyces pastorianus
gtgtttcattctgtccttataatag

SEQ ID NO: 71623 - DNA, 25 bp, Saccharomyces pastorianus
ggcggttaattcacctatatcgtta

SEQ ID NO: 71624 - DNA, 25 bp, Saccharomyces pastorianus
aattcacctatatcgttattgtcgt

SEQ ID NO: 71625 - DNA, 25 bp, Saccharomyces pastorianus
ttctccctctttggcggttaattca

SEQ ID NO: 71626 - DNA, 25 bp, Saccharomyces pastorianus
cttcatcttcaacattttcgctttc

SEQ ID NO: 71627 - DNA, 25 bp, Saccharomyces pastorianus
tctcttactttacgaactttaccat

SEQ ID NO: 71628 - DNA, 25 bp, Saccharomyces pastorianus
tttggttcagcgacatcttcatctt

SEQ ID NO: 71629 - DNA, 25 bp, Saccharomyces pastorianus
atgttttcaaattcttctcttactt

SEQ ID NO: 71630 - DNA, 25 bp, Saccharomyces pastorianus
tcaacattttcgctttcttctacct

SEQ ID NO: 71631 - DNA, 25 bp, Saccharomyces pastorianus
cgttattgtcgttatcatctttttt

SEQ ID NO: 71632 - DNA, 25 bp, Saccharomyces pastorianus
ttacgaactttaccatcatcatcat

SEQ ID NO: 71633 - DNA, 25 bp, Saccharomyces pastorianus
tttcttctacctttgcttcttctgc

SEQ ID NO: 71634 - DNA, 25 bp, Saccharomyces pastorianus
gagatgattatcctgcaggcctggt

SEQ ID NO: 71635 - DNA, 25 bp, Saccharomyces pastorianus
gaatcagtacgacgccttaaggcat

SEQ ID NO: 71636 - DNA, 25 bp, Saccharomyces pastorianus
gcaggcctggtctctgagtatttac

SEQ ID NO: 71637 - DNA, 25 bp, Saccharomyces pastorianus
ttgtccatactaacactcaaccgat

SEQ ID NO: 71638 - DNA, 25 bp, Saccharomyces pastorianus
ggctctttagccttcatgcaagcta

SEQ ID NO: 71639 - DNA, 25 bp, Saccharomyces pastorianus
gagaattggaacaccgcgacgacat

SEQ ID NO: 71640 - DNA, 25 bp, Saccharomyces pastorianus
attatcctctggtgctggtgttaca

SEQ ID NO: 71641 - DNA, 25 bp, Saccharomyces pastorianus
aagtgctccagctggtgattttacc

SEQ ID NO: 71642 - DNA, 25 bp, Saccharomyces pastorianus
aaggcattattcactctgttctgct

SEQ ID NO: 71643 - DNA, 25 bp, Saccharomyces pastorianus
tctgcttctgccaaggacggtttga

SEQ ID NO: 71644 - DNA, 25 bp, Saccharomyces pastorianus
agatgtgtacacctgtggctcttta

SEQ ID NO: 71645 - DNA, 25 bp, Saccharomyces pastorianus
aggctctaacaatccgttttcgttg

SEQ ID NO: 71646 - DNA, 25 bp, Saccharomyces pastorianus
aagcgcaggtaccagtagcatcgaa

SEQ ID NO: 71647 - DNA, 25 bp, Saccharomyces pastorianus
aagttcagtatgcttccaccggtat

SEQ ID NO: 71648 - DNA, 25 bp, Saccharomyces pastorianus
ggacatacatgactggttcaccggc

SEQ ID NO: 71649 - DNA, 25 bp, Saccharomyces pastorianus
tgatactttttctttcgagccagca

SEQ ID NO: 71650 - DNA, 25 bp, Saccharomyces pastorianus
aatctccagtataccccaaatttca

SEQ ID NO: 71651 - DNA, 25 bp, Saccharomyces pastorianus
aactgggatgtatgcctccaatctc

SEQ ID NO: 71652 - DNA, 25 bp, Saccharomyces pastorianus
aacagcaaccagtccaattggccgg

SEQ ID NO: 71653 - DNA, 25 bp, Saccharomyces pastorianus
gaacccatttacgttgcagcaagct

SEQ ID NO: 71654 - DNA, 25 bp, Saccharomyces pastorianus
aacagttaacccatttcaagcacaa

SEQ ID NO: 71655 - DNA, 25 bp, Saccharomyces pastorianus
aacccgtttggctcgcaacaacaag

SEQ ID NO: 71656 - DNA, 25 bp, Saccharomyces pastorianus
aggcgtctgtaatctcttggaagtc

SEQ ID NO: 71657 - DNA, 25 bp, Saccharomyces pastorianus
tctgtaatctcttggaagtcacggg

SEQ ID NO: 71658 - DNA, 25 bp, Saccharomyces pastorianus
tggtccacgccgtatctgacaacct

SEQ ID NO: 71659 - DNA, 25 bp, Saccharomyces pastorianus
gagaatggggtccacgtatttttgt

SEQ ID NO: 71660 - DNA, 25 bp, Saccharomyces pastorianus
tcacgggggttcgaagtgcccatga

SEQ ID NO: 71661 - DNA, 25 bp, Saccharomyces pastorianus
accttacgtccaaggcgtctgtaat

SEQ ID NO: 71662 - DNA, 25 bp, Saccharomyces pastorianus
gtatctgacaaccttacgtccaagg

SEQ ID NO: 71663 - DNA, 25 bp, Saccharomyces pastorianus
gggagccatctttatcttggtcgcc

SEQ ID NO: 71664 - DNA, 25 bp, Saccharomyces pastorianus
acgtccaaggcgtctgtaatctctt

SEQ ID NO: 71665 - DNA, 25 bp, Saccharomyces pastorianus
tgacaaccttacgtccaaggcgtct

SEQ ID NO: 71666 - DNA, 25 bp, Saccharomyces pastorianus
gcgtctgtaatctcttggaagtcac

SEQ ID NO: 71667 - DNA, 25 bp, Saccharomyces pastorianus
ggacatggatcctgaagctgccttc

SEQ ID NO: 71668 - DNA, 25 bp, Saccharomyces pastorianus
cctgccgattttgccaagctacaag

SEQ ID NO: 71669 - DNA, 25 bp, Saccharomyces pastorianus
gtcctatcagatacaagcagtcacg

SEQ ID NO: 71670 - DNA, 25 bp, Saccharomyces pastorianus
gaaattgcttccacccgtattttga

SEQ ID NO: 71671 - DNA, 25 bp, Saccharomyces pastorianus
acccgtattttgactcctgccgatt

SEQ ID NO: 71672 - DNA, 25 bp, Saccharomyces pastorianus
cgacttggaactaagcggcgacgat

SEQ ID NO: 71673 - DNA, 25 bp, Saccharomyces pastorianus
gattcaaacacactaactggtccta

SEQ ID NO: 71674 - DNA, 25 bp, Saccharomyces pastorianus
aatgttcgttccactaccaatagag

SEQ ID NO: 71675 - DNA, 25 bp, Saccharomyces pastorianus
ggtaagcgtgacaatgttcgttcca

SEQ ID NO: 71676 - DNA, 25 bp, Saccharomyces pastorianus
atgggtgttcacaagcaggacagac

SEQ ID NO: 71677 - DNA, 25 bp, Saccharomyces pastorianus
gaagagctagtcgattcaaacacac

SEQ ID NO: 71678 - DNA, 25 bp, Saccharomyces pastorianus
ataaaggagcttgtaccccatctgg

SEQ ID NO: 71679 - DNA, 25 bp, Saccharomyces pastorianus
attttccagactcgaacaggcgcta

SEQ ID NO: 71680 - DNA, 25 bp, Saccharomyces pastorianus
aagaccatctttcagtccattgctg

SEQ ID NO: 71681 - DNA, 25 bp, Saccharomyces pastorianus
ggtccaaagaagcttggcctcacat

SEQ ID NO: 71682 - DNA, 25 bp, Saccharomyces pastorianus
cggtgctccggttgatatcttaata

SEQ ID NO: 71683 - DNA, 25 bp, Saccharomyces pastorianus
agggtcaggccactacgtcaagatg

SEQ ID NO: 71684 - DNA, 25 bp, Saccharomyces pastorianus
gcaaggtatcctctttgtaggttct

SEQ ID NO: 71685 - DNA, 25 bp, Saccharomyces pastorianus
cattgctgctaagtccgatggcgag

SEQ ID NO: 71686 - DNA, 25 bp, Saccharomyces pastorianus
gaccatggttttaccgtagttgcgt

SEQ ID NO: 71687 - DNA, 25 bp, Saccharomyces pastorianus
ttatcattgacggtggtaactccca

SEQ ID NO: 71688 - DNA, 25 bp, Saccharomyces pastorianus
gctcttgattaaagccggtgctccg

SEQ ID NO: 71689 - DNA, 25 bp, Saccharomyces pastorianus
caaaggcttattcataccacgggta

SEQ ID NO: 71690 - DNA, 25 bp, Saccharomyces pastorianus
gatagttcacaggaggatacgctta

SEQ ID NO: 71691 - DNA, 25 bp, Saccharomyces pastorianus
gctcaagcgatggttctgaagtgca

SEQ ID NO: 71692 - DNA, 25 bp, Saccharomyces pastorianus
ttcccaaggccacccagtatttgat

SEQ ID NO: 71693 - DNA, 25 bp, Saccharomyces pastorianus
cgcgtccgccgaatttgaagaactt

SEQ ID NO: 71694 - DNA, 25 bp, Saccharomyces pastorianus
aaacggtgacgtacttcaatgggat

SEQ ID NO: 71695 - DNA, 25 bp, Saccharomyces pastorianus
aagattcaggtgcactactacagga

SEQ ID NO: 71696 - DNA, 25 bp, Saccharomyces pastorianus
ttggaggcaataaaccccgcgtccg

SEQ ID NO: 71697 - DNA, 25 bp, Saccharomyces pastorianus
gatacttgggctgggctcaagcgat

SEQ ID NO: 71698 - DNA, 25 bp, Saccharomyces pastorianus
gcgagataaacctactgacacaatg

SEQ ID NO: 71699 - DNA, 25 bp, Saccharomyces pastorianus
gatattatcgtccttgagactcaaa

SEQ ID NO: 71700 - DNA, 25 bp, Saccharomyces pastorianus
gtattccaattgtcctgtgtatgtt

SEQ ID NO: 71701 - DNA, 25 bp, Saccharomyces pastorianus
tacgccagattatccgatgtctttg

SEQ ID NO: 71702 - DNA, 25 bp, Saccharomyces pastorianus
gttacacatgcaatgggtcgccaga

SEQ ID NO: 71703 - DNA, 25 bp, Saccharomyces pastorianus
gattgccggtaacgtcacttccagg

SEQ ID NO: 71704 - DNA, 25 bp, Saccharomyces pastorianus
gttgcatttcttggttcccattgac

SEQ ID NO: 71705 - DNA, 25 bp, Saccharomyces pastorianus
gtaccatcattcaatctcaggctta

SEQ ID NO: 71706 - DNA, 25 bp, Saccharomyces pastorianus
atcttccctctatcatgtattccaa

SEQ ID NO: 71707 - DNA, 25 bp, Saccharomyces pastorianus
aacgccggttatgttggagtcatct

SEQ ID NO: 71708 - DNA, 25 bp, Saccharomyces pastorianus
tctatccgatttctcctctttaaaa

SEQ ID NO: 71709 - DNA, 25 bp, Saccharomyces pastorianus
cgcccacttggccatttattatcaa

SEQ ID NO: 71710 - DNA, 25 bp, Saccharomyces pastorianus
tatgctgctggtgcgatattctata

SEQ ID NO: 71711 - DNA, 25 bp, Saccharomyces pastorianus
agtggagttagcgatgtcgttcttc

SEQ ID NO: 71712 - DNA, 25 bp, Saccharomyces pastorianus
atatactcgtcagcgtcagcgatgg

SEQ ID NO: 71713 - DNA, 25 bp, Saccharomyces pastorianus
agcagattgagcctgttgcgctcct

SEQ ID NO: 71714 - DNA, 25 bp, Saccharomyces pastorianus
gagttagcgatgtcgttcttcacgc

SEQ ID NO: 71715 - DNA, 25 bp, Saccharomyces pastorianus
cgttcttcacgctaaatagcagatt

SEQ ID NO: 71716 - DNA, 25 bp, Saccharomyces pastorianus
attgagcctgttgcgctcctgctgg

SEQ ID NO: 71717 - DNA, 25 bp, Saccharomyces pastorianus
tactcgtcagcgtcagcgatgggag

SEQ ID NO: 71718 - DNA, 25 bp, Saccharomyces pastorianus
agcgatgtcgttcttcacgctaaat

SEQ ID NO: 71719 - DNA, 25 bp, Saccharomyces pastorianus
aatagcagattgagcctgttgcgct

SEQ ID NO: 71720 - DNA, 25 bp, Saccharomyces pastorianus
tccgtagtggagttagcgatgtcgt

SEQ ID NO: 71721 - DNA, 25 bp, Saccharomyces pastorianus
gatgtcgttcttcacgctaaatagc

SEQ ID NO: 71722 - DNA, 25 bp, Saccharomyces pastorianus
actccgtctgggtctcgagcgagat

SEQ ID NO: 71723 - DNA, 25 bp, Saccharomyces pastorianus
tggtctgcgcgaacgtggagtactt

SEQ ID NO: 71724 - DNA, 25 bp, Saccharomyces pastorianus
ggccttgcccctgatagttatgaaa

SEQ ID NO: 71725 - DNA, 25 bp, Saccharomyces pastorianus
gagcgagatggccttgcccctgata

SEQ ID NO: 71726 - DNA, 25 bp, Saccharomyces pastorianus
agctgcgtgtctattgccttctctt

SEQ ID NO: 71727 - DNA, 25 bp, Saccharomyces pastorianus
gttatgaaagatggttgtgagctca

SEQ ID NO: 71728 - DNA, 25 bp, Saccharomyces pastorianus
tctgcgcgaacgtggagtacttcga

SEQ ID NO: 71729 - DNA, 25 bp, Saccharomyces pastorianus
aggagagactccgtctgggtctcga

SEQ ID NO: 71730 - DNA, 25 bp, Saccharomyces pastorianus
agtacttcgagaggagagactccgt

SEQ ID NO: 71731 - DNA, 25 bp, Saccharomyces pastorianus
ttctgagctggtggtctgcgcgaac

SEQ ID NO: 71732 - DNA, 25 bp, Saccharomyces pastorianus
tcttccccagtctgttctgagctgg

SEQ ID NO: 71733 - DNA, 25 bp, Saccharomyces pastorianus
atggtgagcgcatctagccttgcaa

SEQ ID NO: 71734 - DNA, 25 bp, Saccharomyces pastorianus
aatccagcacgacggagagctctgt

SEQ ID NO: 71735 - DNA, 25 bp, Saccharomyces pastorianus
gtagtagtagcacgagcactgtccc

SEQ ID NO: 71736 - DNA, 25 bp, Saccharomyces pastorianus
gtgaacctgcagacatcactgatgt

SEQ ID NO: 71737 - DNA, 25 bp, Saccharomyces pastorianus
gtgacttccgtgcaaaccaaggact

SEQ ID NO: 71738 - DNA, 25 bp, Saccharomyces pastorianus
tcaagtacatccacatcgagcacga

SEQ ID NO: 71739 - DNA, 25 bp, Saccharomyces pastorianus
aagcacgagcattatctctacgcca

SEQ ID NO: 71740 - DNA, 25 bp, Saccharomyces pastorianus
gactcaaacgtctcggaattcactt

SEQ ID NO: 71741 - DNA, 25 bp, Saccharomyces pastorianus
acaagcgcgacctcgtcaagtacat

SEQ ID NO: 71742 - DNA, 25 bp, Saccharomyces pastorianus
gaattcacttcgaggtatttcacca

SEQ ID NO: 71743 - DNA, 25 bp, Saccharomyces pastorianus
gagagctctgtgactacaacggcat

SEQ ID NO: 71744 - DNA, 25 bp, Saccharomyces pastorianus
gacacaagacactttcccttataac

SEQ ID NO: 71745 - DNA, 25 bp, Saccharomyces pastorianus
tataccggcaacattcactcactga

SEQ ID NO: 71746 - DNA, 25 bp, Saccharomyces pastorianus
catagtattagatcaccacccggtg

SEQ ID NO: 71747 - DNA, 25 bp, Saccharomyces pastorianus
aattcctcgcatttacagttacggc

SEQ ID NO: 71748 - DNA, 25 bp, Saccharomyces pastorianus
aagcattttttggaacgagctgaaa

SEQ ID NO: 71749 - DNA, 25 bp, Saccharomyces pastorianus
aaaagaatcgactccaccagggcta

SEQ ID NO: 71750 - DNA, 25 bp, Saccharomyces pastorianus
atgatcactcattttgcagaaggtt

SEQ ID NO: 71751 - DNA, 25 bp, Saccharomyces pastorianus
tcaatagtaccactttgggcgggtt

SEQ ID NO: 71752 - DNA, 25 bp, Saccharomyces pastorianus
tgaaactcacaactctacctttgtg

SEQ ID NO: 71753 - DNA, 25 bp, Saccharomyces pastorianus
gggcagtttcgagagagtttcatac

SEQ ID NO: 71754 - DNA, 25 bp, Saccharomyces pastorianus
gcacaaccgctcaactaaatctatt

SEQ ID NO: 71755 - DNA, 25 bp, Saccharomyces pastorianus
aggcattgacgttcagagtccccgt

SEQ ID NO: 71756 - DNA, 25 bp, Saccharomyces pastorianus
gtccccgattttggcaggatccata

SEQ ID NO: 71757 - DNA, 25 bp, Saccharomyces pastorianus
cgtgcctggtaatgccgctatagaa

SEQ ID NO: 71758 - DNA, 25 bp, Saccharomyces pastorianus
tttatatccgtcaacttcactggcg

SEQ ID NO: 71759 - DNA, 25 bp, Saccharomyces pastorianus
gtcactattgctggcaccattatca

SEQ ID NO: 71760 - DNA, 25 bp, Saccharomyces pastorianus
ggacccagcagccttgtcactattg

SEQ ID NO: 71761 - DNA, 25 bp, Saccharomyces pastorianus
ggtcctaggcaatcgtaatccgtca

SEQ ID NO: 71762 - DNA, 25 bp, Saccharomyces pastorianus
aacaactacattgtcgtcgtcctgg

SEQ ID NO: 71763 - DNA, 25 bp, Saccharomyces pastorianus
attatcaagagtgtgcgtgcctggt

SEQ ID NO: 71764 - DNA, 25 bp, Saccharomyces pastorianus
accgccgttgttattggacccagca

SEQ ID NO: 71765 - DNA, 25 bp, Saccharomyces pastorianus
tgccgtcattctgtaaggcattgac

SEQ ID NO: 71766 - DNA, 25 bp, Saccharomyces pastorianus
aagcattctctttataagccttgga

SEQ ID NO: 71767 - DNA, 25 bp, Saccharomyces pastorianus
gaggctagaagtgctttcatttccc

SEQ ID NO: 71768 - DNA, 25 bp, Saccharomyces pastorianus
gtgctttcatttcccaattttcttt

SEQ ID NO: 71769 - DNA, 25 bp, Saccharomyces pastorianus
gatcttggccgatgacagtatagtt

SEQ ID NO: 71770 - DNA, 25 bp, Saccharomyces pastorianus
taaaatacacctccaagtcccaaga

SEQ ID NO: 71771 - DNA, 25 bp, Saccharomyces pastorianus
aaacaaggaattctcattgaccact

SEQ ID NO: 71772 - DNA, 25 bp, Saccharomyces pastorianus
ctactccagtagcaatcagaacaca

SEQ ID NO: 71773 - DNA, 25 bp, Saccharomyces pastorianus
aactgtttacaaagcttacgaggct

SEQ ID NO: 71774 - DNA, 25 bp, Saccharomyces pastorianus
aagaagccagtttgaccgctgtcaa

SEQ ID NO: 71775 - DNA, 25 bp, Saccharomyces pastorianus
tcatttaccggtacttctaaatcct

SEQ ID NO: 71776 - DNA, 25 bp, Saccharomyces pastorianus
actaatgggtgtcaaggcttacaac

SEQ ID NO: 71777 - DNA, 25 bp, Saccharomyces pastorianus
cgggcaggttcatgacatagtgact

SEQ ID NO: 71778 - DNA, 25 bp, Saccharomyces pastorianus
ttgcccaagaacgagatggcgctgt

SEQ ID NO: 71779 - DNA, 25 bp, Saccharomyces pastorianus
tttgaagcgcggttgctgttgttgt

SEQ ID NO: 71780 - DNA, 25 bp, Saccharomyces pastorianus
cgggaacagggatcttaatcgtgcc

SEQ ID NO: 71781 - DNA, 25 bp, Saccharomyces pastorianus
aagatgccgcggaagttgcccaaga

SEQ ID NO: 71782 - DNA, 25 bp, Saccharomyces pastorianus
gatcggcacttctttgaagcgcggt

SEQ ID NO: 71783 - DNA, 25 bp, Saccharomyces pastorianus
agctgggatcggcacttctttgaag

SEQ ID NO: 71784 - DNA, 25 bp, Saccharomyces pastorianus
gtttcctggcgggaacagggatctt

SEQ ID NO: 71785 - DNA, 25 bp, Saccharomyces pastorianus
actgattcgagctgggatcggcact

SEQ ID NO: 71786 - DNA, 25 bp, Saccharomyces pastorianus
acatagtgactgattcgagctggga

SEQ ID NO: 71787 - DNA, 25 bp, Saccharomyces pastorianus
gcgctgtcgggcaggttcatgacat

SEQ ID NO: 71788 - DNA, 25 bp, Saccharomyces pastorianus
actttcatttgcatacggattgcag

SEQ ID NO: 71789 - DNA, 25 bp, Saccharomyces pastorianus
gcatattcactttcatttgcatacg

SEQ ID NO: 71790 - DNA, 25 bp, Saccharomyces pastorianus
cctggtttgataaggtctacgcttt

SEQ ID NO: 71791 - DNA, 25 bp, Saccharomyces pastorianus
ctacgcttttgcatgcatattcact

SEQ ID NO: 71792 - DNA, 25 bp, Saccharomyces pastorianus
attcctggtttgataaggtctacgc

SEQ ID NO: 71793 - DNA, 25 bp, Saccharomyces pastorianus
ttcactttcatttgcatacggattg

SEQ ID NO: 71794 - DNA, 25 bp, Saccharomyces pastorianus
tttactgttccaaacgttgttatag

SEQ ID NO: 71795 - DNA, 25 bp, Saccharomyces pastorianus
acgttgttatagattcctggtttga

SEQ ID NO: 71796 - DNA, 25 bp, Saccharomyces pastorianus
gaactattgggagaaaaatttactg

SEQ ID NO: 71797 - DNA, 25 bp, Saccharomyces pastorianus
catacggattgcagagcggaagctt

SEQ ID NO: 71798 - DNA, 25 bp, Saccharomyces pastorianus
gttccaaacgttgttatagattcct

SEQ ID NO: 71799 - DNA, 25 bp, Saccharomyces pastorianus
tcggaccctttagcaatcactattg

SEQ ID NO: 71800 - DNA, 25 bp, Saccharomyces pastorianus
ggtcagtaccaccatctcatacgtt

SEQ ID NO: 71801 - DNA, 25 bp, Saccharomyces pastorianus
gtaaagttccaaattcttgcgctct

SEQ ID NO: 71802 - DNA, 25 bp, Saccharomyces pastorianus
aacatgatctcgactctttgacaaa

SEQ ID NO: 71803 - DNA, 25 bp, Saccharomyces pastorianus
aaatacctcacatcatataccactc

SEQ ID NO: 71804 - DNA, 25 bp, Saccharomyces pastorianus
ttgctacatcagtctccgcaggtaa

SEQ ID NO: 71805 - DNA, 25 bp, Saccharomyces pastorianus
ctttgttgtctctctgcggtcagta

SEQ ID NO: 71806 - DNA, 25 bp, Saccharomyces pastorianus
ggttttaccgtatactgtcttcata

SEQ ID NO: 71807 - DNA, 25 bp, Saccharomyces pastorianus
ttcttgcgctctttgccatgcaaaa

SEQ ID NO: 71808 - DNA, 25 bp, Saccharomyces pastorianus
tgaaaacgcggcatcggacccttta

SEQ ID NO: 71809 - DNA, 25 bp, Saccharomyces pastorianus
acgttgtgactcttttgcctgtaaa

SEQ ID NO: 71810 - DNA, 25 bp, Saccharomyces pastorianus
gtcagaccccaactttagaaatata

SEQ ID NO: 71811 - DNA, 25 bp, Saccharomyces pastorianus
acttcaatgtcagaccccaacttta

SEQ ID NO: 71812 - DNA, 25 bp, Saccharomyces pastorianus
gtaaatccctattatggacaacgga

SEQ ID NO: 71813 - DNA, 25 bp, Saccharomyces pastorianus
atggcataagctacgtagcacttca

SEQ ID NO: 71814 - DNA, 25 bp, Saccharomyces pastorianus
ctggccactgtttcaagtttatact

SEQ ID NO: 71815 - DNA, 25 bp, Saccharomyces pastorianus
ttatatggcataagctacgtagcac

SEQ ID NO: 71816 - DNA, 25 bp, Saccharomyces pastorianus
ggccactgtttcaagtttatactat

SEQ ID NO: 71817 - DNA, 25 bp, Saccharomyces pastorianus
aattttttggttatatggcataagc

SEQ ID NO: 71818 - DNA, 25 bp, Saccharomyces pastorianus
agctacgtagcacttcaatgtcaga

SEQ ID NO: 71819 - DNA, 25 bp, Saccharomyces pastorianus
gtagcacttcaatgtcagaccccaa

SEQ ID NO: 71820 - DNA, 25 bp, Saccharomyces pastorianus
ccctattatggacaacggacgccta

SEQ ID NO: 71821 - DNA, 25 bp, Saccharomyces pastorianus
caattcttattgcaattctaagcta

SEQ ID NO: 71822 - DNA, 25 bp, Saccharomyces pastorianus
gctttgtcaattcttattgcaattc

SEQ ID NO: 71823 - DNA, 25 bp, Saccharomyces pastorianus
gtatcgctttgtcaattcttattgc

SEQ ID NO: 71824 - DNA, 25 bp, Saccharomyces pastorianus
tcgctttgtcaattcttattgcaat

SEQ ID NO: 71825 - DNA, 25 bp, Saccharomyces pastorianus
gacaagtatcgctttgtcaattctt

SEQ ID NO: 71826 - DNA, 25 bp, Saccharomyces pastorianus
atcgctttgtcaattcttattgcaa

SEQ ID NO: 71827 - DNA, 25 bp, Saccharomyces pastorianus
tcttattgcaattctaagctatatc

SEQ ID NO: 71828 - DNA, 25 bp, Saccharomyces pastorianus
caagtatcgctttgtcaattcttat

SEQ ID NO: 71829 - DNA, 25 bp, Saccharomyces pastorianus
agtatcgctttgtcaattcttattg

SEQ ID NO: 71830 - DNA, 25 bp, Saccharomyces pastorianus
tgcaattctaagctatatcaatatc

SEQ ID NO: 71831 - DNA, 25 bp, Saccharomyces pastorianus
gtcaattcttattgcaattctaagc

SEQ ID NO: 71832 - DNA, 25 bp, Saccharomyces pastorianus
tattaatcttactccagccattctt

SEQ ID NO: 71833 - DNA, 25 bp, Saccharomyces pastorianus
agaggcctattctttgacaagcaaa

SEQ ID NO: 71834 - DNA, 25 bp, Saccharomyces pastorianus
gacagctatcattctatcgttcata

SEQ ID NO: 71835 - DNA, 25 bp, Saccharomyces pastorianus
ttgccctctcataaagtcctacaat

SEQ ID NO: 71836 - DNA, 25 bp, Saccharomyces pastorianus
aaagtcctacaatctctgcgagttc

SEQ ID NO: 71837 - DNA, 25 bp, Saccharomyces pastorianus
ttgggtgtggcccttgacagctatc

SEQ ID NO: 71838 - DNA, 25 bp, Saccharomyces pastorianus
aagtgggctctctatttgacatcat

SEQ ID NO: 71839 - DNA, 25 bp, Saccharomyces pastorianus
ttccgtatccggagtgttcatgtac

SEQ ID NO: 71840 - DNA, 25 bp, Saccharomyces pastorianus
aacagctctggttcaaagtgggctc

SEQ ID NO: 71841 - DNA, 25 bp, Saccharomyces pastorianus
acaagtggtcctacgaacagctctg

SEQ ID NO: 71842 - DNA, 25 bp, Saccharomyces pastorianus
ttacacagaatattccttgccctct

SEQ ID NO: 71843 - DNA, 25 bp, Saccharomyces pastorianus
gagctatttagaaacacaattaacc

SEQ ID NO: 71844 - DNA, 25 bp, Saccharomyces pastorianus
gactaagacattcgaactgatttct

SEQ ID NO: 71845 - DNA, 25 bp, Saccharomyces pastorianus
gacattcgaactgatttctgcagaa

SEQ ID NO: 71846 - DNA, 25 bp, Saccharomyces pastorianus
ctgactaagacattcgaactgattt

SEQ ID NO: 71847 - DNA, 25 bp, Saccharomyces pastorianus
taagacattcgaactgatttctgca

SEQ ID NO: 71848 - DNA, 25 bp, Saccharomyces pastorianus
atcaagaaatgaacagtagtctgac

SEQ ID NO: 71849 - DNA, 25 bp, Saccharomyces pastorianus
agacattcgaactgatttctgcaga

SEQ ID NO: 71850 - DNA, 25 bp, Saccharomyces pastorianus
gaaatgaacagtagtctgactaaga

SEQ ID NO: 71851 - DNA, 25 bp, Saccharomyces pastorianus
gtagtctgactaagacattcgaact

SEQ ID NO: 71852 - DNA, 25 bp, Saccharomyces pastorianus
gtctgactaagacattcgaactgat

SEQ ID NO: 71853 - DNA, 25 bp, Saccharomyces pastorianus
agaaacacaattaaccaaaagacag

SEQ ID NO: 71854 - DNA, 25 bp, Saccharomyces pastorianus
cagctgctgctgttgtctagtgaga

SEQ ID NO: 71855 - DNA, 25 bp, Saccharomyces pastorianus
aagccggcagccaatgactctagag

SEQ ID NO: 71856 - DNA, 25 bp, Saccharomyces pastorianus
ggacaaagccaagcagtatgacaat

SEQ ID NO: 71857 - DNA, 25 bp, Saccharomyces pastorianus
aagagcatcatttccaacgtcttgg

SEQ ID NO: 71858 - DNA, 25 bp, Saccharomyces pastorianus
attcgaaaacgataagccggcagcc

SEQ ID NO: 71859 - DNA, 25 bp, Saccharomyces pastorianus
tatgcatatgtgttgagctctttga

SEQ ID NO: 71860 - DNA, 25 bp, Saccharomyces pastorianus
aattcgaaccctctataagcaagaa

SEQ ID NO: 71861 - DNA, 25 bp, Saccharomyces pastorianus
aaaccgttggatgaacagctgctgc

SEQ ID NO: 71862 - DNA, 25 bp, Saccharomyces pastorianus
aaagacatgtctcccatactaaatg

SEQ ID NO: 71863 - DNA, 25 bp, Saccharomyces pastorianus
gctctttgatgtttgctagtatgaa

SEQ ID NO: 71864 - DNA, 25 bp, Saccharomyces pastorianus
agatttaactaaccgctatgcatat

SEQ ID NO: 71865 - DNA, 25 bp, Saccharomyces pastorianus
caagccttttatggtgcagacgatc

SEQ ID NO: 71866 - DNA, 25 bp, Saccharomyces pastorianus
gcaatggaatgctgcagtctcgcca

SEQ ID NO: 71867 - DNA, 25 bp, Saccharomyces pastorianus
tgaagacctcactcatccggaaaag

SEQ ID NO: 71868 - DNA, 25 bp, Saccharomyces pastorianus
tatcctccgaatacgttttatcctc

SEQ ID NO: 71869 - DNA, 25 bp, Saccharomyces pastorianus
tgcagtctcgccatacaattcaaga

SEQ ID NO: 71870 - DNA, 25 bp, Saccharomyces pastorianus
gtcagcaatgttcccattcatgcag

SEQ ID NO: 71871 - DNA, 25 bp, Saccharomyces pastorianus
taaagaattttcgatgccaaccccg

SEQ ID NO: 71872 - DNA, 25 bp, Saccharomyces pastorianus
attcaagagcgccatctactactac

SEQ ID NO: 71873 - DNA, 25 bp, Saccharomyces pastorianus
gccaaccccggattcgaatactttg

SEQ ID NO: 71874 - DNA, 25 bp, Saccharomyces pastorianus
tgcagacgatcttttctttccttct

SEQ ID NO: 71875 - DNA, 25 bp, Saccharomyces pastorianus
attatagatcaacacccgggtcagc

SEQ ID NO: 71876 - DNA, 25 bp, Saccharomyces pastorianus
tatgattcttcctctgaaaagcctc

SEQ ID NO: 71877 - DNA, 25 bp, Saccharomyces pastorianus
gactatttccctgtatcggttgagt

SEQ ID NO: 71878 - DNA, 25 bp, Saccharomyces pastorianus
atatcaattatctgtggcgcccact

SEQ ID NO: 71879 - DNA, 25 bp, Saccharomyces pastorianus
aagagagtctatgcccgtgaattcc

SEQ ID NO: 71880 - DNA, 25 bp, Saccharomyces pastorianus
gaaaatgcgtttgacccatttcctc

SEQ ID NO: 71881 - DNA, 25 bp, Saccharomyces pastorianus
gtgccagcatcttcatcaagacagc

SEQ ID NO: 71882 - DNA, 25 bp, Saccharomyces pastorianus
gtgactgtgacaaaccagccacttt

SEQ ID NO: 71883 - DNA, 25 bp, Saccharomyces pastorianus
tgaacccgctttatcattctcatat

SEQ ID NO: 71884 - DNA, 25 bp, Saccharomyces pastorianus
tagcagcttcccctcaaattaatga

SEQ ID NO: 71885 - DNA, 25 bp, Saccharomyces pastorianus
aaatctgacgattcgcccacaaagt

SEQ ID NO: 71886 - DNA, 25 bp, Saccharomyces pastorianus
agaaccatctcacgttttatccaag

SEQ ID NO: 71887 - DNA, 25 bp, Saccharomyces pastorianus
tactccgtgggtatcgtgattcaaa

SEQ ID NO: 71888 - DNA, 25 bp, Saccharomyces pastorianus
aaatcggcctagtcattgtggtcgt

SEQ ID NO: 71889 - DNA, 25 bp, Saccharomyces pastorianus
gagaaatcaggcaactctaccgcac

SEQ ID NO: 71890 - DNA, 25 bp, Saccharomyces pastorianus
cgatttccggtttcgtcagacaaag

SEQ ID NO: 71891 - DNA, 25 bp, Saccharomyces pastorianus
cccctagagggatctgctactgtga

SEQ ID NO: 71892 - DNA, 25 bp, Saccharomyces pastorianus
tatctttccaacgtcaggaccggtt

SEQ ID NO: 71893 - DNA, 25 bp, Saccharomyces pastorianus
gtcagatttgctgttcgtgtccatc

SEQ ID NO: 71894 - DNA, 25 bp, Saccharomyces pastorianus
ggaaccactcgtgctaacggtacaa

SEQ ID NO: 71895 - DNA, 25 bp, Saccharomyces pastorianus
cggttataacgctccacatggtggt

SEQ ID NO: 71896 - DNA, 25 bp, Saccharomyces pastorianus
gtgagcacgaactctaactcttata

SEQ ID NO: 71897 - DNA, 25 bp, Saccharomyces pastorianus
attgtggtcgtcatttactccgtgg

SEQ ID NO: 71898 - DNA, 25 bp, Saccharomyces pastorianus
ttagtttccaaaaggcactcgtcag

SEQ ID NO: 71899 - DNA, 25 bp, Saccharomyces pastorianus
aaggagcagctctatcaatgcaaac

SEQ ID NO: 71900 - DNA, 25 bp, Saccharomyces pastorianus
gcactcgtcagtgattgcaccataa

SEQ ID NO: 71901 - DNA, 25 bp, Saccharomyces pastorianus
gaagcaccccaattactagagcaag

SEQ ID NO: 71902 - DNA, 25 bp, Saccharomyces pastorianus
gaattcgaagttgactctcagcagg

SEQ ID NO: 71903 - DNA, 25 bp, Saccharomyces pastorianus
atagttatggcagccgccgaagcac

SEQ ID NO: 71904 - DNA, 25 bp, Saccharomyces pastorianus
gagccagtcattacatctgacagca

SEQ ID NO: 71905 - DNA, 25 bp, Saccharomyces pastorianus
gcaagacctagaaggagcagctcta

SEQ ID NO: 71906 - DNA, 25 bp, Saccharomyces pastorianus
gagaccacggaacgaagtttgccgt

SEQ ID NO: 71907 - DNA, 25 bp, Saccharomyces pastorianus
tgcaccataatgacggagaccacgg

SEQ ID NO: 71908 - DNA, 25 bp, Saccharomyces pastorianus
cagcaatagttatggcagccgccga

SEQ ID NO: 71909 - DNA, 25 bp, Saccharomyces pastorianus
gagtaactctcaggtgaatggacac

SEQ ID NO: 71910 - DNA, 25 bp, Saccharomyces pastorianus
tggtcctgctttccgaactagtaat

SEQ ID NO: 71911 - DNA, 25 bp, Saccharomyces pastorianus
aaggcgggcatcttctactttaagc

SEQ ID NO: 71912 - DNA, 25 bp, Saccharomyces pastorianus
tgatgattgcaataccggtgatggt

SEQ ID NO: 71913 - DNA, 25 bp, Saccharomyces pastorianus
agttatttatatccctgttcctggt

SEQ ID NO: 71914 - DNA, 25 bp, Saccharomyces pastorianus
agggttatatcgttggacctacaga

SEQ ID NO: 71915 - DNA, 25 bp, Saccharomyces pastorianus
gattttacgacggatttgtctcaaa

SEQ ID NO: 71916 - DNA, 25 bp, Saccharomyces pastorianus
agtagatcagtttctctcgcagaga

SEQ ID NO: 71917 - DNA, 25 bp, Saccharomyces pastorianus
gatattaacggtagccatgttcatg

SEQ ID NO: 71918 - DNA, 25 bp, Saccharomyces pastorianus
atacggttcatgtttgcagtagtca

SEQ ID NO: 71919 - DNA, 25 bp, Saccharomyces pastorianus
acaagagcgcaattgctgggatagc

SEQ ID NO: 71920 - DNA, 25 bp, Saccharomyces pastorianus
agaatttgcaggagtttttcttcaa

SEQ ID NO: 71921 - DNA, 25 bp, Saccharomyces pastorianus
aatagacatttgatggcacatgacc

SEQ ID NO: 71922 - DNA, 25 bp, Saccharomyces pastorianus
ataggttcacttttgaggacagctc

SEQ ID NO: 71923 - DNA, 25 bp, Saccharomyces pastorianus
tgccattcagggaccccaggaggat

SEQ ID NO: 71924 - DNA, 25 bp, Saccharomyces pastorianus
ggacagctctgcgttgtttagggac

SEQ ID NO: 71925 - DNA, 25 bp, Saccharomyces pastorianus
cgcacctttaactgacgattatgat

SEQ ID NO: 71926 - DNA, 25 bp, Saccharomyces pastorianus
ggaccccaggaggattatagtaagt

SEQ ID NO: 71927 - DNA, 25 bp, Saccharomyces pastorianus
gatggcacatgaccaggcagtgttt

SEQ ID NO: 71928 - DNA, 25 bp, Saccharomyces pastorianus
gaaggacgtctgatcatagatgaca

SEQ ID NO: 71929 - DNA, 25 bp, Saccharomyces pastorianus
gtttagggacgtgatcgcaccttta

SEQ ID NO: 71930 - DNA, 25 bp, Saccharomyces pastorianus
actaatacaagatacgatgcctaat

SEQ ID NO: 71931 - DNA, 25 bp, Saccharomyces pastorianus
gacgctcgtgtcatccgtttagaaa

SEQ ID NO: 71932 - DNA, 25 bp, Saccharomyces pastorianus
aagatatttgctcccggtttgcggc

SEQ ID NO: 71933 - DNA, 25 bp, Saccharomyces pastorianus
aagagctcctagtggtgcttctcag

SEQ ID NO: 71934 - DNA, 25 bp, Saccharomyces pastorianus
agtcctggagttggctgacatcacc

SEQ ID NO: 71935 - DNA, 25 bp, Saccharomyces pastorianus
atttcttgaggctaaccatcgctta

SEQ ID NO: 71936 - DNA, 25 bp, Saccharomyces pastorianus
gaaactgaatcttaccaagccggcc

SEQ ID NO: 71937 - DNA, 25 bp, Saccharomyces pastorianus
tttttgaccttggataccgacgctc

SEQ ID NO: 71938 - DNA, 25 bp, Saccharomyces pastorianus
agccggccaattcagcgtcatggaa

SEQ ID NO: 71939 - DNA, 25 bp, Saccharomyces pastorianus
gccattgtctattccaccataaggg

SEQ ID NO: 71940 - DNA, 25 bp, Saccharomyces pastorianus
gctctcctttatcgttgctaacaga

SEQ ID NO: 71941 - DNA, 25 bp, Saccharomyces pastorianus
ccgccggcatgtttatcatcatcaa

SEQ ID NO: 71942 - DNA, 25 bp, Saccharomyces pastorianus
tccaagtgcgccgtggtgaacgagt

SEQ ID NO: 71943 - DNA, 25 bp, Saccharomyces pastorianus
gaattcttcaatcatcacggtggtg

SEQ ID NO: 71944 - DNA, 25 bp, Saccharomyces pastorianus
aatgcagcagcggtggcagacctct

SEQ ID NO: 71945 - DNA, 25 bp, Saccharomyces pastorianus
agacctctagtttccgcgtattgga

SEQ ID NO: 71946 - DNA, 25 bp, Saccharomyces pastorianus
aatcctggcaaccatgtctttggta

SEQ ID NO: 71947 - DNA, 25 bp, Saccharomyces pastorianus
acatggagtcgttggagccaccgga

SEQ ID NO: 71948 - DNA, 25 bp, Saccharomyces pastorianus
tttgggttctcgttgaagggcgtct

SEQ ID NO: 71949 - DNA, 25 bp, Saccharomyces pastorianus
aaggctgggcggttaatcctggcaa

SEQ ID NO: 71950 - DNA, 25 bp, Saccharomyces pastorianus
tggtctcatcgcagagggtctcgaa

SEQ ID NO: 71951 - DNA, 25 bp, Saccharomyces pastorianus
gacaggatcacgtcccagtttgaat

SEQ ID NO: 71952 - DNA, 25 bp, Saccharomyces pastorianus
ttttcaagtcaatggcctcgatcgg

SEQ ID NO: 71953 - DNA, 25 bp, Saccharomyces pastorianus
gttccccaagtctgacacagtttca

SEQ ID NO: 71954 - DNA, 25 bp, Saccharomyces pastorianus
gatgtcaacgacagtacgtggtagc

SEQ ID NO: 71955 - DNA, 25 bp, Saccharomyces pastorianus
attagttagtatattctccatggca

SEQ ID NO: 71956 - DNA, 25 bp, Saccharomyces pastorianus
gcaggaggagcaacacattatagaa

SEQ ID NO: 71957 - DNA, 25 bp, Saccharomyces pastorianus
tcaacattcgtaacgttccccaagt

SEQ ID NO: 71958 - DNA, 25 bp, Saccharomyces pastorianus
gaaggtcagttatttcattctcata

SEQ ID NO: 71959 - DNA, 25 bp, Saccharomyces pastorianus
taacgttccccaagtctgacacagt

SEQ ID NO: 71960 - DNA, 25 bp, Saccharomyces pastorianus
gacacagtttcagcaggaggagcaa

SEQ ID NO: 71961 - DNA, 25 bp, Saccharomyces pastorianus
acgacagtacgtggtagcaatcggc

SEQ ID NO: 71962 - DNA, 25 bp, Saccharomyces pastorianus
gttatttcattctcatattagttag

SEQ ID NO: 71963 - DNA, 25 bp, Saccharomyces pastorianus
tcttctctatcatcaacattcgtaa

SEQ ID NO: 71964 - DNA, 25 bp, Saccharomyces pastorianus
ttttttctattctccttaaccgatg

SEQ ID NO: 71965 - DNA, 25 bp, Saccharomyces pastorianus
tatccagtcactttggcaaattcag

SEQ ID NO: 71966 - DNA, 25 bp, Saccharomyces pastorianus
agttgtctcttctaccactgaaaaa

SEQ ID NO: 71967 - DNA, 25 bp, Saccharomyces pastorianus
tgctgtctacaccaaaacacttgcg

SEQ ID NO: 71968 - DNA, 25 bp, Saccharomyces pastorianus
tccaatggcgttgtctacagttatg

SEQ ID NO: 71969 - DNA, 25 bp, Saccharomyces pastorianus
tattctccttaaccgatgccaacaa

SEQ ID NO: 71970 - DNA, 25 bp, Saccharomyces pastorianus
gtcaaactctttacttccaatggcg

SEQ ID NO: 71971 - DNA, 25 bp, Saccharomyces pastorianus
aactaccagagtatatccagtcact

SEQ ID NO: 71972 - DNA, 25 bp, Saccharomyces pastorianus
gtggtcaaaacaatttcctatacaa

SEQ ID NO: 71973 - DNA, 25 bp, Saccharomyces pastorianus
ttgcgcctgcaagagttgtggtcaa

SEQ ID NO: 71974 - DNA, 25 bp, Saccharomyces pastorianus
gcaaattcagttgtctcttctacca

SEQ ID NO: 71975 - DNA, 25 bp, Saccharomyces pastorianus
ggtgtcgacttcattgttcagcagc

SEQ ID NO: 71976 - DNA, 25 bp, Saccharomyces pastorianus
aagccaaggaatggtgccggaacct

SEQ ID NO: 71977 - DNA, 25 bp, Saccharomyces pastorianus
gtttcacaagtggacaagctgctga

SEQ ID NO: 71978 - DNA, 25 bp, Saccharomyces pastorianus
gttgcttactgggacattctattgc

SEQ ID NO: 71979 - DNA, 25 bp, Saccharomyces pastorianus
gatacgagtaggctggtttcacaag

SEQ ID NO: 71980 - DNA, 25 bp, Saccharomyces pastorianus
gccggaaccttctctggcagttaat

SEQ ID NO: 71981 - DNA, 25 bp, Saccharomyces pastorianus
atcaccagggtttggttcgggacag

SEQ ID NO: 71982 - DNA, 25 bp, Saccharomyces pastorianus
gtcaacgagcattttttggtcaatt

SEQ ID NO: 71983 - DNA, 25 bp, Saccharomyces pastorianus
accgaggtcacctccgtagagagga

SEQ ID NO: 71984 - DNA, 25 bp, Saccharomyces pastorianus
gttcagtattttatcaccgaggtca

SEQ ID NO: 71985 - DNA, 25 bp, Saccharomyces pastorianus
tttgatgcctgaagttcccagaaga

SEQ ID NO: 71986 - DNA, 25 bp, Saccharomyces pastorianus
ggccgagcttttcatcacaaatcaa

SEQ ID NO: 71987 - DNA, 25 bp, Saccharomyces pastorianus
agtaaggctttagtagtctcacaaa

SEQ ID NO: 71988 - DNA, 25 bp, Saccharomyces pastorianus
gatcaaaatcgtcatcatcgtgtag

SEQ ID NO: 71989 - DNA, 25 bp, Saccharomyces pastorianus
gtcaagagctgaccgtatcgaaaga

SEQ ID NO: 71990 - DNA, 25 bp, Saccharomyces pastorianus
caagcacggccatggtaatcgaaat

SEQ ID NO: 71991 - DNA, 25 bp, Saccharomyces pastorianus
gataaatgatttgaaggccgagctt

SEQ ID NO: 71992 - DNA, 25 bp, Saccharomyces pastorianus
gatggagcacagctcactgagccaa

SEQ ID NO: 71993 - DNA, 25 bp, Saccharomyces pastorianus
tccgtatcgtctaaccaagaggaaa

SEQ ID NO: 71994 - DNA, 25 bp, Saccharomyces pastorianus
acgagggttctaacgatgccagtaa

SEQ ID NO: 71995 - DNA, 25 bp, Saccharomyces pastorianus
agggcgaaccctacagtgatcaaaa

SEQ ID NO: 71996 - DNA, 25 bp, Saccharomyces pastorianus
gaaaagctatcctctgaatatcatg

SEQ ID NO: 71997 - DNA, 25 bp, Saccharomyces pastorianus
gctccaccgcaacaacgtaacgtat

SEQ ID NO: 71998 - DNA, 25 bp, Saccharomyces pastorianus
ggaagacaccttctgatgcatccaa

SEQ ID NO: 71999 - DNA, 25 bp, Saccharomyces pastorianus
gatcaaacttcagaactctccattt

SEQ ID NO: 72000 - DNA, 25 bp, Saccharomyces pastorianus
ggaaatcatcctaacgccaataaga

SEQ ID NO: 72001 - DNA, 25 bp, Saccharomyces pastorianus
atgcatccaactctgaccaatctag

SEQ ID NO: 72002 - DNA, 25 bp, Saccharomyces pastorianus
gtcaactcctccgagtgagaagttt

SEQ ID NO: 72003 - DNA, 25 bp, Saccharomyces pastorianus
gttgcttctgcagactctagagatc

SEQ ID NO: 72004 - DNA, 25 bp, Saccharomyces pastorianus
gaatcaaggatccaaccgactgcag

SEQ ID NO: 72005 - DNA, 25 bp, Saccharomyces pastorianus
aaaaggacgtcaattctcacaagga

SEQ ID NO: 72006 - DNA, 25 bp, Saccharomyces pastorianus
gtaacgtatcaggaccatctaccac

SEQ ID NO: 72007 - DNA, 25 bp, Saccharomyces pastorianus
ctaccactcttcataagcaagcttc

SEQ ID NO: 72008 - DNA, 25 bp, Saccharomyces pastorianus
tcccgtgtagctggttcttaattgt

SEQ ID NO: 72009 - DNA, 25 bp, Saccharomyces pastorianus
gtggtggcggcaaagcagcctctaa

SEQ ID NO: 72010 - DNA, 25 bp, Saccharomyces pastorianus
ggtacttcaaagtcacctggaggtg

SEQ ID NO: 72011 - DNA, 25 bp, Saccharomyces pastorianus
cttcaagttcatatccaggtggcgg

SEQ ID NO: 72012 - DNA, 25 bp, Saccharomyces pastorianus
ataccatcactatttggtggctgta

SEQ ID NO: 72013 - DNA, 25 bp, Saccharomyces pastorianus
gaattgtttggttcttcaagttcat

SEQ ID NO: 72014 - DNA, 25 bp, Saccharomyces pastorianus
aaaggtggctcgataggtacttcaa

SEQ ID NO: 72015 - DNA, 25 bp, Saccharomyces pastorianus
tcttaattgtggtggtgttctcgaa

SEQ ID NO: 72016 - DNA, 25 bp, Saccharomyces pastorianus
gtgttctcgaatccatcgatgtctg

SEQ ID NO: 72017 - DNA, 25 bp, Saccharomyces pastorianus
ggtggtaagtcttcgtgttcttcaa

SEQ ID NO: 72018 - DNA, 25 bp, Saccharomyces pastorianus
ttcaatttccttttcccgtgtagct

SEQ ID NO: 72019 - DNA, 25 bp, Saccharomyces pastorianus
cgatgttgtcgctccagctttcgtc

SEQ ID NO: 72020 - DNA, 25 bp, Saccharomyces pastorianus
tcaaggctaacttggatgtcaagaa

SEQ ID NO: 72021 - DNA, 25 bp, Saccharomyces pastorianus
tgtcaagaaccaatccgctgtcgat

SEQ ID NO: 72022 - DNA, 25 bp, Saccharomyces pastorianus
ccaatccgctgtcgatgacttcttg

SEQ ID NO: 72023 - DNA, 25 bp, Saccharomyces pastorianus
gatgtcaagaaccaatccgctgtcg

SEQ ID NO: 72024 - DNA, 25 bp, Saccharomyces pastorianus
agaaccaatccgctgtcgatgactt

SEQ ID NO: 72025 - DNA, 25 bp, Saccharomyces pastorianus
gaacgtcaacgatgttgtcgctcca

SEQ ID NO: 72026 - DNA, 25 bp, Saccharomyces pastorianus
tcaagaaccaatccgctgtcgatga

SEQ ID NO: 72027 - DNA, 25 bp, Saccharomyces pastorianus
acgtcaacgatgttgtcgctccagc

SEQ ID NO: 72028 - DNA, 25 bp, Saccharomyces pastorianus
aaccaatccgctgtcgatgacttct

SEQ ID NO: 72029 - DNA, 25 bp, Saccharomyces pastorianus
tcaacgatgttgtcgctccagcttt

SEQ ID NO: 72030 - DNA, 25 bp, Saccharomyces pastorianus
gtgtgtcctcttttgttgatggcag

SEQ ID NO: 72031 - DNA, 25 bp, Saccharomyces pastorianus
ggaccgggacacatgagttcttctg

SEQ ID NO: 72032 - DNA, 25 bp, Saccharomyces pastorianus
ttctgctcctattccttcaaatatg

SEQ ID NO: 72033 - DNA, 25 bp, Saccharomyces pastorianus
gtagcacctccactgatgtattctt

SEQ ID NO: 72034 - DNA, 25 bp, Saccharomyces pastorianus
ataatgctggcgctcaatctgggtt

SEQ ID NO: 72035 - DNA, 25 bp, Saccharomyces pastorianus
cctgccaatttacaagcccatagag

SEQ ID NO: 72036 - DNA, 25 bp, Saccharomyces pastorianus
agtctcacagtccatgatctactat

SEQ ID NO: 72037 - DNA, 25 bp, Saccharomyces pastorianus
aaatagttctgccagtgtgtcctct

SEQ ID NO: 72038 - DNA, 25 bp, Saccharomyces pastorianus
gatgcctcctgtatattcaatgcta

SEQ ID NO: 72039 - DNA, 25 bp, Saccharomyces pastorianus
ggatccaacggtcattgtcgtcttc

SEQ ID NO: 72040 - DNA, 25 bp, Saccharomyces pastorianus
aagtggcgatccgtactacccaaga

SEQ ID NO: 72041 - DNA, 25 bp, Saccharomyces pastorianus
gaaaatatgcattttaccagcactt

SEQ ID NO: 72042 - DNA, 25 bp, Saccharomyces pastorianus
atgctgcccctattacaagaaccga

SEQ ID NO: 72043 - DNA, 25 bp, Saccharomyces pastorianus
cacctcctgtacagtatccagatgt

SEQ ID NO: 72044 - DNA, 25 bp, Saccharomyces pastorianus
atgagctccaatgttctccaacctc

SEQ ID NO: 72045 - DNA, 25 bp, Saccharomyces pastorianus
gtatccagatgttcttgcaccaaaa

SEQ ID NO: 72046 - DNA, 25 bp, Saccharomyces pastorianus
caatccaaatgctgcccctattaca

SEQ ID NO: 72047 - DNA, 25 bp, Saccharomyces pastorianus
acagtatccagatgttcttgcacca

SEQ ID NO: 72048 - DNA, 25 bp, Saccharomyces pastorianus
ttaccagcacttcgcatgagtgttc

SEQ ID NO: 72049 - DNA, 25 bp, Saccharomyces pastorianus
agcacttcgcatgagtgttccacct

SEQ ID NO: 72050 - DNA, 25 bp, Saccharomyces pastorianus
gcattttaccagcacttcgcatgag

SEQ ID NO: 72051 - DNA, 25 bp, Saccharomyces pastorianus
tgagtgttccacctcctgtacagta

SEQ ID NO: 72052 - DNA, 25 bp, Saccharomyces pastorianus
catcgatgatgatgtcgcccttttc

SEQ ID NO: 72053 - DNA, 25 bp, Saccharomyces pastorianus
gcccttttccagaagtgggacaatt

SEQ ID NO: 72054 - DNA, 25 bp, Saccharomyces pastorianus
ttccttgatcaaggcgtcgactgga

SEQ ID NO: 72055 - DNA, 25 bp, Saccharomyces pastorianus
cttgatcaaggcgtcgactggagca

SEQ ID NO: 72056 - DNA, 25 bp, Saccharomyces pastorianus
gaagtgggacaatttccttgatcaa

SEQ ID NO: 72057 - DNA, 25 bp, Saccharomyces pastorianus
cgatgatgatgtcgcccttttccag

SEQ ID NO: 72058 - DNA, 25 bp, Saccharomyces pastorianus
atgtcgcccttttccagaagtggga

SEQ ID NO: 72059 - DNA, 25 bp, Saccharomyces pastorianus
gatgatgtcgcccttttccagaagt

SEQ ID NO: 72060 - DNA, 25 bp, Saccharomyces pastorianus
gtcgcccttttccagaagtgggaca

SEQ ID NO: 72061 - DNA, 25 bp, Saccharomyces pastorianus
tgatgtcgcccttttccagaagtgg

SEQ ID NO: 72062 - DNA, 25 bp, Saccharomyces pastorianus
gtgggacaatttccttgatcaaggc

SEQ ID NO: 72063 - DNA, 25 bp, Saccharomyces pastorianus
ctacgtcgttttcggcgaagccaag

SEQ ID NO: 72064 - DNA, 25 bp, Saccharomyces pastorianus
agatgttgctaccaagtctccagaa

SEQ ID NO: 72065 - DNA, 25 bp, Saccharomyces pastorianus
aaatcactttctttgtccttctcgg

SEQ ID NO: 72066 - DNA, 25 bp, Saccharomyces pastorianus
aagcccacaacggtgatttagtcaa

SEQ ID NO: 72067 - DNA, 25 bp, Saccharomyces pastorianus
aagctagtggtatcatgccatccaa

SEQ ID NO: 72068 - DNA, 25 bp, Saccharomyces pastorianus
tcaaaagctagctgctgcccaacaa

SEQ ID NO: 72069 - DNA, 25 bp, Saccharomyces pastorianus
taacgtctcccaaaacgaagccatc

SEQ ID NO: 72070 - DNA, 25 bp, Saccharomyces pastorianus
aagccaaggtcgacaacttcactca

SEQ ID NO: 72071 - DNA, 25 bp, Saccharomyces pastorianus
cgacgccggcgacttgaacaaggac

SEQ ID NO: 72072 - DNA, 25 bp, Saccharomyces pastorianus
cagtgtcaacgctgctttggaagaa

SEQ ID NO: 72073 - DNA, 25 bp, Saccharomyces pastorianus
agctgacatgcaagctgctgctgaa

SEQ ID NO: 72074 - DNA, 25 bp, Saccharomyces pastorianus
aagcccttctgccaacaacgagagc

SEQ ID NO: 72075 - DNA, 25 bp, Saccharomyces pastorianus
aatgaaagcccttctgccaacaacg

SEQ ID NO: 72076 - DNA, 25 bp, Saccharomyces pastorianus
gccaacaacgagagcaacacaaata

SEQ ID NO: 72077 - DNA, 25 bp, Saccharomyces pastorianus
gcccttctgccaacaacgagagcaa

SEQ ID NO: 72078 - DNA, 25 bp, Saccharomyces pastorianus
aacgaaaagacaacaatgaaccaat

SEQ ID NO: 72079 - DNA, 25 bp, Saccharomyces pastorianus
ttctgccaacaacgagagcaacaca

SEQ ID NO: 72080 - DNA, 25 bp, Saccharomyces pastorianus
acgagagcaacacaaataaagatat

SEQ ID NO: 72081 - DNA, 25 bp, Saccharomyces pastorianus
aaacagaaacagagatagcaagaaa

SEQ ID NO: 72082 - DNA, 25 bp, Saccharomyces pastorianus
aagataagcctaattctataacggg

SEQ ID NO: 72083 - DNA, 25 bp, Saccharomyces pastorianus
ggaatgaaagcccttctgccaacaa

SEQ ID NO: 72084 - DNA, 25 bp, Saccharomyces pastorianus
tgaaagcccttctgccaacaacgag

SEQ ID NO: 72085 - DNA, 25 bp, Saccharomyces pastorianus
aacacaggtgtttcattaccggcat

SEQ ID NO: 72086 - DNA, 25 bp, Saccharomyces pastorianus
gttaatctctaatgacagtcgccca

SEQ ID NO: 72087 - DNA, 25 bp, Saccharomyces pastorianus
acagtcgcccagctagttcaaataa

SEQ ID NO: 72088 - DNA, 25 bp, Saccharomyces pastorianus
cagcagctgataacaaggtcccttc

SEQ ID NO: 72089 - DNA, 25 bp, Saccharomyces pastorianus
gagaagccttctattgttaccaaat

SEQ ID NO: 72090 - DNA, 25 bp, Saccharomyces pastorianus
tgccgctactagttttaacacaggt

SEQ ID NO: 72091 - DNA, 25 bp, Saccharomyces pastorianus
gaactatggaatagcccctcgaagg

SEQ ID NO: 72092 - DNA, 25 bp, Saccharomyces pastorianus
attcaggttgctttacattgtctag

SEQ ID NO: 72093 - DNA, 25 bp, Saccharomyces pastorianus
actgttgatacagcgggcccaaatg

SEQ ID NO: 72094 - DNA, 25 bp, Saccharomyces pastorianus
ggtgaagtaccctctgataccgatt

SEQ ID NO: 72095 - DNA, 25 bp, Saccharomyces pastorianus
atttagtatccaacctgcctttgca

SEQ ID NO: 72096 - DNA, 25 bp, Saccharomyces pastorianus
gggtgatgttgagcttattactaaa

SEQ ID NO: 72097 - DNA, 25 bp, Saccharomyces pastorianus
aagctgcttggcatatatcttatgg

SEQ ID NO: 72098 - DNA, 25 bp, Saccharomyces pastorianus
aaatattggctaaccctgatactcc

SEQ ID NO: 72099 - DNA, 25 bp, Saccharomyces pastorianus
cattgggccttttcagtttgataaa

SEQ ID NO: 72100 - DNA, 25 bp, Saccharomyces pastorianus
ggttaggcatctcattgggcctttt

SEQ ID NO: 72101 - DNA, 25 bp, Saccharomyces pastorianus
attgctgataacttaatggagcgcc

SEQ ID NO: 72102 - DNA, 25 bp, Saccharomyces pastorianus
cttccttgggagaaactaaatggca

SEQ ID NO: 72103 - DNA, 25 bp, Saccharomyces pastorianus
atggagcgccagaaacttccttggg

SEQ ID NO: 72104 - DNA, 25 bp, Saccharomyces pastorianus
taaccctgatactccaaagacgatg

SEQ ID NO: 72105 - DNA, 25 bp, Saccharomyces pastorianus
gagcttattactaaaggtgtctttt

SEQ ID NO: 72106 - DNA, 25 bp, Saccharomyces pastorianus
gggacccagaagagcagtttataga

SEQ ID NO: 72107 - DNA, 25 bp, Saccharomyces pastorianus
agctggcaactatatcgatgctatc

SEQ ID NO: 72108 - DNA, 25 bp, Saccharomyces pastorianus
gctagaattccaagcaagactacaa

SEQ ID NO: 72109 - DNA, 25 bp, Saccharomyces pastorianus
gggactgtttaaatccttcagacga

SEQ ID NO: 72110 - DNA, 25 bp, Saccharomyces pastorianus
gactttgaccaaaacatcttctatg

SEQ ID NO: 72111 - DNA, 25 bp, Saccharomyces pastorianus
atttcttccataaatgtctaccgag

SEQ ID NO: 72112 - DNA, 25 bp, Saccharomyces pastorianus
aatgtctaccgagggatacttctga

SEQ ID NO: 72113 - DNA, 25 bp, Saccharomyces pastorianus
cgatgctatcatttgtttccagaaa

SEQ ID NO: 72114 - DNA, 25 bp, Saccharomyces pastorianus
aattcatcttctgggtctagacttg

SEQ ID NO: 72115 - DNA, 25 bp, Saccharomyces pastorianus
aaggtacctgaagttattagacgat

SEQ ID NO: 72116 - DNA, 25 bp, Saccharomyces pastorianus
agagctcgttgataagttcacataa

SEQ ID NO: 72117 - DNA, 25 bp, Saccharomyces pastorianus
gggatacttctgacccagagacgaa

SEQ ID NO: 72118 - DNA, 25 bp, Saccharomyces pastorianus
ttcgccttcctcttcgttaggcacg

SEQ ID NO: 72119 - DNA, 25 bp, Saccharomyces pastorianus
tgtggaaattcctctatcctcttca

SEQ ID NO: 72120 - DNA, 25 bp, Saccharomyces pastorianus
gaaattcctctatcctcttcaacca

SEQ ID NO: 72121 - DNA, 25 bp, Saccharomyces pastorianus
ttaggcacgttttccacgtcagcgt

SEQ ID NO: 72122 - DNA, 25 bp, Saccharomyces pastorianus
taataaccatttgggcttgctgcct

SEQ ID NO: 72123 - DNA, 25 bp, Saccharomyces pastorianus
atcgctaggttcaacagggccattc

SEQ ID NO: 72124 - DNA, 25 bp, Saccharomyces pastorianus
gttttccacgtcagcgtttgaaagg

SEQ ID NO: 72125 - DNA, 25 bp, Saccharomyces pastorianus
taggcggttcatcgctaggttcaac

SEQ ID NO: 72126 - DNA, 25 bp, Saccharomyces pastorianus
tagctttaaaagtagtctgtggaaa

SEQ ID NO: 72127 - DNA, 25 bp, Saccharomyces pastorianus
tcttcgttaggcacgttttccacgt

SEQ ID NO: 72128 - DNA, 25 bp, Saccharomyces pastorianus
atttgggcttgctgccttcgccttc

SEQ ID NO: 72129 - DNA, 25 bp, Saccharomyces pastorianus
agaacaattccctgggctcatgcaa

SEQ ID NO: 72130 - DNA, 25 bp, Saccharomyces pastorianus
tattacgccctcacgtgataacgat

SEQ ID NO: 72131 - DNA, 25 bp, Saccharomyces pastorianus
aacgatccgcacaacgtcgaagaac

SEQ ID NO: 72132 - DNA, 25 bp, Saccharomyces pastorianus
aatactgtggatgacagatcacctg

SEQ ID NO: 72133 - DNA, 25 bp, Saccharomyces pastorianus
tgggctcatgcaactgactttcaaa

SEQ ID NO: 72134 - DNA, 25 bp, Saccharomyces pastorianus
ctgactttcaaaggccaacagttaa

SEQ ID NO: 72135 - DNA, 25 bp, Saccharomyces pastorianus
gataacgatccgcacaacgtcgaag

SEQ ID NO: 72136 - DNA, 25 bp, Saccharomyces pastorianus
gaaggtcttctgtatttgaaaacat

SEQ ID NO: 72137 - DNA, 25 bp, Saccharomyces pastorianus
gcataccgtgggaccttcaggagaa

SEQ ID NO: 72138 - DNA, 25 bp, Saccharomyces pastorianus
ttcaagaacaattccctgggctcat

SEQ ID NO: 72139 - DNA, 25 bp, Saccharomyces pastorianus
ccttcaggagaaggtcttctgtatt

SEQ ID NO: 72140 - DNA, 25 bp, Saccharomyces pastorianus
atatggcgctacttgccgtatatgt

SEQ ID NO: 72141 - DNA, 25 bp, Saccharomyces pastorianus
catgcatgagtcctgtttgctggaa

SEQ ID NO: 72142 - DNA, 25 bp, Saccharomyces pastorianus
atttccaaacctggcgcggatgtga

SEQ ID NO: 72143 - DNA, 25 bp, Saccharomyces pastorianus
tatacggttacgatcggactctaga

SEQ ID NO: 72144 - DNA, 25 bp, Saccharomyces pastorianus
gagaagatacccttttccttactat

SEQ ID NO: 72145 - DNA, 25 bp, Saccharomyces pastorianus
tgatgctagacggatcttcgcctta

SEQ ID NO: 72146 - DNA, 25 bp, Saccharomyces pastorianus
tgggctggctgctgtattatacata

SEQ ID NO: 72147 - DNA, 25 bp, Saccharomyces pastorianus
tatgtcgtggagacgctaccgacga

SEQ ID NO: 72148 - DNA, 25 bp, Saccharomyces pastorianus
ctctttttcacccttgcaaatgcaa

SEQ ID NO: 72149 - DNA, 25 bp, Saccharomyces pastorianus
tttggctataactattgggctggct

SEQ ID NO: 72150 - DNA, 25 bp, Saccharomyces pastorianus
gccgccaacgatgatgtgccatatg

SEQ ID NO: 72151 - DNA, 25 bp, Saccharomyces pastorianus
gctacccattccagcaaacaggact

SEQ ID NO: 72152 - DNA, 25 bp, Saccharomyces pastorianus
ttccagcaaacaggactcatgcatg

SEQ ID NO: 72153 - DNA, 25 bp, Saccharomyces pastorianus
tacccattccagcaaacaggactca

SEQ ID NO: 72154 - DNA, 25 bp, Saccharomyces pastorianus
agctacccattccagcaaacaggac

SEQ ID NO: 72155 - DNA, 25 bp, Saccharomyces pastorianus
acccattccagcaaacaggactcat

SEQ ID NO: 72156 - DNA, 25 bp, Saccharomyces pastorianus
cccattccagcaaacaggactcatg

SEQ ID NO: 72157 - DNA, 25 bp, Saccharomyces pastorianus
cacatccgcgccaggtttggaaatg

SEQ ID NO: 72158 - DNA, 25 bp, Saccharomyces pastorianus
cattccagcaaacaggactcatgca

SEQ ID NO: 72159 - DNA, 25 bp, Saccharomyces pastorianus
ccattccagcaaacaggactcatgc

SEQ ID NO: 72160 - DNA, 25 bp, Saccharomyces pastorianus
tcacatccgcgccaggtttggaaat

SEQ ID NO: 72161 - DNA, 25 bp, Saccharomyces pastorianus
attccagcaaacaggactcatgcat

SEQ ID NO: 72162 - DNA, 25 bp, Saccharomyces pastorianus
gctacccattccagcaaacaggact

SEQ ID NO: 72163 - DNA, 25 bp, Saccharomyces pastorianus
ttccagcaaacaggactcatgcatg

SEQ ID NO: 72164 - DNA, 25 bp, Saccharomyces pastorianus
tacccattccagcaaacaggactca

SEQ ID NO: 72165 - DNA, 25 bp, Saccharomyces pastorianus
agctacccattccagcaaacaggac

SEQ ID NO: 72166 - DNA, 25 bp, Saccharomyces pastorianus
gtctatatttttcgaagctacccat

SEQ ID NO: 72167 - DNA, 25 bp, Saccharomyces pastorianus
acccattccagcaaacaggactcat

SEQ ID NO: 72168 - DNA, 25 bp, Saccharomyces pastorianus
cccattccagcaaacaggactcatg

SEQ ID NO: 72169 - DNA, 25 bp, Saccharomyces pastorianus
cacatccgcgccaggtttggaaatg

SEQ ID NO: 72170 - DNA, 25 bp, Saccharomyces pastorianus
cattccagcaaacaggactcatgca

SEQ ID NO: 72171 - DNA, 25 bp, Saccharomyces pastorianus
tcacatccgcgccaggtttggaaat

SEQ ID NO: 72172 - DNA, 25 bp, Saccharomyces pastorianus
attccagcaaacaggactcatgcat

SEQ ID NO: 72173 - DNA, 25 bp, Saccharomyces pastorianus
agtcaccatccatgtctttcacact

SEQ ID NO: 72174 - DNA, 25 bp, Saccharomyces pastorianus
gagtcaccatccatgtctttcacac

SEQ ID NO: 72175 - DNA, 25 bp, Saccharomyces pastorianus
tctagtttccttgattcaattggta

SEQ ID NO: 72176 - DNA, 25 bp, Saccharomyces pastorianus
gtcagagtcaccatccatgtctttc

SEQ ID NO: 72177 - DNA, 25 bp, Saccharomyces pastorianus
atgtcagagtcaccatccatgtctt

SEQ ID NO: 72178 - DNA, 25 bp, Saccharomyces pastorianus
acttctagtttccttgattcaattg

SEQ ID NO: 72179 - DNA, 25 bp, Saccharomyces pastorianus
accatccatgtctttcacacttcta

SEQ ID NO: 72180 - DNA, 25 bp, Saccharomyces pastorianus
tgtcagagtcaccatccatgtcttt

SEQ ID NO: 72181 - DNA, 25 bp, Saccharomyces pastorianus
tcagagtcaccatccatgtctttca

SEQ ID NO: 72182 - DNA, 25 bp, Saccharomyces pastorianus
agagtcaccatccatgtctttcaca

SEQ ID NO: 72183 - DNA, 25 bp, Saccharomyces pastorianus
cttctagtttccttgattcaattgg

SEQ ID NO: 72184 - DNA, 25 bp, Saccharomyces pastorianus
gcctcttgatgtcattcagcagctt

SEQ ID NO: 72185 - DNA, 25 bp, Saccharomyces pastorianus
gttgatgtcgttgagcttcgccttc

SEQ ID NO: 72186 - DNA, 25 bp, Saccharomyces pastorianus
tgcttgatcttgtccagctcgttca

SEQ ID NO: 72187 - DNA, 25 bp, Saccharomyces pastorianus
agaactcgttctccttgttcagctg

SEQ ID NO: 72188 - DNA, 25 bp, Saccharomyces pastorianus
ttgttgatctgcacgttcaggccat

SEQ ID NO: 72189 - DNA, 25 bp, Saccharomyces pastorianus
tggccgctgtttatcatgcctatga

SEQ ID NO: 72190 - DNA, 25 bp, Saccharomyces pastorianus
gcagcttcagcgacttgatttcgtt

SEQ ID NO: 72191 - DNA, 25 bp, Saccharomyces pastorianus
gagtcgttcgagatcaggctctgta

SEQ ID NO: 72192 - DNA, 25 bp, Saccharomyces pastorianus
agcttcttgaattgcgacacgtctt

SEQ ID NO: 72193 - DNA, 25 bp, Saccharomyces pastorianus
catgcagcttgttcaggttctcgaa

SEQ ID NO: 72194 - DNA, 25 bp, Saccharomyces pastorianus
atgcggtcgcgcagcttgttgatct

SEQ ID NO: 72195 - DNA, 25 bp, Saccharomyces pastorianus
gcagctcagtatgcaagcacttgga

SEQ ID NO: 72196 - DNA, 25 bp, Saccharomyces pastorianus
gaagtttacgctactcaagatgtta

SEQ ID NO: 72197 - DNA, 25 bp, Saccharomyces pastorianus
ctggtccacaaggtactgttcaatt

SEQ ID NO: 72198 - DNA, 25 bp, Saccharomyces pastorianus
gacttccctggtttctactggaaca

SEQ ID NO: 72199 - DNA, 25 bp, Saccharomyces pastorianus
aggtcattcgcaaacagacttccct

SEQ ID NO: 72200 - DNA, 25 bp, Saccharomyces pastorianus
gctgcttccagtaccgaatcttcat

SEQ ID NO: 72201 - DNA, 25 bp, Saccharomyces pastorianus
ggttcaaaaccatctactactaaat

SEQ ID NO: 72202 - DNA, 25 bp, Saccharomyces pastorianus
gatttcacagctactttcgaagttt

SEQ ID NO: 72203 - DNA, 25 bp, Saccharomyces pastorianus
acatctttcgatttgtccactggtt

SEQ ID NO: 72204 - DNA, 25 bp, Saccharomyces pastorianus
aggtcattggtattactggtccaca

SEQ ID NO: 72205 - DNA, 25 bp, Saccharomyces pastorianus
agaatctagcacatcttcaccaagc

SEQ ID NO: 72206 - DNA, 25 bp, Saccharomyces pastorianus
cacttgttgaatcttgtctgggttc

SEQ ID NO: 72207 - DNA, 25 bp, Saccharomyces pastorianus
tatagtttggttgtcagccgcactt

SEQ ID NO: 72208 - DNA, 25 bp, Saccharomyces pastorianus
tgtcgcctttgagttctgctaatga

SEQ ID NO: 72209 - DNA, 25 bp, Saccharomyces pastorianus
aatggaattaactcttggcgaagac

SEQ ID NO: 72210 - DNA, 25 bp, Saccharomyces pastorianus
gacctttccgttcctatagatgttt

SEQ ID NO: 72211 - DNA, 25 bp, Saccharomyces pastorianus
gggcattcatttgtgtactggagtt

SEQ ID NO: 72212 - DNA, 25 bp, Saccharomyces pastorianus
tcctcttttaggttcgaattgtcgc

SEQ ID NO: 72213 - DNA, 25 bp, Saccharomyces pastorianus
tgtactggagttcacgttcgcaatg

SEQ ID NO: 72214 - DNA, 25 bp, Saccharomyces pastorianus
gtctgggttcgtgtatagagctcaa

SEQ ID NO: 72215 - DNA, 25 bp, Saccharomyces pastorianus
gatgtttcgtttgctacgacacttg

SEQ ID NO: 72216 - DNA, 25 bp, Saccharomyces pastorianus
agccgcacttggttcctcttttagg

SEQ ID NO: 72217 - DNA, 25 bp, Saccharomyces pastorianus
gtaccacttaaaggccaacaaattg

SEQ ID NO: 72218 - DNA, 25 bp, Saccharomyces pastorianus
ggttagaaccgtcacatcgacgagt

SEQ ID NO: 72219 - DNA, 25 bp, Saccharomyces pastorianus
aagatttccattaagaaccaggcta

SEQ ID NO: 72220 - DNA, 25 bp, Saccharomyces pastorianus
gtcacatcgacgagtgcaggtgcta

SEQ ID NO: 72221 - DNA, 25 bp, Saccharomyces pastorianus
aagaagtcttagtcccatgagatta

SEQ ID NO: 72222 - DNA, 25 bp, Saccharomyces pastorianus
gataatcaagccaatacttttagta

SEQ ID NO: 72223 - DNA, 25 bp, Saccharomyces pastorianus
agtgcaggtgctaaggcaaagtcaa

SEQ ID NO: 72224 - DNA, 25 bp, Saccharomyces pastorianus
ggatcgatattaaactcagtcatag

SEQ ID NO: 72225 - DNA, 25 bp, Saccharomyces pastorianus
gtcccatgagattaacggttagaac

SEQ ID NO: 72226 - DNA, 25 bp, Saccharomyces pastorianus
agaaccaggctaataagaagtctta

SEQ ID NO: 72227 - DNA, 25 bp, Saccharomyces pastorianus
cttttagtaatggtgtttggatcga

SEQ ID NO: 72228 - DNA, 25 bp, Saccharomyces pastorianus
agacccgtacgtgtggctggaaccg

SEQ ID NO: 72229 - DNA, 25 bp, Saccharomyces pastorianus
agcacggtcaccacatacaaggtgc

SEQ ID NO: 72230 - DNA, 25 bp, Saccharomyces pastorianus
atgataggccacgttgagccacttg

SEQ ID NO: 72231 - DNA, 25 bp, Saccharomyces pastorianus
taccacgagaaccattgaacacaaa

SEQ ID NO: 72232 - DNA, 25 bp, Saccharomyces pastorianus
gttgagccacttgtacagcttcagc

SEQ ID NO: 72233 - DNA, 25 bp, Saccharomyces pastorianus
tggctcctaccacgagaaccattga

SEQ ID NO: 72234 - DNA, 25 bp, Saccharomyces pastorianus
agtgggtgatcttcctccacacgta

SEQ ID NO: 72235 - DNA, 25 bp, Saccharomyces pastorianus
aacacaaagtgggtgatcttcctcc

SEQ ID NO: 72236 - DNA, 25 bp, Saccharomyces pastorianus
gtgcgtttcctgcatcggaaagcta

SEQ ID NO: 72237 - DNA, 25 bp, Saccharomyces pastorianus
ttgtacagcttcagccacgccatct

SEQ ID NO: 72238 - DNA, 25 bp, Saccharomyces pastorianus
cggaaagctacaccgctcagcgcag

SEQ ID NO: 72239 - DNA, 25 bp, Saccharomyces pastorianus
agagctctctgtttcgccaaacaag

SEQ ID NO: 72240 - DNA, 25 bp, Saccharomyces pastorianus
cttattgttatccttctccacagaa

SEQ ID NO: 72241 - DNA, 25 bp, Saccharomyces pastorianus
tcgttattcgaaacagagctctctg

SEQ ID NO: 72242 - DNA, 25 bp, Saccharomyces pastorianus
tgtttcgccaaacaagttatcgcta

SEQ ID NO: 72243 - DNA, 25 bp, Saccharomyces pastorianus
attactcgaatcttctatcacgcca

SEQ ID NO: 72244 - DNA, 25 bp, Saccharomyces pastorianus
gcaagcttattgttatccttctcca

SEQ ID NO: 72245 - DNA, 25 bp, Saccharomyces pastorianus
gctatatcgggagtgtttgtctcgt

SEQ ID NO: 72246 - DNA, 25 bp, Saccharomyces pastorianus
gggagtgtttgtctcgttattcgaa

SEQ ID NO: 72247 - DNA, 25 bp, Saccharomyces pastorianus
gttatccttctccacagaattaata

SEQ ID NO: 72248 - DNA, 25 bp, Saccharomyces pastorianus
gaatcttctatcacgccatccttct

SEQ ID NO: 72249 - DNA, 25 bp, Saccharomyces pastorianus
ccatccttcttttcagcaagcttat

SEQ ID NO: 72250 - DNA, 25 bp, Saccharomyces pastorianus
ggcgcgcgccggtgcatcgttgcgc

SEQ ID NO: 72251 - DNA, 25 bp, Saccharomyces pastorianus
gtatacgggcgagggcgcgcgccgg

SEQ ID NO: 72252 - DNA, 25 bp, Saccharomyces pastorianus
cgcgccggtgcatcgttgcgccgat

SEQ ID NO: 72253 - DNA, 25 bp, Saccharomyces pastorianus
ggtgcatcgttgcgccgatatgtgt

SEQ ID NO: 72254 - DNA, 25 bp, Saccharomyces pastorianus
cggtgcatcgttgcgccgatatgtg

SEQ ID NO: 72255 - DNA, 25 bp, Saccharomyces pastorianus
tatacgggcgagggcgcgcgccggt

SEQ ID NO: 72256 - DNA, 25 bp, Saccharomyces pastorianus
atacgggcgagggcgcgcgccggtg

SEQ ID NO: 72257 - DNA, 25 bp, Saccharomyces pastorianus
cgccggtgcatcgttgcgccgatat

SEQ ID NO: 72258 - DNA, 25 bp, Saccharomyces pastorianus
gccggtgcatcgttgcgccgatatg

SEQ ID NO: 72259 - DNA, 25 bp, Saccharomyces pastorianus
ccggtgcatcgttgcgccgatatgt

SEQ ID NO: 72260 - DNA, 25 bp, Saccharomyces pastorianus
gggcgcgcgccggtgcatcgttgcg

SEQ ID NO: 72261 - DNA, 25 bp, Saccharomyces pastorianus
aatgattgcagtatcttattggcag

SEQ ID NO: 72262 - DNA, 25 bp, Saccharomyces pastorianus
tttctttccggatgctttgtactca

SEQ ID NO: 72263 - DNA, 25 bp, Saccharomyces pastorianus
gatgctttgtactcatgtgcacctt

SEQ ID NO: 72264 - DNA, 25 bp, Saccharomyces pastorianus
taacaaaattgcaagctgctggagt

SEQ ID NO: 72265 - DNA, 25 bp, Saccharomyces pastorianus
agctggttctttctttccggatgct

SEQ ID NO: 72266 - DNA, 25 bp, Saccharomyces pastorianus
attggcccaatttcttaatgattgc

SEQ ID NO: 72267 - DNA, 25 bp, Saccharomyces pastorianus
ggagttactacccatctattttatt

SEQ ID NO: 72268 - DNA, 25 bp, Saccharomyces pastorianus
gcttaactacttctattgtaacaaa

SEQ ID NO: 72269 - DNA, 25 bp, Saccharomyces pastorianus
ctgctggagttactacccatctatt

SEQ ID NO: 72270 - DNA, 25 bp, Saccharomyces pastorianus
attatttgcttaactacttctattg

SEQ ID NO: 72271 - DNA, 25 bp, Saccharomyces pastorianus
gtactcatgtgcaccttcaaataag

SEQ ID NO: 72272 - DNA, 25 bp, Saccharomyces pastorianus
cgacgactgcgacttgtgccaagaa

SEQ ID NO: 72273 - DNA, 25 bp, Saccharomyces pastorianus
tcacttgaaaccatcactgtttttt

SEQ ID NO: 72274 - DNA, 25 bp, Saccharomyces pastorianus
ttcctcacttgaaaccatcactgtt

SEQ ID NO: 72275 - DNA, 25 bp, Saccharomyces pastorianus
tgcgaccgggaaacaaacttcctca

SEQ ID NO: 72276 - DNA, 25 bp, Saccharomyces pastorianus
acttgtgccaagaatgcgaccggga

SEQ ID NO: 72277 - DNA, 25 bp, Saccharomyces pastorianus
tcgcatatcaaacgcgcctatctta

SEQ ID NO: 72278 - DNA, 25 bp, Saccharomyces pastorianus
tttttctcgcatatcaaacgcgcct

SEQ ID NO: 72279 - DNA, 25 bp, Saccharomyces pastorianus
tcaaacgcgcctatcttagacataa

SEQ ID NO: 72280 - DNA, 25 bp, Saccharomyces pastorianus
atgatgggctcgacgactgcgactt

SEQ ID NO: 72281 - DNA, 25 bp, Saccharomyces pastorianus
gcgcctatcttagacataacaacaa

SEQ ID NO: 72282 - DNA, 25 bp, Saccharomyces pastorianus
acaaacttcctcacttgaaaccatc

SEQ ID NO: 72283 - DNA, 25 bp, Saccharomyces pastorianus
gaactcaatcgggtttagctcttga

SEQ ID NO: 72284 - DNA, 25 bp, Saccharomyces pastorianus
tgacctaaccgatgcgtccaaaatt

SEQ ID NO: 72285 - DNA, 25 bp, Saccharomyces pastorianus
gctagcgccagtatcgtcagacaga

SEQ ID NO: 72286 - DNA, 25 bp, Saccharomyces pastorianus
gaagatatccccttatctgacctaa

SEQ ID NO: 72287 - DNA, 25 bp, Saccharomyces pastorianus
ggttcaggccagttcacttttagag

SEQ ID NO: 72288 - DNA, 25 bp, Saccharomyces pastorianus
agacccagatgcttcccaaaatgac

SEQ ID NO: 72289 - DNA, 25 bp, Saccharomyces pastorianus
gaaaatgacgcgtcctccaaattta

SEQ ID NO: 72290 - DNA, 25 bp, Saccharomyces pastorianus
gagataaacctcgtcgtcgcaaaag

SEQ ID NO: 72291 - DNA, 25 bp, Saccharomyces pastorianus
aaccccgggcaattcaggtgacgag

SEQ ID NO: 72292 - DNA, 25 bp, Saccharomyces pastorianus
gtgatagcaactaccaaaccccggg

SEQ ID NO: 72293 - DNA, 25 bp, Saccharomyces pastorianus
agcaggagtgcttctggttcaggcc

SEQ ID NO: 72294 - DNA, 25 bp, Saccharomyces pastorianus
attcccctggagagattcctttaca

SEQ ID NO: 72295 - DNA, 25 bp, Saccharomyces pastorianus
gaatctgattgatacgccaggccac

SEQ ID NO: 72296 - DNA, 25 bp, Saccharomyces pastorianus
aggtatcaccattcaaagtgctgca

SEQ ID NO: 72297 - DNA, 25 bp, Saccharomyces pastorianus
gatgctttattatgccggagtcttg

SEQ ID NO: 72298 - DNA, 25 bp, Saccharomyces pastorianus
tagtgcttgcagtggccgattgagt

SEQ ID NO: 72299 - DNA, 25 bp, Saccharomyces pastorianus
ataggtatcattgcccacatcgatg

SEQ ID NO: 72300 - DNA, 25 bp, Saccharomyces pastorianus
tgctgcaatttcattcccctggaga

SEQ ID NO: 72301 - DNA, 25 bp, Saccharomyces pastorianus
acctgtccacggcaacattttcttt

SEQ ID NO: 72302 - DNA, 25 bp, Saccharomyces pastorianus
gccaggccacatagactttacattc

SEQ ID NO: 72303 - DNA, 25 bp, Saccharomyces pastorianus
gacactggcgacaccatgacagatt

SEQ ID NO: 72304 - DNA, 25 bp, Saccharomyces pastorianus
acagagcgtgtacagatggaccaga

SEQ ID NO: 72305 - DNA, 25 bp, Saccharomyces pastorianus
agaattggtccaacattttctggaa

SEQ ID NO: 72306 - DNA, 25 bp, Saccharomyces pastorianus
ggcaagtttcaatcatacagtcaaa

SEQ ID NO: 72307 - DNA, 25 bp, Saccharomyces pastorianus
gaagctcagtgcctcagtaacgatg

SEQ ID NO: 72308 - DNA, 25 bp, Saccharomyces pastorianus
aactggcagcgattatgttttccaa

SEQ ID NO: 72309 - DNA, 25 bp, Saccharomyces pastorianus
tttccaaggtgtcatcgatgttata

SEQ ID NO: 72310 - DNA, 25 bp, Saccharomyces pastorianus
aacatggaaccaggaggatcccgac

SEQ ID NO: 72311 - DNA, 25 bp, Saccharomyces pastorianus
atgacctggatagtgattctcttga

SEQ ID NO: 72312 - DNA, 25 bp, Saccharomyces pastorianus
tgcaaggcacaactactaaaccagt

SEQ ID NO: 72313 - DNA, 25 bp, Saccharomyces pastorianus
gattctcttgagcaatacaaccgtt

SEQ ID NO: 72314 - DNA, 25 bp, Saccharomyces pastorianus
ggatcccgacgcgattgttatcaat

SEQ ID NO: 72315 - DNA, 25 bp, Saccharomyces pastorianus
gtatctgcacaatcgttaaatgcct

SEQ ID NO: 72316 - DNA, 25 bp, Saccharomyces pastorianus
gcaacatgccattttcgagtgaagt

SEQ ID NO: 72317 - DNA, 25 bp, Saccharomyces pastorianus
ggttcacatttggtctaagagcatt

SEQ ID NO: 72318 - DNA, 25 bp, Saccharomyces pastorianus
gaacgcactactgatctgttgcaat

SEQ ID NO: 72319 - DNA, 25 bp, Saccharomyces pastorianus
ctgttgcaatcatcttccttatata

SEQ ID NO: 72320 - DNA, 25 bp, Saccharomyces pastorianus
ctatcgtctgcctttttcaaatcta

SEQ ID NO: 72321 - DNA, 25 bp, Saccharomyces pastorianus
gatttggtattattgcccttgaagg

SEQ ID NO: 72322 - DNA, 25 bp, Saccharomyces pastorianus
agtaatattctctaccacacgggaa

SEQ ID NO: 72323 - DNA, 25 bp, Saccharomyces pastorianus
gaggaagcccagttcttactgacga

SEQ ID NO: 72324 - DNA, 25 bp, Saccharomyces pastorianus
atgacgatccgcattttactgcgaa

SEQ ID NO: 72325 - DNA, 25 bp, Saccharomyces pastorianus
ttacggttgctcactgaacgcacta

SEQ ID NO: 72326 - DNA, 25 bp, Saccharomyces pastorianus
ttaaaagccatccacttacggttgc

SEQ ID NO: 72327 - DNA, 25 bp, Saccharomyces pastorianus
ggccaaattccaaactacacgaaga

SEQ ID NO: 72328 - DNA, 25 bp, Saccharomyces pastorianus
ggtgtgcaatttggtccatatcccc

SEQ ID NO: 72329 - DNA, 25 bp, Saccharomyces pastorianus
ggtccatatccccttttcgatgatg

SEQ ID NO: 72330 - DNA, 25 bp, Saccharomyces pastorianus
gaacccgttccattacaacgctagt

SEQ ID NO: 72331 - DNA, 25 bp, Saccharomyces pastorianus
caacgctagttcaccattaacgcta

SEQ ID NO: 72332 - DNA, 25 bp, Saccharomyces pastorianus
tagggcctaccgtatttggccaaat

SEQ ID NO: 72333 - DNA, 25 bp, Saccharomyces pastorianus
ttaacgctattcctctttcaggcat

SEQ ID NO: 72334 - DNA, 25 bp, Saccharomyces pastorianus
caggcatgccttatattattggtgt

SEQ ID NO: 72335 - DNA, 25 bp, Saccharomyces pastorianus
agacaatattcccaccatcatcgat

SEQ ID NO: 72336 - DNA, 25 bp, Saccharomyces pastorianus
tttatcaggtgtgaacccgttccat

SEQ ID NO: 72337 - DNA, 25 bp, Saccharomyces pastorianus
gaggcagcctaaggttatctctgaa

SEQ ID NO: 72338 - DNA, 25 bp, Saccharomyces pastorianus
gtgcatttggatcaagaaatactca

SEQ ID NO: 72339 - DNA, 25 bp, Saccharomyces pastorianus
ggaacagccaacaaagacaaagcaa

SEQ ID NO: 72340 - DNA, 25 bp, Saccharomyces pastorianus
tcttctggtgaggaacagccaacaa

SEQ ID NO: 72341 - DNA, 25 bp, Saccharomyces pastorianus
atactcaatcttctggtgaggaaca

SEQ ID NO: 72342 - DNA, 25 bp, Saccharomyces pastorianus
gaaatactcaatcttctggtgagga

SEQ ID NO: 72343 - DNA, 25 bp, Saccharomyces pastorianus
tcaatcttctggtgaggaacagcca

SEQ ID NO: 72344 - DNA, 25 bp, Saccharomyces pastorianus
agggtattcagtgcatttggatcaa

SEQ ID NO: 72345 - DNA, 25 bp, Saccharomyces pastorianus
ggtattcagtgcatttggatcaaga

SEQ ID NO: 72346 - DNA, 25 bp, Saccharomyces pastorianus
gtgaggaacagccaacaaagacaaa

SEQ ID NO: 72347 - DNA, 25 bp, Saccharomyces pastorianus
tgtttagggtattcagtgcatttgg

SEQ ID NO: 72348 - DNA, 25 bp, Saccharomyces pastorianus
aatcttctggtgaggaacagccaac

SEQ ID NO: 72349 - DNA, 25 bp, Saccharomyces pastorianus
tcgtggtgtacctaactctgttttc

SEQ ID NO: 72350 - DNA, 25 bp, Saccharomyces pastorianus
ctcaggttcttcgtgatcggtatca

SEQ ID NO: 72351 - DNA, 25 bp, Saccharomyces pastorianus
atgacgctcgtggtgtacctaactc

SEQ ID NO: 72352 - DNA, 25 bp, Saccharomyces pastorianus
ctttaatatcgtggcggagacgtcg

SEQ ID NO: 72353 - DNA, 25 bp, Saccharomyces pastorianus
actaggagcctcaggttcttcgtga

SEQ ID NO: 72354 - DNA, 25 bp, Saccharomyces pastorianus
gcagatggccatcggtcgactttaa

SEQ ID NO: 72355 - DNA, 25 bp, Saccharomyces pastorianus
gttcaagaactgcagatggccatcg

SEQ ID NO: 72356 - DNA, 25 bp, Saccharomyces pastorianus
ggccatcggtcgactttaatatcgt

SEQ ID NO: 72357 - DNA, 25 bp, Saccharomyces pastorianus
gatcggtatcacatcgttcaagaac

SEQ ID NO: 72358 - DNA, 25 bp, Saccharomyces pastorianus
tgttttcctccactaggagcctcag

SEQ ID NO: 72359 - DNA, 25 bp, Saccharomyces pastorianus
gtgtacctaactctgttttcctcca

SEQ ID NO: 72360 - DNA, 25 bp, Saccharomyces pastorianus
tggagcgaacaaggcggtggaaccc

SEQ ID NO: 72361 - DNA, 25 bp, Saccharomyces pastorianus
tactttttccacaggcagctggagc

SEQ ID NO: 72362 - DNA, 25 bp, Saccharomyces pastorianus
atgcgtcgtctgaagtgtccatgta

SEQ ID NO: 72363 - DNA, 25 bp, Saccharomyces pastorianus
gaatgcgtcgtctgaagtgtccatg

SEQ ID NO: 72364 - DNA, 25 bp, Saccharomyces pastorianus
tgaagtgtccatgtattccggatca

SEQ ID NO: 72365 - DNA, 25 bp, Saccharomyces pastorianus
tgtactttttccacaggcagctgga

SEQ ID NO: 72366 - DNA, 25 bp, Saccharomyces pastorianus
gcgtcgtctgaagtgtccatgtatt

SEQ ID NO: 72367 - DNA, 25 bp, Saccharomyces pastorianus
ttttccacaggcagctggagcgaac

SEQ ID NO: 72368 - DNA, 25 bp, Saccharomyces pastorianus
cacaggcagctggagcgaacaaggc

SEQ ID NO: 72369 - DNA, 25 bp, Saccharomyces pastorianus
cgtctgaagtgtccatgtattccgg

SEQ ID NO: 72370 - DNA, 25 bp, Saccharomyces pastorianus
tcctctgtactttttccacaggcag

SEQ ID NO: 72371 - DNA, 25 bp, Saccharomyces pastorianus
tgcgtcgtctgaagtgtccatgtat

SEQ ID NO: 72372 - DNA, 25 bp, Saccharomyces pastorianus
tggagcgaacaaggcggtggaaccc

SEQ ID NO: 72373 - DNA, 25 bp, Saccharomyces pastorianus
gaatgcgtcgtctgaagtgtccatg

SEQ ID NO: 72374 - DNA, 25 bp, Saccharomyces pastorianus
tgaagtgtccatgtattccggatca

SEQ ID NO: 72375 - DNA, 25 bp, Saccharomyces pastorianus
ttggctatcctctgtactttttcca

SEQ ID NO: 72376 - DNA, 25 bp, Saccharomyces pastorianus
gtattccggatcattcttggctatc

SEQ ID NO: 72377 - DNA, 25 bp, Saccharomyces pastorianus
tgtactttttccacaggcagctgga

SEQ ID NO: 72378 - DNA, 25 bp, Saccharomyces pastorianus
tttttccacaggcagctggagcgaa

SEQ ID NO: 72379 - DNA, 25 bp, Saccharomyces pastorianus
gtcgtctgaagtgtccatgtattcc

SEQ ID NO: 72380 - DNA, 25 bp, Saccharomyces pastorianus
cacaggcagctggagcgaacaaggc

SEQ ID NO: 72381 - DNA, 25 bp, Saccharomyces pastorianus
tcctctgtactttttccacaggcag

SEQ ID NO: 72382 - DNA, 25 bp, Saccharomyces pastorianus
gcaactccacgtctgctgacaaaag

SEQ ID NO: 72383 - DNA, 25 bp, Saccharomyces pastorianus
aacgattgaggcaggcttggcgcaa

SEQ ID NO: 72384 - DNA, 25 bp, Saccharomyces pastorianus
atgtacggtagtcattccttcatcc

SEQ ID NO: 72385 - DNA, 25 bp, Saccharomyces pastorianus
attcacatatctcccttcaagtaca

SEQ ID NO: 72386 - DNA, 25 bp, Saccharomyces pastorianus
gagttctagatactaacccgcgcaa

SEQ ID NO: 72387 - DNA, 25 bp, Saccharomyces pastorianus
caagggactacatcgggccattcac

SEQ ID NO: 72388 - DNA, 25 bp, Saccharomyces pastorianus
tcctgaagggattgaacggcatact

SEQ ID NO: 72389 - DNA, 25 bp, Saccharomyces pastorianus
tggtcactactgttttagccatcag

SEQ ID NO: 72390 - DNA, 25 bp, Saccharomyces pastorianus
cgagtcagcagagttgtagccgcaa

SEQ ID NO: 72391 - DNA, 25 bp, Saccharomyces pastorianus
aggccaagctggtcaattcgttaag

SEQ ID NO: 72392 - DNA, 25 bp, Saccharomyces pastorianus
gcttggcgcaaggtgtagtcgattt

SEQ ID NO: 72393 - DNA, 25 bp, Saccharomyces pastorianus
tcactggatcccatttcatatcttg

SEQ ID NO: 72394 - DNA, 25 bp, Saccharomyces pastorianus
atatcttgtttcttctgtaagtctg

SEQ ID NO: 72395 - DNA, 25 bp, Saccharomyces pastorianus
taagtctgtgaccttgctaagcgca

SEQ ID NO: 72396 - DNA, 25 bp, Saccharomyces pastorianus
tatccctcgaagtctaccagcaaca

SEQ ID NO: 72397 - DNA, 25 bp, Saccharomyces pastorianus
gtctgtgaccttgctaagcgcagta

SEQ ID NO: 72398 - DNA, 25 bp, Saccharomyces pastorianus
gaaattatccctcgaagtctaccag

SEQ ID NO: 72399 - DNA, 25 bp, Saccharomyces pastorianus
cttgctaagcgcagtattcttgaaa

SEQ ID NO: 72400 - DNA, 25 bp, Saccharomyces pastorianus
ggatcccatttcatatcttgtttct

SEQ ID NO: 72401 - DNA, 25 bp, Saccharomyces pastorianus
gtttcttctgtaagtctgtgacctt

SEQ ID NO: 72402 - DNA, 25 bp, Saccharomyces pastorianus
gtgaccttgctaagcgcagtattct

SEQ ID NO: 72403 - DNA, 25 bp, Saccharomyces pastorianus
catttcatatcttgtttcttctgta

SEQ ID NO: 72404 - DNA, 25 bp, Saccharomyces pastorianus
gccgacatgggcgtagaatgcattg

SEQ ID NO: 72405 - DNA, 25 bp, Saccharomyces pastorianus
gtgaacgaacacctggattgctaca

SEQ ID NO: 72406 - DNA, 25 bp, Saccharomyces pastorianus
gggccactccattgcctagattagg

SEQ ID NO: 72407 - DNA, 25 bp, Saccharomyces pastorianus
gtgttgcagccgtcaagggactaat

SEQ ID NO: 72408 - DNA, 25 bp, Saccharomyces pastorianus
gcctagattaggtgcgccaactcca

SEQ ID NO: 72409 - DNA, 25 bp, Saccharomyces pastorianus
gatacggtatactagtcttgaaggt

SEQ ID NO: 72410 - DNA, 25 bp, Saccharomyces pastorianus
attgatgatggtgttgcagccgtca

SEQ ID NO: 72411 - DNA, 25 bp, Saccharomyces pastorianus
aaatgctcgatttttctaagggcga

SEQ ID NO: 72412 - DNA, 25 bp, Saccharomyces pastorianus
atgcattgttgcaggtgctggtgtt

SEQ ID NO: 72413 - DNA, 25 bp, Saccharomyces pastorianus
ttgcctggtgctggtgctaccgaaa

SEQ ID NO: 72414 - DNA, 25 bp, Saccharomyces pastorianus
ttgcagttttcacttgtccgcttga

SEQ ID NO: 72415 - DNA, 25 bp, Saccharomyces pastorianus
tttcatcagtgcacttcgttcctaa

SEQ ID NO: 72416 - DNA, 25 bp, Saccharomyces pastorianus
tgaggatgactacacacgcgctgaa

SEQ ID NO: 72417 - DNA, 25 bp, Saccharomyces pastorianus
gaaccctgttagacatcacacgtaa

SEQ ID NO: 72418 - DNA, 25 bp, Saccharomyces pastorianus
gatgttaaatcctcgaagtcgttag

SEQ ID NO: 72419 - DNA, 25 bp, Saccharomyces pastorianus
tagagttgaaacacccactatatcg

SEQ ID NO: 72420 - DNA, 25 bp, Saccharomyces pastorianus
acgtaagtctcaacggcctcaattt

SEQ ID NO: 72421 - DNA, 25 bp, Saccharomyces pastorianus
atgctcaacctctctatatgtcgaa

SEQ ID NO: 72422 - DNA, 25 bp, Saccharomyces pastorianus
tatatgtcgaatgcctcttctttgg

SEQ ID NO: 72423 - DNA, 25 bp, Saccharomyces pastorianus
agagcttcaaaaggcacattccgaa

SEQ ID NO: 72424 - DNA, 25 bp, Saccharomyces pastorianus
tcttctttggctcctcaagagatat

SEQ ID NO: 72425 - DNA, 25 bp, Saccharomyces pastorianus
gccagcaagtacttctttggaaatt

SEQ ID NO: 72426 - DNA, 25 bp, Saccharomyces pastorianus
attagactcatctagctcagctgat

SEQ ID NO: 72427 - DNA, 25 bp, Saccharomyces pastorianus
gaaaaggactctattgctggcaaac

SEQ ID NO: 72428 - DNA, 25 bp, Saccharomyces pastorianus
gcgcaagagttggttgaatcctaca

SEQ ID NO: 72429 - DNA, 25 bp, Saccharomyces pastorianus
atcgccttattatcaacattcttac

SEQ ID NO: 72430 - DNA, 25 bp, Saccharomyces pastorianus
gagagtcaaatccaccaagacccaa

SEQ ID NO: 72431 - DNA, 25 bp, Saccharomyces pastorianus
gtgagtccctaaccgtttcacgtga

SEQ ID NO: 72432 - DNA, 25 bp, Saccharomyces pastorianus
gattttattggttctggttctggtt

SEQ ID NO: 72433 - DNA, 25 bp, Saccharomyces pastorianus
acgtgaacaattatcgatcgcctta

SEQ ID NO: 72434 - DNA, 25 bp, Saccharomyces pastorianus
ggttcgccattgtcctaggtgagtc

SEQ ID NO: 72435 - DNA, 25 bp, Saccharomyces pastorianus
caggtacagaattaagacgccgctt

SEQ ID NO: 72436 - DNA, 25 bp, Saccharomyces pastorianus
tggtggtgaaatccctgaatggttt

SEQ ID NO: 72437 - DNA, 25 bp, Saccharomyces pastorianus
gtctgaatgctacgatatacaatcc

SEQ ID NO: 72438 - DNA, 25 bp, Saccharomyces pastorianus
aaacgtgcctttggattttgatcaa

SEQ ID NO: 72439 - DNA, 25 bp, Saccharomyces pastorianus
tgcccgacagcaatcacaagaggtt

SEQ ID NO: 72440 - DNA, 25 bp, Saccharomyces pastorianus
aaacctatacccaatatcgttgaag

SEQ ID NO: 72441 - DNA, 25 bp, Saccharomyces pastorianus
atggcaggcgatgaacttagttatg

SEQ ID NO: 72442 - DNA, 25 bp, Saccharomyces pastorianus
gtaccaaacgttactctagatgaga

SEQ ID NO: 72443 - DNA, 25 bp, Saccharomyces pastorianus
gaacgaggccttgggaaagacagca

SEQ ID NO: 72444 - DNA, 25 bp, Saccharomyces pastorianus
gagagtttaagtagttcgccttcac

SEQ ID NO: 72445 - DNA, 25 bp, Saccharomyces pastorianus
atcagtccggtaatgatgcccgaca

SEQ ID NO: 72446 - DNA, 25 bp, Saccharomyces pastorianus
gtagttcgccttcactgaaaccaag

SEQ ID NO: 72447 - DNA, 25 bp, Saccharomyces pastorianus
gacctcaccatcaaagctgtctgaa

SEQ ID NO: 72448 - DNA, 25 bp, Saccharomyces pastorianus
attctgggtcctatcgttcgtcatt

SEQ ID NO: 72449 - DNA, 25 bp, Saccharomyces pastorianus
ggattctgggtcctatcgttcgtca

SEQ ID NO: 72450 - DNA, 25 bp, Saccharomyces pastorianus
ttccttggattctgggtcctatcgt

SEQ ID NO: 72451 - DNA, 25 bp, Saccharomyces pastorianus
tgggtcctatcgttcgtcattttaa

SEQ ID NO: 72452 - DNA, 25 bp, Saccharomyces pastorianus
ttggattctgggtcctatcgttcgt

SEQ ID NO: 72453 - DNA, 25 bp, Saccharomyces pastorianus
gtcattttaaacatcgctccatcct

SEQ ID NO: 72454 - DNA, 25 bp, Saccharomyces pastorianus
tcattttaaacatcgctccatcctt

SEQ ID NO: 72455 - DNA, 25 bp, Saccharomyces pastorianus
ttgcacaatttctgccatcttccaa

SEQ ID NO: 72456 - DNA, 25 bp, Saccharomyces pastorianus
taaacatcgctccatccttctttac

SEQ ID NO: 72457 - DNA, 25 bp, Saccharomyces pastorianus
ttaaacatcgctccatccttcttta

SEQ ID NO: 72458 - DNA, 25 bp, Saccharomyces pastorianus
ttttaaacatcgctccatccttctt

SEQ ID NO: 72459 - DNA, 25 bp, Saccharomyces pastorianus
tgtattggatgtccacgtggctgtt

SEQ ID NO: 72460 - DNA, 25 bp, Saccharomyces pastorianus
gaatactatgaccacaggccgttca

SEQ ID NO: 72461 - DNA, 25 bp, Saccharomyces pastorianus
ttccagttcctgttatatggcccat

SEQ ID NO: 72462 - DNA, 25 bp, Saccharomyces pastorianus
taaggcctgccaacggtataattta

SEQ ID NO: 72463 - DNA, 25 bp, Saccharomyces pastorianus
tcatggtctacctttttccttgcat

SEQ ID NO: 72464 - DNA, 25 bp, Saccharomyces pastorianus
acaggccgttcaccgaccgtattgt

SEQ ID NO: 72465 - DNA, 25 bp, Saccharomyces pastorianus
taccgtatcgccatgtcatggtcta

SEQ ID NO: 72466 - DNA, 25 bp, Saccharomyces pastorianus
ttatatggcccattgcacgcagaaa

SEQ ID NO: 72467 - DNA, 25 bp, Saccharomyces pastorianus
gaaaacgcggtgatgcttgtcatca

SEQ ID NO: 72468 - DNA, 25 bp, Saccharomyces pastorianus
acttcaccaagtctttcggcagagg

SEQ ID NO: 72469 - DNA, 25 bp, Saccharomyces pastorianus
gagccttctatacgttcaactactt

SEQ ID NO: 72470 - DNA, 25 bp, Saccharomyces pastorianus
gtcctcgaaactgggctgcatctcg

SEQ ID NO: 72471 - DNA, 25 bp, Saccharomyces pastorianus
tgaccagggtctttagctcgtccgt

SEQ ID NO: 72472 - DNA, 25 bp, Saccharomyces pastorianus
accggtgcgaagcaggtcttctcga

SEQ ID NO: 72473 - DNA, 25 bp, Saccharomyces pastorianus
cttgagcttgaaggcggcgtcctcg

SEQ ID NO: 72474 - DNA, 25 bp, Saccharomyces pastorianus
gagttggtcttggaagcgtcgtcca

SEQ ID NO: 72475 - DNA, 25 bp, Saccharomyces pastorianus
tcacttctccgaccttgagcttgaa

SEQ ID NO: 72476 - DNA, 25 bp, Saccharomyces pastorianus
gtcttctcgagtcctggtgcttgat

SEQ ID NO: 72477 - DNA, 25 bp, Saccharomyces pastorianus
gatatggtgatgttctcggaccggt

SEQ ID NO: 72478 - DNA, 25 bp, Saccharomyces pastorianus
gaagagcagtcggacctctccttag

SEQ ID NO: 72479 - DNA, 25 bp, Saccharomyces pastorianus
gtggcctcttgcttggatatggtga

SEQ ID NO: 72480 - DNA, 25 bp, Saccharomyces pastorianus
ttagccagcgcctcgaaggagttgg

SEQ ID NO: 72481 - DNA, 25 bp, Saccharomyces pastorianus
caaacgtgcccttggaccctacagg

SEQ ID NO: 72482 - DNA, 25 bp, Saccharomyces pastorianus
gaagttccggccgttgcgcaggttc

SEQ ID NO: 72483 - DNA, 25 bp, Saccharomyces pastorianus
agatcagcttgtcgtgctggtacgc

SEQ ID NO: 72484 - DNA, 25 bp, Saccharomyces pastorianus
atcgccacccttgatgaagtacgag

SEQ ID NO: 72485 - DNA, 25 bp, Saccharomyces pastorianus
ctagcagcgattgcgacaccagcgt

SEQ ID NO: 72486 - DNA, 25 bp, Saccharomyces pastorianus
tggcacggtgtacaacgacgctagc

SEQ ID NO: 72487 - DNA, 25 bp, Saccharomyces pastorianus
gcttgtggatgaagttccggccgtt

SEQ ID NO: 72488 - DNA, 25 bp, Saccharomyces pastorianus
gttgcgcaggttctgcacatggtac

SEQ ID NO: 72489 - DNA, 25 bp, Saccharomyces pastorianus
gagtcgtgctccttagaccgctgca

SEQ ID NO: 72490 - DNA, 25 bp, Saccharomyces pastorianus
ggtacgcactaacctgcttgtggat

SEQ ID NO: 72491 - DNA, 25 bp, Saccharomyces pastorianus
accgctgcacggcaaacaggatcat

SEQ ID NO: 72492 - DNA, 25 bp, Saccharomyces pastorianus
actggccgtcagtcttgattataac

SEQ ID NO: 72493 - DNA, 25 bp, Saccharomyces pastorianus
ttgctatgagacactggccgtcagt

SEQ ID NO: 72494 - DNA, 25 bp, Saccharomyces pastorianus
tataacgacccttttattcaggtat

SEQ ID NO: 72495 - DNA, 25 bp, Saccharomyces pastorianus
gacccttttattcaggtattccttg

SEQ ID NO: 72496 - DNA, 25 bp, Saccharomyces pastorianus
gtcagtcttgattataacgaccctt

SEQ ID NO: 72497 - DNA, 25 bp, Saccharomyces pastorianus
ggtattccttgagtattggtgacat

SEQ ID NO: 72498 - DNA, 25 bp, Saccharomyces pastorianus
tcgaagccgtccaagcttgctatga

SEQ ID NO: 72499 - DNA, 25 bp, Saccharomyces pastorianus
tagtgttcttgtcgaagccgtccaa

SEQ ID NO: 72500 - DNA, 25 bp, Saccharomyces pastorianus
ataggttagtgttcttgtcgaagcc

SEQ ID NO: 72501 - DNA, 25 bp, Saccharomyces pastorianus
aagcttgctatgagacactggccgt

SEQ ID NO: 72502 - DNA, 25 bp, Saccharomyces pastorianus
ttggtgacattgagcttggtatctg

SEQ ID NO: 72503 - DNA, 25 bp, Saccharomyces pastorianus
gtacatgaagcgcatcttacggaaa

SEQ ID NO: 72504 - DNA, 25 bp, Saccharomyces pastorianus
gcacgtgccgcagaatacatccaaa

SEQ ID NO: 72505 - DNA, 25 bp, Saccharomyces pastorianus
agcaaggctgcgatactggcacgtg

SEQ ID NO: 72506 - DNA, 25 bp, Saccharomyces pastorianus
aggcgtcgccgtgaaaatataaaca

SEQ ID NO: 72507 - DNA, 25 bp, Saccharomyces pastorianus
gagcgatctgctccctgtaagagag

SEQ ID NO: 72508 - DNA, 25 bp, Saccharomyces pastorianus
taaacaccgccatcaatgtcttgag

SEQ ID NO: 72509 - DNA, 25 bp, Saccharomyces pastorianus
gacggtactggtatgaacctcaaga

SEQ ID NO: 72510 - DNA, 25 bp, Saccharomyces pastorianus
agaatgcatcgcagttggccagtgc

SEQ ID NO: 72511 - DNA, 25 bp, Saccharomyces pastorianus
accacactggccacgacagaggaat

SEQ ID NO: 72512 - DNA, 25 bp, Saccharomyces pastorianus
atgctcataccattgcccgaacatg

SEQ ID NO: 72513 - DNA, 25 bp, Saccharomyces pastorianus
catgaatatgcagtcgggccgtcga

SEQ ID NO: 72514 - DNA, 25 bp, Saccharomyces pastorianus
tgcacaagatggttcgtttgcccgt

SEQ ID NO: 72515 - DNA, 25 bp, Saccharomyces pastorianus
tggcggctcagctagatttcatgaa

SEQ ID NO: 72516 - DNA, 25 bp, Saccharomyces pastorianus
ggaaaatgtcatccagacttcctgg

SEQ ID NO: 72517 - DNA, 25 bp, Saccharomyces pastorianus
atttcatgaactaccacgcaaaccg

SEQ ID NO: 72518 - DNA, 25 bp, Saccharomyces pastorianus
tcttcctcagtctcttctggagaaa

SEQ ID NO: 72519 - DNA, 25 bp, Saccharomyces pastorianus
agacttcctgggaatcacttccata

SEQ ID NO: 72520 - DNA, 25 bp, Saccharomyces pastorianus
tgaatgggattacttgtttgcacaa

SEQ ID NO: 72521 - DNA, 25 bp, Saccharomyces pastorianus
tcgtttgcccgttgtgagtttgaaa

SEQ ID NO: 72522 - DNA, 25 bp, Saccharomyces pastorianus
tattgcagatggaattggcggctca

SEQ ID NO: 72523 - DNA, 25 bp, Saccharomyces pastorianus
aaaccgcctcataaagtagcttcgt

SEQ ID NO: 72524 - DNA, 25 bp, Saccharomyces pastorianus
gttcgaattacctattgacttcatg

SEQ ID NO: 72525 - DNA, 25 bp, Saccharomyces pastorianus
gtgcggatcctctccgcagtatagg

SEQ ID NO: 72526 - DNA, 25 bp, Saccharomyces pastorianus
ccatctcaccttgcgggttctggtg

SEQ ID NO: 72527 - DNA, 25 bp, Saccharomyces pastorianus
ataggcgtgttccatacgtcggctg

SEQ ID NO: 72528 - DNA, 25 bp, Saccharomyces pastorianus
tctccgcagtataggcgtgttccat

SEQ ID NO: 72529 - DNA, 25 bp, Saccharomyces pastorianus
gtataggcgtgttccatacgtcggc

SEQ ID NO: 72530 - DNA, 25 bp, Saccharomyces pastorianus
aggcgtgttccatacgtcggctgtc

SEQ ID NO: 72531 - DNA, 25 bp, Saccharomyces pastorianus
tgttccatacgtcggctgtccttac

SEQ ID NO: 72532 - DNA, 25 bp, Saccharomyces pastorianus
gatcctctccgcagtataggcgtgt

SEQ ID NO: 72533 - DNA, 25 bp, Saccharomyces pastorianus
cgcagtataggcgtgttccatacgt

SEQ ID NO: 72534 - DNA, 25 bp, Saccharomyces pastorianus
tcaccttgcgggttctggtgcggat

SEQ ID NO: 72535 - DNA, 25 bp, Saccharomyces pastorianus
ttgcgggttctggtgcggatcctct

SEQ ID NO: 72536 - DNA, 25 bp, Saccharomyces pastorianus
cattgtgtgtgtatgctctttgcct

SEQ ID NO: 72537 - DNA, 25 bp, Saccharomyces pastorianus
tctttgcctttattgggtgatgccc

SEQ ID NO: 72538 - DNA, 25 bp, Saccharomyces pastorianus
aatagacgtggcctgcacaacaaat

SEQ ID NO: 72539 - DNA, 25 bp, Saccharomyces pastorianus
gcacaacaaatgtctcctcgcagaa

SEQ ID NO: 72540 - DNA, 25 bp, Saccharomyces pastorianus
tgtgtgtatgctctttgcctttatt

SEQ ID NO: 72541 - DNA, 25 bp, Saccharomyces pastorianus
gtctcctcgcagaatgcagcattgt

SEQ ID NO: 72542 - DNA, 25 bp, Saccharomyces pastorianus
cctttattgggtgatgcccgttggt

SEQ ID NO: 72543 - DNA, 25 bp, Saccharomyces pastorianus
tatgctctttgcctttattgggtga

SEQ ID NO: 72544 - DNA, 25 bp, Saccharomyces pastorianus
gtggcctgcacaacaaatgtctcct

SEQ ID NO: 72545 - DNA, 25 bp, Saccharomyces pastorianus
gcccgttggtggatagcatgtatat

SEQ ID NO: 72546 - DNA, 25 bp, Saccharomyces pastorianus
acaaatgtctcctcgcagaatgcag

SEQ ID NO: 72547 - DNA, 25 bp, Saccharomyces pastorianus
agcaattctgtttctctgtcttttg

SEQ ID NO: 72548 - DNA, 25 bp, Saccharomyces pastorianus
aaagtcgctggacacccgctggttg

SEQ ID NO: 72549 - DNA, 25 bp, Saccharomyces pastorianus
gatccagttccaagcaattctgttt

SEQ ID NO: 72550 - DNA, 25 bp, Saccharomyces pastorianus
tcttcgcccagacgcacggcaaagt

SEQ ID NO: 72551 - DNA, 25 bp, Saccharomyces pastorianus
agttccaagcaattctgtttctctg

SEQ ID NO: 72552 - DNA, 25 bp, Saccharomyces pastorianus
agacgcacggcaaagtcgctggaca

SEQ ID NO: 72553 - DNA, 25 bp, Saccharomyces pastorianus
gcacgatccagttccaagcaattct

SEQ ID NO: 72554 - DNA, 25 bp, Saccharomyces pastorianus
tccaagcaattctgtttctctgtct

SEQ ID NO: 72555 - DNA, 25 bp, Saccharomyces pastorianus
tctgcacgatccagttccaagcaat

SEQ ID NO: 72556 - DNA, 25 bp, Saccharomyces pastorianus
tggacacccgctggttggcgctctg

SEQ ID NO: 72557 - DNA, 25 bp, Saccharomyces pastorianus
tggttggcgctctgcacgatccagt

SEQ ID NO: 72558 - DNA, 25 bp, Saccharomyces pastorianus
ggcacaagcctttaatactacaaat

SEQ ID NO: 72559 - DNA, 25 bp, Saccharomyces pastorianus
ttatgcttgctgaagaggacgttga

SEQ ID NO: 72560 - DNA, 25 bp, Saccharomyces pastorianus
acttccaatctattgttccgctaag

SEQ ID NO: 72561 - DNA, 25 bp, Saccharomyces pastorianus
acgctgttttcatctactgttttgt

SEQ ID NO: 72562 - DNA, 25 bp, Saccharomyces pastorianus
atccacgatctgattccattgttag

SEQ ID NO: 72563 - DNA, 25 bp, Saccharomyces pastorianus
taacaggtgtttcatatctttggga

SEQ ID NO: 72564 - DNA, 25 bp, Saccharomyces pastorianus
gtcctaaacggtatccacgatctga

SEQ ID NO: 72565 - DNA, 25 bp, Saccharomyces pastorianus
gacagaagctatgaacttgccacaa

SEQ ID NO: 72566 - DNA, 25 bp, Saccharomyces pastorianus
tttgctcttctttttgtcctaaacg

SEQ ID NO: 72567 - DNA, 25 bp, Saccharomyces pastorianus
tacaacggccaactgggtctttttg

SEQ ID NO: 72568 - DNA, 25 bp, Saccharomyces pastorianus
ttaacattgtcacgttacaacggcc

SEQ ID NO: 72569 - DNA, 25 bp, Saccharomyces pastorianus
gctgcacctgctaccgttactgctg

SEQ ID NO: 72570 - DNA, 25 bp, Saccharomyces pastorianus
cttgctgtagcgattgtcgctgcac

SEQ ID NO: 72571 - DNA, 25 bp, Saccharomyces pastorianus
gtagtcgccgccctagtagtcgtcg

SEQ ID NO: 72572 - DNA, 25 bp, Saccharomyces pastorianus
agtcgtcgttcggagtgactatgcg

SEQ ID NO: 72573 - DNA, 25 bp, Saccharomyces pastorianus
cggagtgactatgcgggttgtcctt

SEQ ID NO: 72574 - DNA, 25 bp, Saccharomyces pastorianus
actatgcgggttgtccttgctgtag

SEQ ID NO: 72575 - DNA, 25 bp, Saccharomyces pastorianus
gcgggttgtccttgctgtagcgatt

SEQ ID NO: 72576 - DNA, 25 bp, Saccharomyces pastorianus
ttgtccttgctgtagcgattgtcgc

SEQ ID NO: 72577 - DNA, 25 bp, Saccharomyces pastorianus
attgtcgctgcacctgctaccgtta

SEQ ID NO: 72578 - DNA, 25 bp, Saccharomyces pastorianus
tagcgattgtcgctgcacctgctac

SEQ ID NO: 72579 - DNA, 25 bp, Saccharomyces pastorianus
ccctagtagtcgtcgttcggagtga

SEQ ID NO: 72580 - DNA, 25 bp, Saccharomyces pastorianus
aagaaaacgagtctactcgaatgat

SEQ ID NO: 72581 - DNA, 25 bp, Saccharomyces pastorianus
atattcttggacagcctctatcatg

SEQ ID NO: 72582 - DNA, 25 bp, Saccharomyces pastorianus
gggtcctcaagattcttgtgggact

SEQ ID NO: 72583 - DNA, 25 bp, Saccharomyces pastorianus
ggttatattcttggacagcctctat

SEQ ID NO: 72584 - DNA, 25 bp, Saccharomyces pastorianus
atgattattaattcacacttgtggg

SEQ ID NO: 72585 - DNA, 25 bp, Saccharomyces pastorianus
tggacagcctctatcatgcagccag

SEQ ID NO: 72586 - DNA, 25 bp, Saccharomyces pastorianus
atggaatatcatgcgaatgctgcta

SEQ ID NO: 72587 - DNA, 25 bp, Saccharomyces pastorianus
gatgcggttatattcttggacagcc

SEQ ID NO: 72588 - DNA, 25 bp, Saccharomyces pastorianus
ttcttggacagcctctatcatgcag

SEQ ID NO: 72589 - DNA, 25 bp, Saccharomyces pastorianus
agattcttgtgggactttcgaaaag

SEQ ID NO: 72590 - DNA, 25 bp, Saccharomyces pastorianus
aatgctgctaaaagtgatgcggtta

SEQ ID NO: 72591 - DNA, 25 bp, Saccharomyces pastorianus
tctgtgacatgggagaaaactttct

SEQ ID NO: 72592 - DNA, 25 bp, Saccharomyces pastorianus
tattggctggaaacgtgatcaaaaa

SEQ ID NO: 72593 - DNA, 25 bp, Saccharomyces pastorianus
ggaaacgtgatcaaaaaatgctcta

SEQ ID NO: 72594 - DNA, 25 bp, Saccharomyces pastorianus
gggagaaaactttctgaatgaacag

SEQ ID NO: 72595 - DNA, 25 bp, Saccharomyces pastorianus
tttattggctggaaacgtgatcaaa

SEQ ID NO: 72596 - DNA, 25 bp, Saccharomyces pastorianus
tatttattggctggaaacgtgatca

SEQ ID NO: 72597 - DNA, 25 bp, Saccharomyces pastorianus
gtgacatgggagaaaactttctgaa

SEQ ID NO: 72598 - DNA, 25 bp, Saccharomyces pastorianus
acagaattatttattggctggaaac

SEQ ID NO: 72599 - DNA, 25 bp, Saccharomyces pastorianus
gaattatttattggctggaaacgtg

SEQ ID NO: 72600 - DNA, 25 bp, Saccharomyces pastorianus
aaacgtgatcaaaaaatgctctagc

SEQ ID NO: 72601 - DNA, 25 bp, Saccharomyces pastorianus
ttggctggaaacgtgatcaaaaaat

SEQ ID NO: 72602 - DNA, 25 bp, Saccharomyces pastorianus
aaatcaggccggttcgacaagagca

SEQ ID NO: 72603 - DNA, 25 bp, Saccharomyces pastorianus
aggacggtctcctagtcaggtttct

SEQ ID NO: 72604 - DNA, 25 bp, Saccharomyces pastorianus
atttctttctatgcgtattcaccaa

SEQ ID NO: 72605 - DNA, 25 bp, Saccharomyces pastorianus
gaggatgatctttttcccttgttaa

SEQ ID NO: 72606 - DNA, 25 bp, Saccharomyces pastorianus
ataacaggcctgctcttatgaaagg

SEQ ID NO: 72607 - DNA, 25 bp, Saccharomyces pastorianus
cgctgttatcattggaggacggtct

SEQ ID NO: 72608 - DNA, 25 bp, Saccharomyces pastorianus
tcaggtttctggtgcgttggagtcc

SEQ ID NO: 72609 - DNA, 25 bp, Saccharomyces pastorianus
attgctcacaactcttctctaaaga

SEQ ID NO: 72610 - DNA, 25 bp, Saccharomyces pastorianus
ttcaccaatcgcaggagggttcttg

SEQ ID NO: 72611 - DNA, 25 bp, Saccharomyces pastorianus
aactataacgcgttctcacgggcga

SEQ ID NO: 72612 - DNA, 25 bp, Saccharomyces pastorianus
agcaatcatattgggcagctgtatt

SEQ ID NO: 72613 - DNA, 25 bp, Saccharomyces pastorianus
ttgttttgctacaacatgggcacct

SEQ ID NO: 72614 - DNA, 25 bp, Saccharomyces pastorianus
atcaatttctattacggttacgtgt

SEQ ID NO: 72615 - DNA, 25 bp, Saccharomyces pastorianus
tacaacatgggcacctgtcgcttat

SEQ ID NO: 72616 - DNA, 25 bp, Saccharomyces pastorianus
gatttcaactgcgttcaactggtta

SEQ ID NO: 72617 - DNA, 25 bp, Saccharomyces pastorianus
atgcttggtcgctatgtttttctac

SEQ ID NO: 72618 - DNA, 25 bp, Saccharomyces pastorianus
ctacatcttctttttcttgccagaa

SEQ ID NO: 72619 - DNA, 25 bp, Saccharomyces pastorianus
gagcagccgggatgatggcctgtat

SEQ ID NO: 72620 - DNA, 25 bp, Saccharomyces pastorianus
gagctatgtcgatttcaactgcgtt

SEQ ID NO: 72621 - DNA, 25 bp, Saccharomyces pastorianus
ttacgtgttcgtgggatgcttggtc

SEQ ID NO: 72622 - DNA, 25 bp, Saccharomyces pastorianus
ggtcgctatgtttttctacatcttc

SEQ ID NO: 72623 - DNA, 25 bp, Saccharomyces pastorianus
atggcagtttttgattggtttcttt

SEQ ID NO: 72624 - DNA, 25 bp, Saccharomyces pastorianus
gaccactaccgcaggaatcatcata

SEQ ID NO: 72625 - DNA, 25 bp, Saccharomyces pastorianus
gatccaggacctgcagcatatagaa

SEQ ID NO: 72626 - DNA, 25 bp, Saccharomyces pastorianus
cacggacgcaaatctctttttagga

SEQ ID NO: 72627 - DNA, 25 bp, Saccharomyces pastorianus
ggacctttaactatcacggacgcaa

SEQ ID NO: 72628 - DNA, 25 bp, Saccharomyces pastorianus
gacattcacactgtagctgctggag

SEQ ID NO: 72629 - DNA, 25 bp, Saccharomyces pastorianus
gattgtgccacgctgaaaataccca

SEQ ID NO: 72630 - DNA, 25 bp, Saccharomyces pastorianus
gtagcatttccgcaggattgtgcca

SEQ ID NO: 72631 - DNA, 25 bp, Saccharomyces pastorianus
tagaacacgttttcgagaccactac

SEQ ID NO: 72632 - DNA, 25 bp, Saccharomyces pastorianus
aatattcccttgatcggttttgata

SEQ ID NO: 72633 - DNA, 25 bp, Saccharomyces pastorianus
aaatcaatactatctggccctgcag

SEQ ID NO: 72634 - DNA, 25 bp, Saccharomyces pastorianus
gggcacatccactgacgtaagtagg

SEQ ID NO: 72635 - DNA, 25 bp, Saccharomyces pastorianus
tttggatctgaactccttcgggctc

SEQ ID NO: 72636 - DNA, 25 bp, Saccharomyces pastorianus
ccgatgccaataggaaaggtgtttt

SEQ ID NO: 72637 - DNA, 25 bp, Saccharomyces pastorianus
aactttacgcttttcaatattacat

SEQ ID NO: 72638 - DNA, 25 bp, Saccharomyces pastorianus
tactgatgactttatccccgttagc

SEQ ID NO: 72639 - DNA, 25 bp, Saccharomyces pastorianus
aacgggctcacttgtaaacgataat

SEQ ID NO: 72640 - DNA, 25 bp, Saccharomyces pastorianus
taccagtaacacctttttggatctg

SEQ ID NO: 72641 - DNA, 25 bp, Saccharomyces pastorianus
ttcgggctcgatctttttgctccaa

SEQ ID NO: 72642 - DNA, 25 bp, Saccharomyces pastorianus
ttacattagatggaacgggctcact

SEQ ID NO: 72643 - DNA, 25 bp, Saccharomyces pastorianus
ttagcgacgctaatgtaaatccagt

SEQ ID NO: 72644 - DNA, 25 bp, Saccharomyces pastorianus
attattcacttgtctgagggcttga

SEQ ID NO: 72645 - DNA, 25 bp, Saccharomyces pastorianus
tttttgctccaactttatccgatgc

SEQ ID NO: 72646 - DNA, 25 bp, Saccharomyces pastorianus
atcgcaccacaaagaagttcaaaaa

SEQ ID NO: 72647 - DNA, 25 bp, Saccharomyces pastorianus
aaagaagaacgctgttgctaagaaa

SEQ ID NO: 72648 - DNA, 25 bp, Saccharomyces pastorianus
aagaagagccaaccgttatctcagc

SEQ ID NO: 72649 - DNA, 25 bp, Saccharomyces pastorianus
gaataccaaagtcaagccatgtcaa

SEQ ID NO: 72650 - DNA, 25 bp, Saccharomyces pastorianus
aaccagctgctgatgtcgaagaata

SEQ ID NO: 72651 - DNA, 25 bp, Saccharomyces pastorianus
gttatctcagccactgatttggaaa

SEQ ID NO: 72652 - DNA, 25 bp, Saccharomyces pastorianus
tgaagcagttgctatcgcaccacaa

SEQ ID NO: 72653 - DNA, 25 bp, Saccharomyces pastorianus
atgaagaaatcccaacaactgaaaa

SEQ ID NO: 72654 - DNA, 25 bp, Saccharomyces pastorianus
ggttcagaaggatgcctccgaagaa

SEQ ID NO: 72655 - DNA, 25 bp, Saccharomyces pastorianus
gttgctaagaaagaaccagctgctg

SEQ ID NO: 72656 - DNA, 25 bp, Saccharomyces pastorianus
aagagaaggcaccagaggttcagaa

SEQ ID NO: 72657 - DNA, 25 bp, Saccharomyces pastorianus
caagatcaagggtaagctggtttat

SEQ ID NO: 72658 - DNA, 25 bp, Saccharomyces pastorianus
agagcaccaaagtatcacagccaca

SEQ ID NO: 72659 - DNA, 25 bp, Saccharomyces pastorianus
aaatgctgtcgtagttgcacgtgaa

SEQ ID NO: 72660 - DNA, 25 bp, Saccharomyces pastorianus
aagcgacgagcacatggacaagatc

SEQ ID NO: 72661 - DNA, 25 bp, Saccharomyces pastorianus
actgccatggaaaaagcattccttc

SEQ ID NO: 72662 - DNA, 25 bp, Saccharomyces pastorianus
gctttcgaaagggtacaactgccat

SEQ ID NO: 72663 - DNA, 25 bp, Saccharomyces pastorianus
ccgagagagaattagctttttacaa

SEQ ID NO: 72664 - DNA, 25 bp, Saccharomyces pastorianus
gctggtttatgaggctagtgacaag

SEQ ID NO: 72665 - DNA, 25 bp, Saccharomyces pastorianus
atgaagcacgctttcgaaagggtac

SEQ ID NO: 72666 - DNA, 25 bp, Saccharomyces pastorianus
cccattcaagagaccattggactat

SEQ ID NO: 72667 - DNA, 25 bp, Saccharomyces pastorianus
atcacagccacaaccaatacagatg

SEQ ID NO: 72668 - DNA, 25 bp, Saccharomyces pastorianus
gtaagcaagtccaacatgccactct

SEQ ID NO: 72669 - DNA, 25 bp, Saccharomyces pastorianus
gttcggtaagcaagtccaacatgcc

SEQ ID NO: 72670 - DNA, 25 bp, Saccharomyces pastorianus
taaagaagttcggtaagcaagtcca

SEQ ID NO: 72671 - DNA, 25 bp, Saccharomyces pastorianus
taagcaagtccaacatgccactctg

SEQ ID NO: 72672 - DNA, 25 bp, Saccharomyces pastorianus
ggtaagcaagtccaacatgccactc

SEQ ID NO: 72673 - DNA, 25 bp, Saccharomyces pastorianus
aagttcggtaagcaagtccaacatg

SEQ ID NO: 72674 - DNA, 25 bp, Saccharomyces pastorianus
tcggtaagcaagtccaacatgccac

SEQ ID NO: 72675 - DNA, 25 bp, Saccharomyces pastorianus
cggtaagcaagtccaacatgccact

SEQ ID NO: 72676 - DNA, 25 bp, Saccharomyces pastorianus
agaagttcggtaagcaagtccaaca

SEQ ID NO: 72677 - DNA, 25 bp, Saccharomyces pastorianus
gaagttcggtaagcaagtccaacat

SEQ ID NO: 72678 - DNA, 25 bp, Saccharomyces pastorianus
ttcggtaagcaagtccaacatgcca

SEQ ID NO: 72679 - DNA, 25 bp, Saccharomyces pastorianus
tacaacaatgaactcgaagccccag

SEQ ID NO: 72680 - DNA, 25 bp, Saccharomyces pastorianus
ttattggcggcaaccatgagtcaat

SEQ ID NO: 72681 - DNA, 25 bp, Saccharomyces pastorianus
ataagcatacctcccaaataccaaa

SEQ ID NO: 72682 - DNA, 25 bp, Saccharomyces pastorianus
ttgtcacggtcaactgaaccagata

SEQ ID NO: 72683 - DNA, 25 bp, Saccharomyces pastorianus
caaagaagtgtcacgactccacgca

SEQ ID NO: 72684 - DNA, 25 bp, Saccharomyces pastorianus
ccacgcaaagactcccattgattta

SEQ ID NO: 72685 - DNA, 25 bp, Saccharomyces pastorianus
tgctgttcagggatgttgtcacggt

SEQ ID NO: 72686 - DNA, 25 bp, Saccharomyces pastorianus
ggagatttccaaagcatccgtaatt

SEQ ID NO: 72687 - DNA, 25 bp, Saccharomyces pastorianus
tcgaagccccagttcctacaatttt

SEQ ID NO: 72688 - DNA, 25 bp, Saccharomyces pastorianus
aatgagacacttaatgcttctacca

SEQ ID NO: 72689 - DNA, 25 bp, Saccharomyces pastorianus
gcatccgtaattctcaagatttcaa

SEQ ID NO: 72690 - DNA, 25 bp, Saccharomyces pastorianus
ttgttcttctacgatagcctcacga

SEQ ID NO: 72691 - DNA, 25 bp, Saccharomyces pastorianus
aaccaccagcaaagcagttctagac

SEQ ID NO: 72692 - DNA, 25 bp, Saccharomyces pastorianus
gataacggctatagcaactatccaa

SEQ ID NO: 72693 - DNA, 25 bp, Saccharomyces pastorianus
gagcaaccgcagaaccaagggatcc

SEQ ID NO: 72694 - DNA, 25 bp, Saccharomyces pastorianus
gataagttgtcataaccgcctggcg

SEQ ID NO: 72695 - DNA, 25 bp, Saccharomyces pastorianus
gccacgctcgccgatgattgtagtg

SEQ ID NO: 72696 - DNA, 25 bp, Saccharomyces pastorianus
gcaactatccaaaacgaaccaccag

SEQ ID NO: 72697 - DNA, 25 bp, Saccharomyces pastorianus
actactttggcctcggaacacaggt

SEQ ID NO: 72698 - DNA, 25 bp, Saccharomyces pastorianus
gcctcacgagcacaatattgcggga

SEQ ID NO: 72699 - DNA, 25 bp, Saccharomyces pastorianus
tagcggcgggcagtaggttatcaaa

SEQ ID NO: 72700 - DNA, 25 bp, Saccharomyces pastorianus
gttctagacgtactactttggcctc

SEQ ID NO: 72701 - DNA, 25 bp, Saccharomyces pastorianus
gaatcgatccatcggtaaccatgat

SEQ ID NO: 72702 - DNA, 25 bp, Saccharomyces pastorianus
ggaagtcgtcgaactgcccttatta

SEQ ID NO: 72703 - DNA, 25 bp, Saccharomyces pastorianus
acttccattacctccaagaatcgat

SEQ ID NO: 72704 - DNA, 25 bp, Saccharomyces pastorianus
aaattgcgaagtttgttgtcgggct

SEQ ID NO: 72705 - DNA, 25 bp, Saccharomyces pastorianus
attatctccagaaaggtttgccgct

SEQ ID NO: 72706 - DNA, 25 bp, Saccharomyces pastorianus
tatattgttatatggtcctcctggt

SEQ ID NO: 72707 - DNA, 25 bp, Saccharomyces pastorianus
ggcacgtaccaagaaggcatgcatt

SEQ ID NO: 72708 - DNA, 25 bp, Saccharomyces pastorianus
aggtttgccgctttaggtatcgatc

SEQ ID NO: 72709 - DNA, 25 bp, Saccharomyces pastorianus
cgatgtcacttatagcgatgttggt

SEQ ID NO: 72710 - DNA, 25 bp, Saccharomyces pastorianus
ggtatcgatcctccaaagggtatat

SEQ ID NO: 72711 - DNA, 25 bp, Saccharomyces pastorianus
gatgctaagtacgtgattaacctaa

SEQ ID NO: 72712 - DNA, 25 bp, Saccharomyces pastorianus
gaccaaatcatcaacggctacgata

SEQ ID NO: 72713 - DNA, 25 bp, Saccharomyces pastorianus
aactgtccctaagaagaaatcgtga

SEQ ID NO: 72714 - DNA, 25 bp, Saccharomyces pastorianus
gtgcttgacgaccaatacgaccaaa

SEQ ID NO: 72715 - DNA, 25 bp, Saccharomyces pastorianus
tagtgccattgcacgtacagagacc

SEQ ID NO: 72716 - DNA, 25 bp, Saccharomyces pastorianus
aagcggtggccgtaagctagctaag

SEQ ID NO: 72717 - DNA, 25 bp, Saccharomyces pastorianus
gagaccatgacagtgcttgacgacc

SEQ ID NO: 72718 - DNA, 25 bp, Saccharomyces pastorianus
catgacgacggagagatctgatttc

SEQ ID NO: 72719 - DNA, 25 bp, Saccharomyces pastorianus
gatctgatttcgaatcaatgctcga

SEQ ID NO: 72720 - DNA, 25 bp, Saccharomyces pastorianus
ttaccaaccgtttgacatgacgacg

SEQ ID NO: 72721 - DNA, 25 bp, Saccharomyces pastorianus
aatgctcgatgatttcttggacaat

SEQ ID NO: 72722 - DNA, 25 bp, Saccharomyces pastorianus
tgacagactaaaggaagcggcagac

SEQ ID NO: 72723 - DNA, 25 bp, Saccharomyces pastorianus
gatattgtagttgaagaccccagga

SEQ ID NO: 72724 - DNA, 25 bp, Saccharomyces pastorianus
gatccagatgagtttgaagacgaat

SEQ ID NO: 72725 - DNA, 25 bp, Saccharomyces pastorianus
atcaagccgatgtcagaagattcca

SEQ ID NO: 72726 - DNA, 25 bp, Saccharomyces pastorianus
gatatttttgcccagcttttaggaa

SEQ ID NO: 72727 - DNA, 25 bp, Saccharomyces pastorianus
cagaagatgatatttttgcccagct

SEQ ID NO: 72728 - DNA, 25 bp, Saccharomyces pastorianus
gaccccaggaaatctaatgctgaga

SEQ ID NO: 72729 - DNA, 25 bp, Saccharomyces pastorianus
gaagattccaaaagggcaaatccac

SEQ ID NO: 72730 - DNA, 25 bp, Saccharomyces pastorianus
tatcgattatcaagccgatgtcaga

SEQ ID NO: 72731 - DNA, 25 bp, Saccharomyces pastorianus
gggcaaatccactttggagaagcta

SEQ ID NO: 72732 - DNA, 25 bp, Saccharomyces pastorianus
tgaagcgggagatccagatgagttt

SEQ ID NO: 72733 - DNA, 25 bp, Saccharomyces pastorianus
ttgcccagcttttaggaagcggtga

SEQ ID NO: 72734 - DNA, 25 bp, Saccharomyces pastorianus
aagtttgcaggatcccatttgccac

SEQ ID NO: 72735 - DNA, 25 bp, Saccharomyces pastorianus
tcgcttatcccgacgttggtaatag

SEQ ID NO: 72736 - DNA, 25 bp, Saccharomyces pastorianus
ccgcaaacggtatagtgtgcacttt

SEQ ID NO: 72737 - DNA, 25 bp, Saccharomyces pastorianus
ttgcgtttcgtacaaattcatcatt

SEQ ID NO: 72738 - DNA, 25 bp, Saccharomyces pastorianus
acataagagcttctcgtcgcttatc

SEQ ID NO: 72739 - DNA, 25 bp, Saccharomyces pastorianus
ggtttctataatgcaccactggcaa

SEQ ID NO: 72740 - DNA, 25 bp, Saccharomyces pastorianus
cactccctcgatattgcgtttcgta

SEQ ID NO: 72741 - DNA, 25 bp, Saccharomyces pastorianus
ttgccacctagtccggtttctataa

SEQ ID NO: 72742 - DNA, 25 bp, Saccharomyces pastorianus
gttttggcgaggaatcaagtttgca

SEQ ID NO: 72743 - DNA, 25 bp, Saccharomyces pastorianus
attcatcattagacccatccaatac

SEQ ID NO: 72744 - DNA, 25 bp, Saccharomyces pastorianus
accactggcaacatttcttggcgaa

SEQ ID NO: 72745 - DNA, 25 bp, Saccharomyces pastorianus
cacagcgatgagattccttacgaga

SEQ ID NO: 72746 - DNA, 25 bp, Saccharomyces pastorianus
attccatgacgttgccaagcgacta

SEQ ID NO: 72747 - DNA, 25 bp, Saccharomyces pastorianus
caaggttactgtcgtcgggcaaacg

SEQ ID NO: 72748 - DNA, 25 bp, Saccharomyces pastorianus
ggcgcaacgggatgccaaggttact

SEQ ID NO: 72749 - DNA, 25 bp, Saccharomyces pastorianus
ggtatcattgcttcacgccaaagac

SEQ ID NO: 72750 - DNA, 25 bp, Saccharomyces pastorianus
aatgaatgcttggttctcgacgcta

SEQ ID NO: 72751 - DNA, 25 bp, Saccharomyces pastorianus
gttctcgacgctacggacaggtata

SEQ ID NO: 72752 - DNA, 25 bp, Saccharomyces pastorianus
gtaagcgtatttctcacagcgatga

SEQ ID NO: 72753 - DNA, 25 bp, Saccharomyces pastorianus
gtactggtggaattggacgcgccat

SEQ ID NO: 72754 - DNA, 25 bp, Saccharomyces pastorianus
aaattacagtgcctatgccacacac

SEQ ID NO: 72755 - DNA, 25 bp, Saccharomyces pastorianus
tgccaaaagtattcatcgccgggtt

SEQ ID NO: 72756 - DNA, 25 bp, Saccharomyces pastorianus
aatgttgtcgagaagttcatggaaa

SEQ ID NO: 72757 - DNA, 25 bp, Saccharomyces pastorianus
aagggagatgccattttgcccacgc

SEQ ID NO: 72758 - DNA, 25 bp, Saccharomyces pastorianus
gcccacgcctggtttgacgaaaaat

SEQ ID NO: 72759 - DNA, 25 bp, Saccharomyces pastorianus
gttcagtaacaagggagatgccatt

SEQ ID NO: 72760 - DNA, 25 bp, Saccharomyces pastorianus
atctcgcagcgggacaatgttcagt

SEQ ID NO: 72761 - DNA, 25 bp, Saccharomyces pastorianus
gatctgtactttgattgtaagccct

SEQ ID NO: 72762 - DNA, 25 bp, Saccharomyces pastorianus
gtactttgattgtaagccctgccat

SEQ ID NO: 72763 - DNA, 25 bp, Saccharomyces pastorianus
attgtaagccctgccattgaatctc

SEQ ID NO: 72764 - DNA, 25 bp, Saccharomyces pastorianus
aactgttggtggaaaaagctctgca

SEQ ID NO: 72765 - DNA, 25 bp, Saccharomyces pastorianus
gcagcgggacaatgttcagtaacaa

SEQ ID NO: 72766 - DNA, 25 bp, Saccharomyces pastorianus
tgccattgaatctcgcagcgggaca

SEQ ID NO: 72767 - DNA, 25 bp, Saccharomyces pastorianus
tttgacaataggaagccatgcaggc

SEQ ID NO: 72768 - DNA, 25 bp, Saccharomyces pastorianus
ttactttgacaataggaagccatgc

SEQ ID NO: 72769 - DNA, 25 bp, Saccharomyces pastorianus
atgccatctctgtcaaaattacttt

SEQ ID NO: 72770 - DNA, 25 bp, Saccharomyces pastorianus
aagatgccatctctgtcaaaattac

SEQ ID NO: 72771 - DNA, 25 bp, Saccharomyces pastorianus
gagcaatgtgcccagaccccaagat

SEQ ID NO: 72772 - DNA, 25 bp, Saccharomyces pastorianus
gccatctctgtcaaaattactttga

SEQ ID NO: 72773 - DNA, 25 bp, Saccharomyces pastorianus
gatgccatctctgtcaaaattactt

SEQ ID NO: 72774 - DNA, 25 bp, Saccharomyces pastorianus
aatgtgcccagaccccaagatgcca

SEQ ID NO: 72775 - DNA, 25 bp, Saccharomyces pastorianus
ccaagatgccatctctgtcaaaatt

SEQ ID NO: 72776 - DNA, 25 bp, Saccharomyces pastorianus
accccaagatgccatctctgtcaaa

SEQ ID NO: 72777 - DNA, 25 bp, Saccharomyces pastorianus
agcaatgtgcccagaccccaagatg

SEQ ID NO: 72778 - DNA, 25 bp, Saccharomyces pastorianus
gttgacaccagttttgattgcacct

SEQ ID NO: 72779 - DNA, 25 bp, Saccharomyces pastorianus
gtggctaacagcagctctatgcata

SEQ ID NO: 72780 - DNA, 25 bp, Saccharomyces pastorianus
gttccatatcttgattggcgccacg

SEQ ID NO: 72781 - DNA, 25 bp, Saccharomyces pastorianus
aaagcccgcagaacattttttgaga

SEQ ID NO: 72782 - DNA, 25 bp, Saccharomyces pastorianus
tgacgctaacctaaatctgaacctt

SEQ ID NO: 72783 - DNA, 25 bp, Saccharomyces pastorianus
gatatttttctaatcgcgcccttgt

SEQ ID NO: 72784 - DNA, 25 bp, Saccharomyces pastorianus
aacgcttctaaaccgatggacgcca

SEQ ID NO: 72785 - DNA, 25 bp, Saccharomyces pastorianus
aaattctatcgttcacatgcctggt

SEQ ID NO: 72786 - DNA, 25 bp, Saccharomyces pastorianus
gtgtgccctttacagagtttttcca

SEQ ID NO: 72787 - DNA, 25 bp, Saccharomyces pastorianus
taaggaggttattgcaccacccacg

SEQ ID NO: 72788 - DNA, 25 bp, Saccharomyces pastorianus
tttatttcaatcctaagcccaacgc

SEQ ID NO: 72789 - DNA, 25 bp, Saccharomyces pastorianus
gactcgaaacgaaacggcctcggat

SEQ ID NO: 72790 - DNA, 25 bp, Saccharomyces pastorianus
ggcgactcgaaacgaaacggcctcg

SEQ ID NO: 72791 - DNA, 25 bp, Saccharomyces pastorianus
caagaagaacaggagggtattaaca

SEQ ID NO: 72792 - DNA, 25 bp, Saccharomyces pastorianus
aaacgaaacggcctcggatgagagc

SEQ ID NO: 72793 - DNA, 25 bp, Saccharomyces pastorianus
taagaaaagccagggatgaagagac

SEQ ID NO: 72794 - DNA, 25 bp, Saccharomyces pastorianus
acagacattgtggagattgtgagga

SEQ ID NO: 72795 - DNA, 25 bp, Saccharomyces pastorianus
gagacgggagacaaagagcaagaac

SEQ ID NO: 72796 - DNA, 25 bp, Saccharomyces pastorianus
taacaacgggaacgacgacgaagag

SEQ ID NO: 72797 - DNA, 25 bp, Saccharomyces pastorianus
agaatggacagacattgtggagatt

SEQ ID NO: 72798 - DNA, 25 bp, Saccharomyces pastorianus
ctcgaaacgaaacggcctcggatga

SEQ ID NO: 72799 - DNA, 25 bp, Saccharomyces pastorianus
aacggcctcggatgagagcgatgat

SEQ ID NO: 72800 - DNA, 25 bp, Saccharomyces pastorianus
taagttacaggccagaatctcagat

SEQ ID NO: 72801 - DNA, 25 bp, Saccharomyces pastorianus
ggaggctttgcgttctaagttacag

SEQ ID NO: 72802 - DNA, 25 bp, Saccharomyces pastorianus
gctggtagaacgaaaggcccatcca

SEQ ID NO: 72803 - DNA, 25 bp, Saccharomyces pastorianus
gaaccacgtcagacctacagagatt

SEQ ID NO: 72804 - DNA, 25 bp, Saccharomyces pastorianus
aaatggatctgattccgatgtggac

SEQ ID NO: 72805 - DNA, 25 bp, Saccharomyces pastorianus
ggaaagcgcctggttctagagaagc

SEQ ID NO: 72806 - DNA, 25 bp, Saccharomyces pastorianus
aatgcagatggtgtgatgtttcaga

SEQ ID NO: 72807 - DNA, 25 bp, Saccharomyces pastorianus
tttgatgacggtgcgagaaccacgt

SEQ ID NO: 72808 - DNA, 25 bp, Saccharomyces pastorianus
aaggccaaaagggactcagagatta

SEQ ID NO: 72809 - DNA, 25 bp, Saccharomyces pastorianus
ggcccatccaagaacgacgctaaat

SEQ ID NO: 72810 - DNA, 25 bp, Saccharomyces pastorianus
gatggtcctataatggcagcattag

SEQ ID NO: 72811 - DNA, 25 bp, Saccharomyces pastorianus
aatctctttacctcaaaatgcccaa

SEQ ID NO: 72812 - DNA, 25 bp, Saccharomyces pastorianus
accgatttgtggtttcacgagagtt

SEQ ID NO: 72813 - DNA, 25 bp, Saccharomyces pastorianus
gatcgggtccttagatacattaata

SEQ ID NO: 72814 - DNA, 25 bp, Saccharomyces pastorianus
tcaaaatgcccaacctgttatcgcc

SEQ ID NO: 72815 - DNA, 25 bp, Saccharomyces pastorianus
agagcatttgtttctgattttaaaa

SEQ ID NO: 72816 - DNA, 25 bp, Saccharomyces pastorianus
attcccgaattcaagatcgggtcct

SEQ ID NO: 72817 - DNA, 25 bp, Saccharomyces pastorianus
tatcgcccctggttccaaaaccgat

SEQ ID NO: 72818 - DNA, 25 bp, Saccharomyces pastorianus
actgcgttatatactgcaaacgatt

SEQ ID NO: 72819 - DNA, 25 bp, Saccharomyces pastorianus
gtttcacgagagtttaattggcggt

SEQ ID NO: 72820 - DNA, 25 bp, Saccharomyces pastorianus
taattggcggtagagcatttgtttc

SEQ ID NO: 72821 - DNA, 25 bp, Saccharomyces pastorianus
ttacctcaaaatgcccaacctgtta

SEQ ID NO: 72822 - DNA, 25 bp, Saccharomyces pastorianus
gcttactataacatggcttcctcta

SEQ ID NO: 72823 - DNA, 25 bp, Saccharomyces pastorianus
gtagtcactcccagaatatttcgta

SEQ ID NO: 72824 - DNA, 25 bp, Saccharomyces pastorianus
ggtgcttccaaactgcttttttaca

SEQ ID NO: 72825 - DNA, 25 bp, Saccharomyces pastorianus
tatttaccccggctcagcgtttgat

SEQ ID NO: 72826 - DNA, 25 bp, Saccharomyces pastorianus
acagcagcaatacccgcattgtagc

SEQ ID NO: 72827 - DNA, 25 bp, Saccharomyces pastorianus
gagttactcgcgtcatttaatatag

SEQ ID NO: 72828 - DNA, 25 bp, Saccharomyces pastorianus
gtcattgtcgagtttagctcccaga

SEQ ID NO: 72829 - DNA, 25 bp, Saccharomyces pastorianus
ttatctcgggtttatctcacagcag

SEQ ID NO: 72830 - DNA, 25 bp, Saccharomyces pastorianus
acaactgctctctcggtgcaaataa

SEQ ID NO: 72831 - DNA, 25 bp, Saccharomyces pastorianus
gtactatggttttggcttgccgatc

SEQ ID NO: 72832 - DNA, 25 bp, Saccharomyces pastorianus
aaggaagccccaaccatgtcattgt

SEQ ID NO: 72833 - DNA, 25 bp, Saccharomyces pastorianus
atgagacattcatcacagaggtcaa

SEQ ID NO: 72834 - DNA, 25 bp, Saccharomyces pastorianus
gaagtgatcaagatatgtcaaccgg

SEQ ID NO: 72835 - DNA, 25 bp, Saccharomyces pastorianus
tcatcacagaggtcaaagaaacttt

SEQ ID NO: 72836 - DNA, 25 bp, Saccharomyces pastorianus
gagacattcatcacagaggtcaaag

SEQ ID NO: 72837 - DNA, 25 bp, Saccharomyces pastorianus
tcaagatatgtcaaccgggtgtaga

SEQ ID NO: 72838 - DNA, 25 bp, Saccharomyces pastorianus
tatgtcaaccgggtgtagattacag

SEQ ID NO: 72839 - DNA, 25 bp, Saccharomyces pastorianus
accgggtgtagattacagacttaat

SEQ ID NO: 72840 - DNA, 25 bp, Saccharomyces pastorianus
gacattcatcacagaggtcaaagaa

SEQ ID NO: 72841 - DNA, 25 bp, Saccharomyces pastorianus
ttggatttgaaggatgagacattca

SEQ ID NO: 72842 - DNA, 25 bp, Saccharomyces pastorianus
gatcaagatatgtcaaccgggtgta

SEQ ID NO: 72843 - DNA, 25 bp, Saccharomyces pastorianus
gtcaaccgggtgtagattacagact

SEQ ID NO: 72844 - DNA, 25 bp, Saccharomyces pastorianus
gtaaataccgtttcgcaacaagagc

SEQ ID NO: 72845 - DNA, 25 bp, Saccharomyces pastorianus
actctcaaggatacgcttacggtca

SEQ ID NO: 72846 - DNA, 25 bp, Saccharomyces pastorianus
aactactacactcaacagcaacaac

SEQ ID NO: 72847 - DNA, 25 bp, Saccharomyces pastorianus
ggtcaacaataccaacagcttgctc

SEQ ID NO: 72848 - DNA, 25 bp, Saccharomyces pastorianus
tacccaggtatgtttgactctcaag

SEQ ID NO: 72849 - DNA, 25 bp, Saccharomyces pastorianus
caattccctggttattcttacccag

SEQ ID NO: 72850 - DNA, 25 bp, Saccharomyces pastorianus
gttgctgcccaacaatactatatgt

SEQ ID NO: 72851 - DNA, 25 bp, Saccharomyces pastorianus
gccgctactgctaacttgactagtg

SEQ ID NO: 72852 - DNA, 25 bp, Saccharomyces pastorianus
caaaccaccggtaatgctaatcaat

SEQ ID NO: 72853 - DNA, 25 bp, Saccharomyces pastorianus
aactacaacaacaatacctatccca

SEQ ID NO: 72854 - DNA, 25 bp, Saccharomyces pastorianus
ggttatggtcagactggcgccaaca

SEQ ID NO: 72855 - DNA, 25 bp, Saccharomyces pastorianus
aggtcctcaggacgacgtagaattt

SEQ ID NO: 72856 - DNA, 25 bp, Saccharomyces pastorianus
cgtgcgttatccttgctgcaaagaa

SEQ ID NO: 72857 - DNA, 25 bp, Saccharomyces pastorianus
tcactcgtacgccttagatagatat

SEQ ID NO: 72858 - DNA, 25 bp, Saccharomyces pastorianus
ggctaactcggccattcaaagtgaa

SEQ ID NO: 72859 - DNA, 25 bp, Saccharomyces pastorianus
aagcagatgtgtcaacggttaagca

SEQ ID NO: 72860 - DNA, 25 bp, Saccharomyces pastorianus
ggttaagcaaactcactcgtacgcc

SEQ ID NO: 72861 - DNA, 25 bp, Saccharomyces pastorianus
aattcgaaaataccagcgttctaca

SEQ ID NO: 72862 - DNA, 25 bp, Saccharomyces pastorianus
tcatgcaggaaatctcgaaacggaa

SEQ ID NO: 72863 - DNA, 25 bp, Saccharomyces pastorianus
gtaggagaccaacaatcgattaatg

SEQ ID NO: 72864 - DNA, 25 bp, Saccharomyces pastorianus
taatgatcgtgcgttatccttgctg

SEQ ID NO: 72865 - DNA, 25 bp, Saccharomyces pastorianus
gtcctagcgaattagctctctacga

SEQ ID NO: 72866 - DNA, 25 bp, Saccharomyces pastorianus
gttgctgccaattttaaaccatctt

SEQ ID NO: 72867 - DNA, 25 bp, Saccharomyces pastorianus
ttgaaggcctaccagcatcttccaa

SEQ ID NO: 72868 - DNA, 25 bp, Saccharomyces pastorianus
caattttaaaccatctttcgtcagg

SEQ ID NO: 72869 - DNA, 25 bp, Saccharomyces pastorianus
ctattgaaggcctaccagcatcttc

SEQ ID NO: 72870 - DNA, 25 bp, Saccharomyces pastorianus
tgaacgaagatgacaggttgctgcc

SEQ ID NO: 72871 - DNA, 25 bp, Saccharomyces pastorianus
gaaggcctaccagcatcttccaaga

SEQ ID NO: 72872 - DNA, 25 bp, Saccharomyces pastorianus
gaagatgacaggttgctgccaattt

SEQ ID NO: 72873 - DNA, 25 bp, Saccharomyces pastorianus
gctgccaattttaaaccatctttcg

SEQ ID NO: 72874 - DNA, 25 bp, Saccharomyces pastorianus
cagcatcttccaagactgaacgaag

SEQ ID NO: 72875 - DNA, 25 bp, Saccharomyces pastorianus
tgacaggttgctgccaattttaaac

SEQ ID NO: 72876 - DNA, 25 bp, Saccharomyces pastorianus
ctaccagcatcttccaagactgaac

SEQ ID NO: 72877 - DNA, 25 bp, Saccharomyces pastorianus
gactggagccacgacagactatctg

SEQ ID NO: 72878 - DNA, 25 bp, Saccharomyces pastorianus
agaactgcgttccatgaaactcacc

SEQ ID NO: 72879 - DNA, 25 bp, Saccharomyces pastorianus
tttagacacaactacggcctcgaag

SEQ ID NO: 72880 - DNA, 25 bp, Saccharomyces pastorianus
gcggcgattatcacggatgcccatt

SEQ ID NO: 72881 - DNA, 25 bp, Saccharomyces pastorianus
ggagatcagctcgaattatccattg

SEQ ID NO: 72882 - DNA, 25 bp, Saccharomyces pastorianus
gagtaccgctacagttttagacaca

SEQ ID NO: 72883 - DNA, 25 bp, Saccharomyces pastorianus
ggttgagcgccgacgaagctttgaa

SEQ ID NO: 72884 - DNA, 25 bp, Saccharomyces pastorianus
ataagtgtcctagattcgtgccaaa

SEQ ID NO: 72885 - DNA, 25 bp, Saccharomyces pastorianus
ctttcgtcaggatacacaattgcag

SEQ ID NO: 72886 - DNA, 25 bp, Saccharomyces pastorianus
ggactgtcacaccattctatctaag

SEQ ID NO: 72887 - DNA, 25 bp, Saccharomyces pastorianus
gatgcccattccgtgactggagcca

SEQ ID NO: 72888 - DNA, 25 bp, Saccharomyces pastorianus
gaacagagccttttaacggtgatga

SEQ ID NO: 72889 - DNA, 25 bp, Saccharomyces pastorianus
aaatacattctctcactaggcacct

SEQ ID NO: 72890 - DNA, 25 bp, Saccharomyces pastorianus
taggcacctctggaaacactctgtt

SEQ ID NO: 72891 - DNA, 25 bp, Saccharomyces pastorianus
gagcccagaaggaaccgcgtcaggt

SEQ ID NO: 72892 - DNA, 25 bp, Saccharomyces pastorianus
gagcagaaattgtactttcaatcag

SEQ ID NO: 72893 - DNA, 25 bp, Saccharomyces pastorianus
ggtttgcgcggaagatagtttgtaa

SEQ ID NO: 72894 - DNA, 25 bp, Saccharomyces pastorianus
atgtgtcttggtatgcttcttagta

SEQ ID NO: 72895 - DNA, 25 bp, Saccharomyces pastorianus
gacattgtgatatgcttggtgggtt

SEQ ID NO: 72896 - DNA, 25 bp, Saccharomyces pastorianus
cactctgttgtttatttaggtttat

SEQ ID NO: 72897 - DNA, 25 bp, Saccharomyces pastorianus
gtatgcttcttagtagacattgtga

SEQ ID NO: 72898 - DNA, 25 bp, Saccharomyces pastorianus
ggtttatatactttattcagactag

SEQ ID NO: 72899 - DNA, 25 bp, Saccharomyces pastorianus
tgcaaagggcgtcgttgtaaaattt

SEQ ID NO: 72900 - DNA, 25 bp, Saccharomyces pastorianus
gcttttctatctcaatcgatcacca

SEQ ID NO: 72901 - DNA, 25 bp, Saccharomyces pastorianus
aggtaagtcttccatcgttcatcgt

SEQ ID NO: 72902 - DNA, 25 bp, Saccharomyces pastorianus
acgagatcttgtccgagcctaatag

SEQ ID NO: 72903 - DNA, 25 bp, Saccharomyces pastorianus
gacttggtcatttatttactaggga

SEQ ID NO: 72904 - DNA, 25 bp, Saccharomyces pastorianus
ggtgactcgtctgtaggtaagtctt

SEQ ID NO: 72905 - DNA, 25 bp, Saccharomyces pastorianus
ctatagaaacgccaatgcagctttg

SEQ ID NO: 72906 - DNA, 25 bp, Saccharomyces pastorianus
tttgttaaggacacgttcgacgaat

SEQ ID NO: 72907 - DNA, 25 bp, Saccharomyces pastorianus
aatcgatcaccattcatccaaatga

SEQ ID NO: 72908 - DNA, 25 bp, Saccharomyces pastorianus
atgtctagggacacctgatgctgaa

SEQ ID NO: 72909 - DNA, 25 bp, Saccharomyces pastorianus
gcagctttggtggtttacgatatca

SEQ ID NO: 72910 - DNA, 25 bp, Saccharomyces pastorianus
gtaaattagcccaacaatccaggag

SEQ ID NO: 72911 - DNA, 25 bp, Saccharomyces pastorianus
ggacgcgccaaatctcaacgcatta

SEQ ID NO: 72912 - DNA, 25 bp, Saccharomyces pastorianus
attatgcggctgctgtaacaggtta

SEQ ID NO: 72913 - DNA, 25 bp, Saccharomyces pastorianus
cctttgcaagcagaattccggaata

SEQ ID NO: 72914 - DNA, 25 bp, Saccharomyces pastorianus
tcgtggaacacaactatgcaggata

SEQ ID NO: 72915 - DNA, 25 bp, Saccharomyces pastorianus
atgaaaacccctcttgccaataaag

SEQ ID NO: 72916 - DNA, 25 bp, Saccharomyces pastorianus
aatccaggagccagatccaagccgg

SEQ ID NO: 72917 - DNA, 25 bp, Saccharomyces pastorianus
gagactccagaaagatcctatcgca

SEQ ID NO: 72918 - DNA, 25 bp, Saccharomyces pastorianus
gaatacggcatccactatcatcaat

SEQ ID NO: 72919 - DNA, 25 bp, Saccharomyces pastorianus
agaacctttgatacgagactccaga

SEQ ID NO: 72920 - DNA, 25 bp, Saccharomyces pastorianus
gatccaagccggtccaaagacacaa

SEQ ID NO: 72921 - DNA, 25 bp, Saccharomyces pastorianus
gatttcatccagttagtatacacca

SEQ ID NO: 72922 - DNA, 25 bp, Saccharomyces pastorianus
gcctaatggtgagttgattgctgaa

SEQ ID NO: 72923 - DNA, 25 bp, Saccharomyces pastorianus
aatggaaatgccgtttggtgagatt

SEQ ID NO: 72924 - DNA, 25 bp, Saccharomyces pastorianus
agatccaattcatttgacacatttg

SEQ ID NO: 72925 - DNA, 25 bp, Saccharomyces pastorianus
gtgtctctacacaatcagcagcggg

SEQ ID NO: 72926 - DNA, 25 bp, Saccharomyces pastorianus
gatgcttaacgagactaagttgcca

SEQ ID NO: 72927 - DNA, 25 bp, Saccharomyces pastorianus
tagatcaccttaatccggagtacgg

SEQ ID NO: 72928 - DNA, 25 bp, Saccharomyces pastorianus
gcagcgggcgatttcattaaggcat

SEQ ID NO: 72929 - DNA, 25 bp, Saccharomyces pastorianus
gagcaatgaactcgcttcaggaata

SEQ ID NO: 72930 - DNA, 25 bp, Saccharomyces pastorianus
tggtgagattgaacctctaggcttt

SEQ ID NO: 72931 - DNA, 25 bp, Saccharomyces pastorianus
gttacattgagcactaactcgagca

SEQ ID NO: 72932 - DNA, 25 bp, Saccharomyces pastorianus
atttgcaagcacacagttcctgaga

SEQ ID NO: 72933 - DNA, 25 bp, Saccharomyces pastorianus
ggatacacttggaatacggcattga

SEQ ID NO: 72934 - DNA, 25 bp, Saccharomyces pastorianus
gaagggcgcccatgctgttagctaa

SEQ ID NO: 72935 - DNA, 25 bp, Saccharomyces pastorianus
ggtgcccggcttcgttatttgcaag

SEQ ID NO: 72936 - DNA, 25 bp, Saccharomyces pastorianus
gagcatttcttctaacgtagccgaa

SEQ ID NO: 72937 - DNA, 25 bp, Saccharomyces pastorianus
agagactggcatccgaccttctgga

SEQ ID NO: 72938 - DNA, 25 bp, Saccharomyces pastorianus
aaggtcttctgtgaatcctgctacg

SEQ ID NO: 72939 - DNA, 25 bp, Saccharomyces pastorianus
ttctggactcactattgtccgggtg

SEQ ID NO: 72940 - DNA, 25 bp, Saccharomyces pastorianus
agctggacgttagagtatctccttt

SEQ ID NO: 72941 - DNA, 25 bp, Saccharomyces pastorianus
gatagacgaccttcattgccaagaa

SEQ ID NO: 72942 - DNA, 25 bp, Saccharomyces pastorianus
atctgccattggtagactaaggtct

SEQ ID NO: 72943 - DNA, 25 bp, Saccharomyces pastorianus
tgtcgacattattggatccgtcccc

SEQ ID NO: 72944 - DNA, 25 bp, Saccharomyces pastorianus
cttctcagatcctactataccggag

SEQ ID NO: 72945 - DNA, 25 bp, Saccharomyces pastorianus
tagagttgacaaggctacccacact

SEQ ID NO: 72946 - DNA, 25 bp, Saccharomyces pastorianus
ggttagcgggtccatcaaaccactg

SEQ ID NO: 72947 - DNA, 25 bp, Saccharomyces pastorianus
gctgacttggaagctgcacaacgaa

SEQ ID NO: 72948 - DNA, 25 bp, Saccharomyces pastorianus
cgagccaaggcccattagtttgaaa

SEQ ID NO: 72949 - DNA, 25 bp, Saccharomyces pastorianus
aacaatgccagctctaactctaaca

SEQ ID NO: 72950 - DNA, 25 bp, Saccharomyces pastorianus
aatattctttggaacccagcgagcc

SEQ ID NO: 72951 - DNA, 25 bp, Saccharomyces pastorianus
ttgcggccttttcctgaaattgcat

SEQ ID NO: 72952 - DNA, 25 bp, Saccharomyces pastorianus
gagcccagtgggaagaactacctct

SEQ ID NO: 72953 - DNA, 25 bp, Saccharomyces pastorianus
gtggaggctcgctgcccagtaataa

SEQ ID NO: 72954 - DNA, 25 bp, Saccharomyces pastorianus
ggaacattgtccagttttgcacttt

SEQ ID NO: 72955 - DNA, 25 bp, Saccharomyces pastorianus
tgcctcatcgtgacggcggtttgta

SEQ ID NO: 72956 - DNA, 25 bp, Saccharomyces pastorianus
aattccatgccattttcgtcagcaa

SEQ ID NO: 72957 - DNA, 25 bp, Saccharomyces pastorianus
attcacacccatatcttcatatacg

SEQ ID NO: 72958 - DNA, 25 bp, Saccharomyces pastorianus
ttatcgttgtccaccagcatggcat

SEQ ID NO: 72959 - DNA, 25 bp, Saccharomyces pastorianus
actggtgtccaaatcttcgaattgc

SEQ ID NO: 72960 - DNA, 25 bp, Saccharomyces pastorianus
ttgcactttgcttcaattccatgcc

SEQ ID NO: 72961 - DNA, 25 bp, Saccharomyces pastorianus
ctttgtgcaagtttgtcttcctttt

SEQ ID NO: 72962 - DNA, 25 bp, Saccharomyces pastorianus
gcaactttgctcattagttcatcca

SEQ ID NO: 72963 - DNA, 25 bp, Saccharomyces pastorianus
ggtttgtacccttgatgcgaccgaa

SEQ ID NO: 72964 - DNA, 25 bp, Saccharomyces pastorianus
ttcgtcgtcaacattaacctctttc

SEQ ID NO: 72965 - DNA, 25 bp, Saccharomyces pastorianus
cgctcgtttttcttccttatagcat

SEQ ID NO: 72966 - DNA, 25 bp, Saccharomyces pastorianus
atggatgcggacacctgtctcattg

SEQ ID NO: 72967 - DNA, 25 bp, Saccharomyces pastorianus
tgttggtttcttgtttctcctcctt

SEQ ID NO: 72968 - DNA, 25 bp, Saccharomyces pastorianus
gatactcgtatccaggtcttcgaac

SEQ ID NO: 72969 - DNA, 25 bp, Saccharomyces pastorianus
tttcagtagctgtaaccgctcgttt

SEQ ID NO: 72970 - DNA, 25 bp, Saccharomyces pastorianus
ggagatctcctcattttcgttgaga

SEQ ID NO: 72971 - DNA, 25 bp, Saccharomyces pastorianus
gcggtttgcactcttgatgcgacag

SEQ ID NO: 72972 - DNA, 25 bp, Saccharomyces pastorianus
tgtctcattgtgacggcggtttgca

SEQ ID NO: 72973 - DNA, 25 bp, Saccharomyces pastorianus
atagcatccgaattgacgcccatat

SEQ ID NO: 72974 - DNA, 25 bp, Saccharomyces pastorianus
gacgccttatttgcttgcttttgca

SEQ ID NO: 72975 - DNA, 25 bp, Saccharomyces pastorianus
gaatccactctggatgccagtttca

SEQ ID NO: 72976 - DNA, 25 bp, Saccharomyces pastorianus
ttccccactgatctaattctcaaag

SEQ ID NO: 72977 - DNA, 25 bp, Saccharomyces pastorianus
ggttcctcgcttatttctaattcta

SEQ ID NO: 72978 - DNA, 25 bp, Saccharomyces pastorianus
atggccgctcacagagttcaagcaa

SEQ ID NO: 72979 - DNA, 25 bp, Saccharomyces pastorianus
gaggttctgcttcaagatgaccgtt

SEQ ID NO: 72980 - DNA, 25 bp, Saccharomyces pastorianus
ttcatgttcgacaccgatctcatag

SEQ ID NO: 72981 - DNA, 25 bp, Saccharomyces pastorianus
ttaaagatgactcccagatccagcg

SEQ ID NO: 72982 - DNA, 25 bp, Saccharomyces pastorianus
gcgactactgtatgccttggagaac

SEQ ID NO: 72983 - DNA, 25 bp, Saccharomyces pastorianus
caacgggcggtgttggcttgaacaa

SEQ ID NO: 72984 - DNA, 25 bp, Saccharomyces pastorianus
gcattatccgccgtgtttaaagatg

SEQ ID NO: 72985 - DNA, 25 bp, Saccharomyces pastorianus
acgaacaactgtcttccaagctggg

SEQ ID NO: 72986 - DNA, 25 bp, Saccharomyces pastorianus
agaatacgaccagttgtcccacaac

SEQ ID NO: 72987 - DNA, 25 bp, Saccharomyces pastorianus
cggacttgtgcgttgtcgtttcttt

SEQ ID NO: 72988 - DNA, 25 bp, Saccharomyces pastorianus
cgtactcgaaaagcgcactgccatg

SEQ ID NO: 72989 - DNA, 25 bp, Saccharomyces pastorianus
gtggtgacacacttgtaacccgcta

SEQ ID NO: 72990 - DNA, 25 bp, Saccharomyces pastorianus
tctaacaaagactggccgggcgtat

SEQ ID NO: 72991 - DNA, 25 bp, Saccharomyces pastorianus
actgccatgattcgccggacttgtg

SEQ ID NO: 72992 - DNA, 25 bp, Saccharomyces pastorianus
ccggcaccagccgtatagtaggttt

SEQ ID NO: 72993 - DNA, 25 bp, Saccharomyces pastorianus
acgggcgtgtcaccaagatggccta

SEQ ID NO: 72994 - DNA, 25 bp, Saccharomyces pastorianus
atggcgctgcgtttgcttcacgggc

SEQ ID NO: 72995 - DNA, 25 bp, Saccharomyces pastorianus
ggcgtatttcttttcggcgtcattg

SEQ ID NO: 72996 - DNA, 25 bp, Saccharomyces pastorianus
atagtaggtttctgtttctcttcgc

SEQ ID NO: 72997 - DNA, 25 bp, Saccharomyces pastorianus
tggacttctctcttgctttttctaa

SEQ ID NO: 72998 - DNA, 25 bp, Saccharomyces pastorianus
catctccgaacaagcctttgcaaag

SEQ ID NO: 72999 - DNA, 25 bp, Saccharomyces pastorianus
gtcttctacactgtcaaccgataca

SEQ ID NO: 73000 - DNA, 25 bp, Saccharomyces pastorianus
gatggaatcccaactttcagaaacg

SEQ ID NO: 73001 - DNA, 25 bp, Saccharomyces pastorianus
aatcgtcctcgtctggtgtgtttaa

SEQ ID NO: 73002 - DNA, 25 bp, Saccharomyces pastorianus
aactgaactctaaatcgtcctcgtc

SEQ ID NO: 73003 - DNA, 25 bp, Saccharomyces pastorianus
agtttcaatattcctgctccacagg

SEQ ID NO: 73004 - DNA, 25 bp, Saccharomyces pastorianus
gtgtttaatccttttacttcgccat

SEQ ID NO: 73005 - DNA, 25 bp, Saccharomyces pastorianus
gaacgagagcctttgagcaacgaaa

SEQ ID NO: 73006 - DNA, 25 bp, Saccharomyces pastorianus
gaagcaaggtgtcgatagccctccc

SEQ ID NO: 73007 - DNA, 25 bp, Saccharomyces pastorianus
gactcatttggcacccagtttcaat

SEQ ID NO: 73008 - DNA, 25 bp, Saccharomyces pastorianus
aattctccatttaatccactgctgt

SEQ ID NO: 73009 - DNA, 25 bp, Saccharomyces pastorianus
caatcgttaactcttcaactaccgg

SEQ ID NO: 73010 - DNA, 25 bp, Saccharomyces pastorianus
caatgtcttcaacctttactttgcc

SEQ ID NO: 73011 - DNA, 25 bp, Saccharomyces pastorianus
tagctcttccacatcaatcgttaac

SEQ ID NO: 73012 - DNA, 25 bp, Saccharomyces pastorianus
taacgattagttcctctggatcatc

SEQ ID NO: 73013 - DNA, 25 bp, Saccharomyces pastorianus
atctcttcctcattcactactattt

SEQ ID NO: 73014 - DNA, 25 bp, Saccharomyces pastorianus
atccaccgaaacttctcgtagtcaa

SEQ ID NO: 73015 - DNA, 25 bp, Saccharomyces pastorianus
gtcattcaaatctgttccatctacc

SEQ ID NO: 73016 - DNA, 25 bp, Saccharomyces pastorianus
accggttcttcgcaaactactgatt

SEQ ID NO: 73017 - DNA, 25 bp, Saccharomyces pastorianus
aaaatactccagcttctgcttcaat

SEQ ID NO: 73018 - DNA, 25 bp, Saccharomyces pastorianus
actactatttccactggtgctacta

SEQ ID NO: 73019 - DNA, 25 bp, Saccharomyces pastorianus
gtagcacttctatcactagttccga

SEQ ID NO: 73020 - DNA, 25 bp, Saccharomyces pastorianus
agacactcagacctctactgttaca

SEQ ID NO: 73021 - DNA, 25 bp, Saccharomyces pastorianus
gacttcgacgggtatgtctattcct

SEQ ID NO: 73022 - DNA, 25 bp, Saccharomyces pastorianus
acaagtgtcagctcttcaattgcca

SEQ ID NO: 73023 - DNA, 25 bp, Saccharomyces pastorianus
tgttagtgatgacttcgacgggtat

SEQ ID NO: 73024 - DNA, 25 bp, Saccharomyces pastorianus
attcctttgaagatgacttgtccca

SEQ ID NO: 73025 - DNA, 25 bp, Saccharomyces pastorianus
gacgggtatgtctattcctttgaag

SEQ ID NO: 73026 - DNA, 25 bp, Saccharomyces pastorianus
tgaagatgacttgtcccaggccaac

SEQ ID NO: 73027 - DNA, 25 bp, Saccharomyces pastorianus
tcttcaattgccacatcgtctgatg

SEQ ID NO: 73028 - DNA, 25 bp, Saccharomyces pastorianus
ggaataatcaccaccacaacagaac

SEQ ID NO: 73029 - DNA, 25 bp, Saccharomyces pastorianus
tactgttacaggtcccaatggttta

SEQ ID NO: 73030 - DNA, 25 bp, Saccharomyces pastorianus
cccaaactataccactacaggaata

SEQ ID NO: 73031 - DNA, 25 bp, Saccharomyces pastorianus
agaagatactcagtggctgctggac

SEQ ID NO: 73032 - DNA, 25 bp, Saccharomyces pastorianus
aagagaggacactacgcgctaatat

SEQ ID NO: 73033 - DNA, 25 bp, Saccharomyces pastorianus
gttcggagcagacccaaacttaatt

SEQ ID NO: 73034 - DNA, 25 bp, Saccharomyces pastorianus
aaagtcttctctgtactcaagtgcc

SEQ ID NO: 73035 - DNA, 25 bp, Saccharomyces pastorianus
atattatcctactgtgagctccaag

SEQ ID NO: 73036 - DNA, 25 bp, Saccharomyces pastorianus
gttacgggtgcttgttttctatggc

SEQ ID NO: 73037 - DNA, 25 bp, Saccharomyces pastorianus
gatgcggtagtccttgaacaaaatt

SEQ ID NO: 73038 - DNA, 25 bp, Saccharomyces pastorianus
gagctccaaggagactttccagaat

SEQ ID NO: 73039 - DNA, 25 bp, Saccharomyces pastorianus
gcacctcgcttactaaacttttcaa

SEQ ID NO: 73040 - DNA, 25 bp, Saccharomyces pastorianus
gttcatttggcgcaccattcagaat

SEQ ID NO: 73041 - DNA, 25 bp, Saccharomyces pastorianus
gctatgggtggctcgattattttaa

SEQ ID NO: 73042 - DNA, 25 bp, Saccharomyces pastorianus
tagtcggtgaccaggaagcattcag

SEQ ID NO: 73043 - DNA, 25 bp, Saccharomyces pastorianus
gggttagacactttcatcgatatag

SEQ ID NO: 73044 - DNA, 25 bp, Saccharomyces pastorianus
ggaccagtattttcgtatttagttg

SEQ ID NO: 73045 - DNA, 25 bp, Saccharomyces pastorianus
agcattcaggccaacttacttaaga

SEQ ID NO: 73046 - DNA, 25 bp, Saccharomyces pastorianus
aatctttactgggtgtcgagggcaa

SEQ ID NO: 73047 - DNA, 25 bp, Saccharomyces pastorianus
agattaatgtttccctgtaaggtcg

SEQ ID NO: 73048 - DNA, 25 bp, Saccharomyces pastorianus
gggctctttgtcaagaaattcgtct

SEQ ID NO: 73049 - DNA, 25 bp, Saccharomyces pastorianus
tttggagcctactcacaagcttcaa

SEQ ID NO: 73050 - DNA, 25 bp, Saccharomyces pastorianus
ttccatccatgtgatacgtcaagca

SEQ ID NO: 73051 - DNA, 25 bp, Saccharomyces pastorianus
aatactgcttggtactctttccatc

SEQ ID NO: 73052 - DNA, 25 bp, Saccharomyces pastorianus
gtgaacccttactgcttttacgaat

SEQ ID NO: 73053 - DNA, 25 bp, Saccharomyces pastorianus
agtggtcacacttggctaccggaga

SEQ ID NO: 73054 - DNA, 25 bp, Saccharomyces pastorianus
gaactacctgcgctgccggatggac

SEQ ID NO: 73055 - DNA, 25 bp, Saccharomyces pastorianus
gaacgcaatgaactgccgcttactg

SEQ ID NO: 73056 - DNA, 25 bp, Saccharomyces pastorianus
gcttactggccaagaactacctgcg

SEQ ID NO: 73057 - DNA, 25 bp, Saccharomyces pastorianus
gaccacgacggcgattgcacgaaac

SEQ ID NO: 73058 - DNA, 25 bp, Saccharomyces pastorianus
ccggatggaccaccagctgatggat

SEQ ID NO: 73059 - DNA, 25 bp, Saccharomyces pastorianus
ggagtaccttaaatgcatgcagctg

SEQ ID NO: 73060 - DNA, 25 bp, Saccharomyces pastorianus
agaaagaggctcgttcccactagac

SEQ ID NO: 73061 - DNA, 25 bp, Saccharomyces pastorianus
agctggtgcagaacgagaacgcaat

SEQ ID NO: 73062 - DNA, 25 bp, Saccharomyces pastorianus
cacgaaacacatgcaggagtacctt

SEQ ID NO: 73063 - DNA, 25 bp, Saccharomyces pastorianus
gatggatacgacgagtggtcacact

SEQ ID NO: 73064 - DNA, 25 bp, Saccharomyces pastorianus
gatgattacgttcccgtcaaaagca

SEQ ID NO: 73065 - DNA, 25 bp, Saccharomyces pastorianus
ttacgttcccgtcaaaagcacacag

SEQ ID NO: 73066 - DNA, 25 bp, Saccharomyces pastorianus
tcaaaagcacacaggaatctcaaat

SEQ ID NO: 73067 - DNA, 25 bp, Saccharomyces pastorianus
ctgatgattacgttcccgtcaaaag

SEQ ID NO: 73068 - DNA, 25 bp, Saccharomyces pastorianus
tacgttcccgtcaaaagcacacagg

SEQ ID NO: 73069 - DNA, 25 bp, Saccharomyces pastorianus
caaaagcacacaggaatctcaaatg

SEQ ID NO: 73070 - DNA, 25 bp, Saccharomyces pastorianus
gattacgttcccgtcaaaagcacac

SEQ ID NO: 73071 - DNA, 25 bp, Saccharomyces pastorianus
tctgatgattacgttcccgtcaaaa

SEQ ID NO: 73072 - DNA, 25 bp, Saccharomyces pastorianus
tgatgattacgttcccgtcaaaagc

SEQ ID NO: 73073 - DNA, 25 bp, Saccharomyces pastorianus
acgttcccgtcaaaagcacacagga

SEQ ID NO: 73074 - DNA, 25 bp, Saccharomyces pastorianus
attacgttcccgtcaaaagcacaca

SEQ ID NO: 73075 - DNA, 25 bp, Saccharomyces pastorianus
gacggtcacagagacggtgtctatg

SEQ ID NO: 73076 - DNA, 25 bp, Saccharomyces pastorianus
ggtcacagagacggtgtctatgcta

SEQ ID NO: 73077 - DNA, 25 bp, Saccharomyces pastorianus
ggacggtcacagagacggtgtctat

SEQ ID NO: 73078 - DNA, 25 bp, Saccharomyces pastorianus
tgtaggtcagttgggggacggtcac

SEQ ID NO: 73079 - DNA, 25 bp, Saccharomyces pastorianus
cggtcacagagacggtgtctatgct

SEQ ID NO: 73080 - DNA, 25 bp, Saccharomyces pastorianus
tcacagagacggtgtctatgctatt

SEQ ID NO: 73081 - DNA, 25 bp, Saccharomyces pastorianus
acggtcacagagacggtgtctatgc

SEQ ID NO: 73082 - DNA, 25 bp, Saccharomyces pastorianus
gtcacagagacggtgtctatgctat

SEQ ID NO: 73083 - DNA, 25 bp, Saccharomyces pastorianus
ggaggagtccttcttggcaatattt

SEQ ID NO: 73084 - DNA, 25 bp, Saccharomyces pastorianus
aaggtatacccagcgcaaagaaaag

SEQ ID NO: 73085 - DNA, 25 bp, Saccharomyces pastorianus
cttgccttagattcacatatggact

SEQ ID NO: 73086 - DNA, 25 bp, Saccharomyces pastorianus
attatccgacaatcagttgcttcaa

SEQ ID NO: 73087 - DNA, 25 bp, Saccharomyces pastorianus
tgaaaccgtttttaccaccattcag

SEQ ID NO: 73088 - DNA, 25 bp, Saccharomyces pastorianus
aagatactgaaaacgggccttcgag

SEQ ID NO: 73089 - DNA, 25 bp, Saccharomyces pastorianus
gacaggactactaccagctggagga

SEQ ID NO: 73090 - DNA, 25 bp, Saccharomyces pastorianus
aatcgccatcaggtacaaaaatcag

SEQ ID NO: 73091 - DNA, 25 bp, Saccharomyces pastorianus
gatgatgttattcgcgaccaaatcg

SEQ ID NO: 73092 - DNA, 25 bp, Saccharomyces pastorianus
gttattcttcgaggccactgattac

SEQ ID NO: 73093 - DNA, 25 bp, Saccharomyces pastorianus
acggtaagtacatcggcaaggcatt

SEQ ID NO: 73094 - DNA, 25 bp, Saccharomyces pastorianus
cggagtgtgtttattgtgcggccaa

SEQ ID NO: 73095 - DNA, 25 bp, Saccharomyces pastorianus
tacccaatttagctcatttcctgaa

SEQ ID NO: 73096 - DNA, 25 bp, Saccharomyces pastorianus
aacgctatatatctgtcatacggca

SEQ ID NO: 73097 - DNA, 25 bp, Saccharomyces pastorianus
gtaaatctctccaagttttcccttg

SEQ ID NO: 73098 - DNA, 25 bp, Saccharomyces pastorianus
gacaacgatggcgacagcacgacta

SEQ ID NO: 73099 - DNA, 25 bp, Saccharomyces pastorianus
gaggtacgttttatgcagcacccta

SEQ ID NO: 73100 - DNA, 25 bp, Saccharomyces pastorianus
ataaactcaagatcatacccgtccc

SEQ ID NO: 73101 - DNA, 25 bp, Saccharomyces pastorianus
acaaattcagtacccctgtctattt

SEQ ID NO: 73102 - DNA, 25 bp, Saccharomyces pastorianus
gtgcggccaaagatgtcatatccaa

SEQ ID NO: 73103 - DNA, 25 bp, Saccharomyces pastorianus
agcaccctatctgagcaagtacgga

SEQ ID NO: 73104 - DNA, 25 bp, Saccharomyces pastorianus
atgcgaaatcacatcttcctacggg

SEQ ID NO: 73105 - DNA, 25 bp, Saccharomyces pastorianus
agtacacccaggactatgtcaccta

SEQ ID NO: 73106 - DNA, 25 bp, Saccharomyces pastorianus
aatgagtagttgctgtgacgatgac

SEQ ID NO: 73107 - DNA, 25 bp, Saccharomyces pastorianus
tagcgtggacacttctgaaatcagt

SEQ ID NO: 73108 - DNA, 25 bp, Saccharomyces pastorianus
gatttcacaaatccgccagacatta

SEQ ID NO: 73109 - DNA, 25 bp, Saccharomyces pastorianus
gtgacgatgactgtgcattttgcaa

SEQ ID NO: 73110 - DNA, 25 bp, Saccharomyces pastorianus
tatacgccgggtatactatggccca

SEQ ID NO: 73111 - DNA, 25 bp, Saccharomyces pastorianus
gaacaaactacttcgtatacgccgg

SEQ ID NO: 73112 - DNA, 25 bp, Saccharomyces pastorianus
tagcggtaagcatccaagaaacagt

SEQ ID NO: 73113 - DNA, 25 bp, Saccharomyces pastorianus
gaataagttcccagcttagcggtaa

SEQ ID NO: 73114 - DNA, 25 bp, Saccharomyces pastorianus
atgtcacctagtttatcgccttcta

SEQ ID NO: 73115 - DNA, 25 bp, Saccharomyces pastorianus
gaagaagctagctcaacagcaatta

SEQ ID NO: 73116 - DNA, 25 bp, Saccharomyces pastorianus
gcatatcagcatctgcagcggcgga

SEQ ID NO: 73117 - DNA, 25 bp, Saccharomyces pastorianus
gaacggcatatcagcatctgcagcg

SEQ ID NO: 73118 - DNA, 25 bp, Saccharomyces pastorianus
ataccaggaagaacggcatatcagc

SEQ ID NO: 73119 - DNA, 25 bp, Saccharomyces pastorianus
agcggcggacctggccagtgtattc

SEQ ID NO: 73120 - DNA, 25 bp, Saccharomyces pastorianus
gaagtatactgtggaaatgcggttt

SEQ ID NO: 73121 - DNA, 25 bp, Saccharomyces pastorianus
gaaatcctccaaaaataccaggaag

SEQ ID NO: 73122 - DNA, 25 bp, Saccharomyces pastorianus
tgcggtttcgaaatcctccaaaaat

SEQ ID NO: 73123 - DNA, 25 bp, Saccharomyces pastorianus
ggacctggccagtgtattctcatct

SEQ ID NO: 73124 - DNA, 25 bp, Saccharomyces pastorianus
cctggccagtgtattctcatctgca

SEQ ID NO: 73125 - DNA, 25 bp, Saccharomyces pastorianus
atcagcatctgcagcggcggacctg

SEQ ID NO: 73126 - DNA, 25 bp, Saccharomyces pastorianus
gaaatgcggtttcgaaatcctccaa

SEQ ID NO: 73127 - DNA, 25 bp, Saccharomyces pastorianus
gagagcacatcacattagtcgcaga

SEQ ID NO: 73128 - DNA, 25 bp, Saccharomyces pastorianus
agggttcgtatcttctgtactcaga

SEQ ID NO: 73129 - DNA, 25 bp, Saccharomyces pastorianus
gaccctacgccatatgaacttttta

SEQ ID NO: 73130 - DNA, 25 bp, Saccharomyces pastorianus
actttttaggccattcgtctacaag

SEQ ID NO: 73131 - DNA, 25 bp, Saccharomyces pastorianus
aatggacggctattctatttacctg

SEQ ID NO: 73132 - DNA, 25 bp, Saccharomyces pastorianus
gtcttacgaaatttcaactccgatg

SEQ ID NO: 73133 - DNA, 25 bp, Saccharomyces pastorianus
gtacagtacttcattgttacgggtt

SEQ ID NO: 73134 - DNA, 25 bp, Saccharomyces pastorianus
gatgttaaatacacctccatggaat

SEQ ID NO: 73135 - DNA, 25 bp, Saccharomyces pastorianus
ggaagatcctatgactttacgatta

SEQ ID NO: 73136 - DNA, 25 bp, Saccharomyces pastorianus
aaattgttacttgtcacttcatggg

SEQ ID NO: 73137 - DNA, 25 bp, Saccharomyces pastorianus
ttgggtacgtacacggatatgtctt

SEQ ID NO: 73138 - DNA, 25 bp, Saccharomyces pastorianus
tgatcggtactctagcattcccaat

SEQ ID NO: 73139 - DNA, 25 bp, Saccharomyces pastorianus
accagctgggttgttgatgactatt

SEQ ID NO: 73140 - DNA, 25 bp, Saccharomyces pastorianus
atttctttcggtactaccagctggg

SEQ ID NO: 73141 - DNA, 25 bp, Saccharomyces pastorianus
tttcgataaccgactctagaggatc

SEQ ID NO: 73142 - DNA, 25 bp, Saccharomyces pastorianus
tatcagaaccgctatcataccgatt

SEQ ID NO: 73143 - DNA, 25 bp, Saccharomyces pastorianus
agtgctgtagctttatcggtcgcat

SEQ ID NO: 73144 - DNA, 25 bp, Saccharomyces pastorianus
aaagcatccgctgagtccgaaacga

SEQ ID NO: 73145 - DNA, 25 bp, Saccharomyces pastorianus
gcaatctgcttcttacctatagcac

SEQ ID NO: 73146 - DNA, 25 bp, Saccharomyces pastorianus
ggttcatatccatggttgtgtcatt

SEQ ID NO: 73147 - DNA, 25 bp, Saccharomyces pastorianus
ggtcgcatttgcagtaagttcattg

SEQ ID NO: 73148 - DNA, 25 bp, Saccharomyces pastorianus
gttatatcgcaactatttctttcgg

SEQ ID NO: 73149 - DNA, 25 bp, Saccharomyces pastorianus
tttcgccgctgttgccgccgttgcc

SEQ ID NO: 73150 - DNA, 25 bp, Saccharomyces pastorianus
tactgtcgcctctttcgccgctgtt

SEQ ID NO: 73151 - DNA, 25 bp, Saccharomyces pastorianus
ctttcgccgctgttgccgccgttgc

SEQ ID NO: 73152 - DNA, 25 bp, Saccharomyces pastorianus
tgcaattctctactgtcgcctcttt

SEQ ID NO: 73153 - DNA, 25 bp, Saccharomyces pastorianus
ttcgccgctgttgccgccgttgcct

SEQ ID NO: 73154 - DNA, 25 bp, Saccharomyces pastorianus
atgcaattctctactgtcgcctctt

SEQ ID NO: 73155 - DNA, 25 bp, Saccharomyces pastorianus
aattctctactgtcgcctctttcgc

SEQ ID NO: 73156 - DNA, 25 bp, Saccharomyces pastorianus
attctctactgtcgcctctttcgcc

SEQ ID NO: 73157 - DNA, 25 bp, Saccharomyces pastorianus
actgtcgcctctttcgccgctgttg

SEQ ID NO: 73158 - DNA, 25 bp, Saccharomyces pastorianus
tgttgccgccgttgcctctgccgct

SEQ ID NO: 73159 - DNA, 25 bp, Saccharomyces pastorianus
tctttcgccgctgttgccgccgttg

SEQ ID NO: 73160 - DNA, 25 bp, Saccharomyces pastorianus
ggacggttttcgaaatcacaaatag

SEQ ID NO: 73161 - DNA, 25 bp, Saccharomyces pastorianus
ttgttcagccacagacactttgacg

SEQ ID NO: 73162 - DNA, 25 bp, Saccharomyces pastorianus
attaggacgcaaatattcgggacgg

SEQ ID NO: 73163 - DNA, 25 bp, Saccharomyces pastorianus
acaatgatctgaaccctgtcgggat

SEQ ID NO: 73164 - DNA, 25 bp, Saccharomyces pastorianus
gaagctactgaaacacctgagacat

SEQ ID NO: 73165 - DNA, 25 bp, Saccharomyces pastorianus
tgctggccaaaagaacgtaccgtga

SEQ ID NO: 73166 - DNA, 25 bp, Saccharomyces pastorianus
aaaaaatcatgaagcccttctccac

SEQ ID NO: 73167 - DNA, 25 bp, Saccharomyces pastorianus
gacgtctcaaccagttgccattaaa

SEQ ID NO: 73168 - DNA, 25 bp, Saccharomyces pastorianus
gaacgtaccgtgaactgaagctact

SEQ ID NO: 73169 - DNA, 25 bp, Saccharomyces pastorianus
tgagaatctgatttgtctgcaggac

SEQ ID NO: 73170 - DNA, 25 bp, Saccharomyces pastorianus
gtgcgttcggactcgtttgttcagc

SEQ ID NO: 73171 - DNA, 25 bp, Saccharomyces pastorianus
aaagccgaagtactatccaaagaga

SEQ ID NO: 73172 - DNA, 25 bp, Saccharomyces pastorianus
tcaaggcactagtaacgatgatggt

SEQ ID NO: 73173 - DNA, 25 bp, Saccharomyces pastorianus
ggtagcgagacacacaaaagcattc

SEQ ID NO: 73174 - DNA, 25 bp, Saccharomyces pastorianus
atgatgaagacagcgtggaggacaa

SEQ ID NO: 73175 - DNA, 25 bp, Saccharomyces pastorianus
gaacgtactgttcataagacaaaag

SEQ ID NO: 73176 - DNA, 25 bp, Saccharomyces pastorianus
agataacggttctccttataccaat

SEQ ID NO: 73177 - DNA, 25 bp, Saccharomyces pastorianus
gaagcccatggcagtgaaaacgaaa

SEQ ID NO: 73178 - DNA, 25 bp, Saccharomyces pastorianus
gacacacaaaagcattcaaggcact

SEQ ID NO: 73179 - DNA, 25 bp, Saccharomyces pastorianus
aacgatgatggtgaaagtagcgatg

SEQ ID NO: 73180 - DNA, 25 bp, Saccharomyces pastorianus
aaagctgatagtgcacaagacaatg

SEQ ID NO: 73181 - DNA, 25 bp, Saccharomyces pastorianus
aagttataatggtagcgagacacac

SEQ ID NO: 73182 - DNA, 25 bp, Saccharomyces pastorianus
gttatggtccatcctcaagtgaaaa

SEQ ID NO: 73183 - DNA, 25 bp, Saccharomyces pastorianus
gatatcgtacgatcgctgtatacaa

SEQ ID NO: 73184 - DNA, 25 bp, Saccharomyces pastorianus
agcagacatggtaacgccggattta

SEQ ID NO: 73185 - DNA, 25 bp, Saccharomyces pastorianus
acacgaggcgtgcaagatctatttt

SEQ ID NO: 73186 - DNA, 25 bp, Saccharomyces pastorianus
gtagataattcgttcatcccgcttt

SEQ ID NO: 73187 - DNA, 25 bp, Saccharomyces pastorianus
tcccgctttgggtacgatacgtcga

SEQ ID NO: 73188 - DNA, 25 bp, Saccharomyces pastorianus
atgggccaatggattcgttacgcga

SEQ ID NO: 73189 - DNA, 25 bp, Saccharomyces pastorianus
ggtgttctttggaaccaggtgtcaa

SEQ ID NO: 73190 - DNA, 25 bp, Saccharomyces pastorianus
gcatggaactccttcgttgatttcg

SEQ ID NO: 73191 - DNA, 25 bp, Saccharomyces pastorianus
tgggccaagttcgaaagcagacatg

SEQ ID NO: 73192 - DNA, 25 bp, Saccharomyces pastorianus
gtctagctttagacaccgtggctaa

SEQ ID NO: 73193 - DNA, 25 bp, Saccharomyces pastorianus
caatttggtaatttaaactctatcg

SEQ ID NO: 73194 - DNA, 25 bp, Saccharomyces pastorianus
tgaagcttcattaagtcgtgacgca

SEQ ID NO: 73195 - DNA, 25 bp, Saccharomyces pastorianus
tggtaatttaaactctatcgaagaa

SEQ ID NO: 73196 - DNA, 25 bp, Saccharomyces pastorianus
atgaagcttcattaagtcgtgacgc

SEQ ID NO: 73197 - DNA, 25 bp, Saccharomyces pastorianus
ggactatgaagcttcattaagtcgt

SEQ ID NO: 73198 - DNA, 25 bp, Saccharomyces pastorianus
aggaaaatggactatgaagcttcat

SEQ ID NO: 73199 - DNA, 25 bp, Saccharomyces pastorianus
ctatgaagcttcattaagtcgtgac

SEQ ID NO: 73200 - DNA, 25 bp, Saccharomyces pastorianus
tttggtaatttaaactctatcgaag

SEQ ID NO: 73201 - DNA, 25 bp, Saccharomyces pastorianus
gaaaatggactatgaagcttcatta

SEQ ID NO: 73202 - DNA, 25 bp, Saccharomyces pastorianus
ctatcgaagaaactatcagttataa

SEQ ID NO: 73203 - DNA, 25 bp, Saccharomyces pastorianus
tatgaagcttcattaagtcgtgacg

SEQ ID NO: 73204 - DNA, 25 bp, Saccharomyces pastorianus
agaggcaatcttgttcttcaaaaac

SEQ ID NO: 73205 - DNA, 25 bp, Saccharomyces pastorianus
gatcagcagttatccgatttagcaa

SEQ ID NO: 73206 - DNA, 25 bp, Saccharomyces pastorianus
atttggatcgaatacgcagagctgg

SEQ ID NO: 73207 - DNA, 25 bp, Saccharomyces pastorianus
attcggagtttctcacaatggaggc

SEQ ID NO: 73208 - DNA, 25 bp, Saccharomyces pastorianus
gttaaaggagttcgaccgtgtcaga

SEQ ID NO: 73209 - DNA, 25 bp, Saccharomyces pastorianus
gctggatcgaatttgccatgtatca

SEQ ID NO: 73210 - DNA, 25 bp, Saccharomyces pastorianus
ggaaacatatggtactgagctcgat

SEQ ID NO: 73211 - DNA, 25 bp, Saccharomyces pastorianus
aattcattgaattccagccctttaa

SEQ ID NO: 73212 - DNA, 25 bp, Saccharomyces pastorianus
gtatcaaagttcaaccccaacggat

SEQ ID NO: 73213 - DNA, 25 bp, Saccharomyces pastorianus
gaggcgtttatactattgcattgga

SEQ ID NO: 73214 - DNA, 25 bp, Saccharomyces pastorianus
aattttctgttcaaagctggatcga

SEQ ID NO: 73215 - DNA, 25 bp, Saccharomyces pastorianus
ggcctctctttaatggttcttccat

SEQ ID NO: 73216 - DNA, 25 bp, Saccharomyces pastorianus
atacgtttctatccttggttctgct

SEQ ID NO: 73217 - DNA, 25 bp, Saccharomyces pastorianus
gaacagcgaacgattcctcttatat

SEQ ID NO: 73218 - DNA, 25 bp, Saccharomyces pastorianus
tcattggattgtagagcgtggcctc

SEQ ID NO: 73219 - DNA, 25 bp, Saccharomyces pastorianus
tgggtctctaaagccttctatggga

SEQ ID NO: 73220 - DNA, 25 bp, Saccharomyces pastorianus
gattatggttcctttggtcactaca

SEQ ID NO: 73221 - DNA, 25 bp, Saccharomyces pastorianus
ttacaatccccttcttgccaaagat

SEQ ID NO: 73222 - DNA, 25 bp, Saccharomyces pastorianus
gggtcactgccatatcgggtttcag

SEQ ID NO: 73223 - DNA, 25 bp, Saccharomyces pastorianus
gcagagctcacggttcatatcattg

SEQ ID NO: 73224 - DNA, 25 bp, Saccharomyces pastorianus
gcaaggtgcatcactatgccatgta

SEQ ID NO: 73225 - DNA, 25 bp, Saccharomyces pastorianus
gaagcaggtcttattgggtctctaa

SEQ ID NO: 73226 - DNA, 25 bp, Saccharomyces pastorianus
ctccatcttcgcgtggacaagaggt

SEQ ID NO: 73227 - DNA, 25 bp, Saccharomyces pastorianus
aaacttcaacaaattccatcgcctc

SEQ ID NO: 73228 - DNA, 25 bp, Saccharomyces pastorianus
tggagagctccacagtgaacacagt

SEQ ID NO: 73229 - DNA, 25 bp, Saccharomyces pastorianus
gaagccgcgcatggcacagtgacaa

SEQ ID NO: 73230 - DNA, 25 bp, Saccharomyces pastorianus
ggttgatgacgtccttgttgattac

SEQ ID NO: 73231 - DNA, 25 bp, Saccharomyces pastorianus
tcgttgcacagggatttggttcttt

SEQ ID NO: 73232 - DNA, 25 bp, Saccharomyces pastorianus
ggcatctggtacgaacaccgtttga

SEQ ID NO: 73233 - DNA, 25 bp, Saccharomyces pastorianus
gacgtcgtcaagttcggccaaatct

SEQ ID NO: 73234 - DNA, 25 bp, Saccharomyces pastorianus
tatatattcttcttccctttttcat

SEQ ID NO: 73235 - DNA, 25 bp, Saccharomyces pastorianus
gggtaagcttgacagcactcccgac

SEQ ID NO: 73236 - DNA, 25 bp, Saccharomyces pastorianus
attaaggccgcgtcttctgacgtta

SEQ ID NO: 73237 - DNA, 25 bp, Saccharomyces pastorianus
ggagacgacgtacccgaatacattg

SEQ ID NO: 73238 - DNA, 25 bp, Saccharomyces pastorianus
gtatatacatgacagcaaaccggaa

SEQ ID NO: 73239 - DNA, 25 bp, Saccharomyces pastorianus
aaactctgatgagccaggagacgac

SEQ ID NO: 73240 - DNA, 25 bp, Saccharomyces pastorianus
gacgagttggccaacatcatggata

SEQ ID NO: 73241 - DNA, 25 bp, Saccharomyces pastorianus
agcaattgaaagacgggccctggga

SEQ ID NO: 73242 - DNA, 25 bp, Saccharomyces pastorianus
tcaccggcgcacaaatcgtattcaa

SEQ ID NO: 73243 - DNA, 25 bp, Saccharomyces pastorianus
aagcaaagggaggtgccgccgcctt

SEQ ID NO: 73244 - DNA, 25 bp, Saccharomyces pastorianus
aatacattgacgattccgatagcat

SEQ ID NO: 73245 - DNA, 25 bp, Saccharomyces pastorianus
agagctggattacactgactttata

SEQ ID NO: 73246 - DNA, 25 bp, Saccharomyces pastorianus
actgactttatagacgacaacgagg

SEQ ID NO: 73247 - DNA, 25 bp, Saccharomyces pastorianus
agaaggtcgctttggtgttgtattg

SEQ ID NO: 73248 - DNA, 25 bp, Saccharomyces pastorianus
ttaaatgccctacttgctgaacagc

SEQ ID NO: 73249 - DNA, 25 bp, Saccharomyces pastorianus
gtgccattgggcaagctaactgtac

SEQ ID NO: 73250 - DNA, 25 bp, Saccharomyces pastorianus
gcagcaagagccactacttttcaat

SEQ ID NO: 73251 - DNA, 25 bp, Saccharomyces pastorianus
accccgctgttctcattttggatga

SEQ ID NO: 73252 - DNA, 25 bp, Saccharomyces pastorianus
gatttgatttccattcccagtagtg

SEQ ID NO: 73253 - DNA, 25 bp, Saccharomyces pastorianus
agcactagggtcattgtactgggaa

SEQ ID NO: 73254 - DNA, 25 bp, Saccharomyces pastorianus
gacaacattctctattgcattccac

SEQ ID NO: 73255 - DNA, 25 bp, Saccharomyces pastorianus
agaaagaccgtgtcgcacgtgccat

SEQ ID NO: 73256 - DNA, 25 bp, Saccharomyces pastorianus
cacggttctgttgtcgaaactggtt

SEQ ID NO: 73257 - DNA, 25 bp, Saccharomyces pastorianus
aagttcttagccaatttcccagatg

SEQ ID NO: 73258 - DNA, 25 bp, Saccharomyces pastorianus
gctagagcattcttgttagaccccg

SEQ ID NO: 73259 - DNA, 25 bp, Saccharomyces pastorianus
tagttcccaaaaaagctcgagccct

SEQ ID NO: 73260 - DNA, 25 bp, Saccharomyces pastorianus
gttaggcgaatcatacacgtccacc

SEQ ID NO: 73261 - DNA, 25 bp, Saccharomyces pastorianus
ggaccaatcaccgtagtaaccactt

SEQ ID NO: 73262 - DNA, 25 bp, Saccharomyces pastorianus
agcagcacggcttcttcaagtggat

SEQ ID NO: 73263 - DNA, 25 bp, Saccharomyces pastorianus
gtggctcccagtagcactgtagtga

SEQ ID NO: 73264 - DNA, 25 bp, Saccharomyces pastorianus
atcatccgctacattgagcagcacg

SEQ ID NO: 73265 - DNA, 25 bp, Saccharomyces pastorianus
gagactaattcagctgctaccacga

SEQ ID NO: 73266 - DNA, 25 bp, Saccharomyces pastorianus
gattccggctccttagatgaccagg

SEQ ID NO: 73267 - DNA, 25 bp, Saccharomyces pastorianus
gggaaaagtcttagctctgcctcct

SEQ ID NO: 73268 - DNA, 25 bp, Saccharomyces pastorianus
aaagcagcgtctacaacggcgagcc

SEQ ID NO: 73269 - DNA, 25 bp, Saccharomyces pastorianus
ggaaaaacgaccacgcagtacctgt

SEQ ID NO: 73270 - DNA, 25 bp, Saccharomyces pastorianus
agagcgacagcgaggtacccgatct

SEQ ID NO: 73271 - DNA, 25 bp, Saccharomyces pastorianus
gatctgcgggacctgcgctaacaga

SEQ ID NO: 73272 - DNA, 25 bp, Saccharomyces pastorianus
agcgaggtacccgatctgcgggacc

SEQ ID NO: 73273 - DNA, 25 bp, Saccharomyces pastorianus
agcgacagcgaggtacccgatctgc

SEQ ID NO: 73274 - DNA, 25 bp, Saccharomyces pastorianus
tctgcgggacctgcgctaacagacg

SEQ ID NO: 73275 - DNA, 25 bp, Saccharomyces pastorianus
cgacagcgaggtacccgatctgcgg

SEQ ID NO: 73276 - DNA, 25 bp, Saccharomyces pastorianus
acctgggtggctgggtattaccaga

SEQ ID NO: 73277 - DNA, 25 bp, Saccharomyces pastorianus
aggtacccgatctgcgggacctgcg

SEQ ID NO: 73278 - DNA, 25 bp, Saccharomyces pastorianus
accagagcgacagcgaggtacccga

SEQ ID NO: 73279 - DNA, 25 bp, Saccharomyces pastorianus
ggtattaccagagcgacagcgaggt

SEQ ID NO: 73280 - DNA, 25 bp, Saccharomyces pastorianus
tgggtattaccagagcgacagcgag

SEQ ID NO: 73281 - DNA, 25 bp, Saccharomyces pastorianus
cagcagcacggttagcgagccgttg

SEQ ID NO: 73282 - DNA, 25 bp, Saccharomyces pastorianus
caacaacaacgaggatcagcagcac

SEQ ID NO: 73283 - DNA, 25 bp, Saccharomyces pastorianus
aggatcagcagcacggttagcgagc

SEQ ID NO: 73284 - DNA, 25 bp, Saccharomyces pastorianus
aacgaggatcagcagcacggttagc

SEQ ID NO: 73285 - DNA, 25 bp, Saccharomyces pastorianus
atgcctgccatgcaagagggtattc

SEQ ID NO: 73286 - DNA, 25 bp, Saccharomyces pastorianus
gagggtattctgagctcaatgacga

SEQ ID NO: 73287 - DNA, 25 bp, Saccharomyces pastorianus
ggtattctgagctcaatgacgatta

SEQ ID NO: 73288 - DNA, 25 bp, Saccharomyces pastorianus
atgcaagagggtattctgagctcaa

SEQ ID NO: 73289 - DNA, 25 bp, Saccharomyces pastorianus
gagctcaatgacgattatgacgatg

SEQ ID NO: 73290 - DNA, 25 bp, Saccharomyces pastorianus
gcctgccatgcaagagggtattctg

SEQ ID NO: 73291 - DNA, 25 bp, Saccharomyces pastorianus
aacaacgaggatcagcagcacggtt

SEQ ID NO: 73292 - DNA, 25 bp, Saccharomyces pastorianus
aaaaccgcacaatacgacgattcgt

SEQ ID NO: 73293 - DNA, 25 bp, Saccharomyces pastorianus
gacgattcgtccctcgaatgggatt

SEQ ID NO: 73294 - DNA, 25 bp, Saccharomyces pastorianus
cagtttacggcgcaggtcgatcaaa

SEQ ID NO: 73295 - DNA, 25 bp, Saccharomyces pastorianus
caaaggttccctgttggaggcgaca

SEQ ID NO: 73296 - DNA, 25 bp, Saccharomyces pastorianus
tatacaggtacccacaaactccgat

SEQ ID NO: 73297 - DNA, 25 bp, Saccharomyces pastorianus
cccgcgcgcaccgttgtaaagaagg

SEQ ID NO: 73298 - DNA, 25 bp, Saccharomyces pastorianus
tggaggcgacacttgggcgacttac

SEQ ID NO: 73299 - DNA, 25 bp, Saccharomyces pastorianus
gctctgaacacaatgggcctggaac

SEQ ID NO: 73300 - DNA, 25 bp, Saccharomyces pastorianus
aagaaaaatgcaaccgccatcctcg

SEQ ID NO: 73301 - DNA, 25 bp, Saccharomyces pastorianus
gggattgttttatcactccgagagt

SEQ ID NO: 73302 - DNA, 25 bp, Saccharomyces pastorianus
gactgggagaattcgcctgatataa

SEQ ID NO: 73303 - DNA, 25 bp, Saccharomyces pastorianus
gattgatgcctgtgacaaccctgat

SEQ ID NO: 73304 - DNA, 25 bp, Saccharomyces pastorianus
atgcctgactattgttgagaacctg

SEQ ID NO: 73305 - DNA, 25 bp, Saccharomyces pastorianus
aaggtgatgacgcttcagaaactat

SEQ ID NO: 73306 - DNA, 25 bp, Saccharomyces pastorianus
gttgtcatatgcctacgaagccttc

SEQ ID NO: 73307 - DNA, 25 bp, Saccharomyces pastorianus
ggttaccatcctcatatttatcagt

SEQ ID NO: 73308 - DNA, 25 bp, Saccharomyces pastorianus
tgaatcctcagaagaaaccccatcc

SEQ ID NO: 73309 - DNA, 25 bp, Saccharomyces pastorianus
taagttgaccattgaatgcctgact

SEQ ID NO: 73310 - DNA, 25 bp, Saccharomyces pastorianus
gagaacctgattgatgcctgtgaca

SEQ ID NO: 73311 - DNA, 25 bp, Saccharomyces pastorianus
tacgaagccttcatcgaagccggca

SEQ ID NO: 73312 - DNA, 25 bp, Saccharomyces pastorianus
aagccggcacttcagcagaaaatta

SEQ ID NO: 73313 - DNA, 25 bp, Saccharomyces pastorianus
gtatcggattttcaactacccaaag

SEQ ID NO: 73314 - DNA, 25 bp, Saccharomyces pastorianus
cttcttccatggcttacttggttgt

SEQ ID NO: 73315 - DNA, 25 bp, Saccharomyces pastorianus
gatattttttatccaatttcaatgc

SEQ ID NO: 73316 - DNA, 25 bp, Saccharomyces pastorianus
aatgcttcttccatggcttacttgg

SEQ ID NO: 73317 - DNA, 25 bp, Saccharomyces pastorianus
catggcttacttggttgtttgtcaa

SEQ ID NO: 73318 - DNA, 25 bp, Saccharomyces pastorianus
taaattcatccttaagagtttctgg

SEQ ID NO: 73319 - DNA, 25 bp, Saccharomyces pastorianus
gttgtttgtcaaatgcttagaatta

SEQ ID NO: 73320 - DNA, 25 bp, Saccharomyces pastorianus
ttcccatggatttaaacgtaggtat

SEQ ID NO: 73321 - DNA, 25 bp, Saccharomyces pastorianus
gcgaattgtcggacgatattcccat

SEQ ID NO: 73322 - DNA, 25 bp, Saccharomyces pastorianus
aattgtcggacgatattcccatgga

SEQ ID NO: 73323 - DNA, 25 bp, Saccharomyces pastorianus
aatttcaatgcttcttccatggctt

SEQ ID NO: 73324 - DNA, 25 bp, Saccharomyces pastorianus
gtaggtatgttaaattcatccttaa

SEQ ID NO: 73325 - DNA, 25 bp, Saccharomyces pastorianus
gtcttgatccagtacttcctgtact

SEQ ID NO: 73326 - DNA, 25 bp, Saccharomyces pastorianus
ttttttcaggtcttgctccatctca

SEQ ID NO: 73327 - DNA, 25 bp, Saccharomyces pastorianus
tacatggatgtcttagcgcggtcat

SEQ ID NO: 73328 - DNA, 25 bp, Saccharomyces pastorianus
cttcctgtacttttcgactatgtca

SEQ ID NO: 73329 - DNA, 25 bp, Saccharomyces pastorianus
tgtcttagcgcggtcataaacttgc

SEQ ID NO: 73330 - DNA, 25 bp, Saccharomyces pastorianus
tacagccattcgtcttgatccagta

SEQ ID NO: 73331 - DNA, 25 bp, Saccharomyces pastorianus
gactatgtcagatacgacttctgcc

SEQ ID NO: 73332 - DNA, 25 bp, Saccharomyces pastorianus
tgctccatctcacggcgctggaagg

SEQ ID NO: 73333 - DNA, 25 bp, Saccharomyces pastorianus
gcagcagggtattcttacagccatt

SEQ ID NO: 73334 - DNA, 25 bp, Saccharomyces pastorianus
gccctggaggcgtgcccatcgcaga

SEQ ID NO: 73335 - DNA, 25 bp, Saccharomyces pastorianus
agatacgacttctgccctggaggcg

SEQ ID NO: 73336 - DNA, 25 bp, Saccharomyces pastorianus
ttttgcaagacatggcgattagcga

SEQ ID NO: 73337 - DNA, 25 bp, Saccharomyces pastorianus
tacgcttcttcattcgtcgatgaca

SEQ ID NO: 73338 - DNA, 25 bp, Saccharomyces pastorianus
gatttccacataaactttcccaatt

SEQ ID NO: 73339 - DNA, 25 bp, Saccharomyces pastorianus
tggtcattgcccaagatcaaggaat

SEQ ID NO: 73340 - DNA, 25 bp, Saccharomyces pastorianus
aaagacaccgcctgagaagaccaat

SEQ ID NO: 73341 - DNA, 25 bp, Saccharomyces pastorianus
taatcaactggataccctacgcttc

SEQ ID NO: 73342 - DNA, 25 bp, Saccharomyces pastorianus
taaattttctcttccaactacactc

SEQ ID NO: 73343 - DNA, 25 bp, Saccharomyces pastorianus
agtacgacgaaaccacttcttcagg

SEQ ID NO: 73344 - DNA, 25 bp, Saccharomyces pastorianus
acttcttcaggctcaccagagagat

SEQ ID NO: 73345 - DNA, 25 bp, Saccharomyces pastorianus
gaggttactcagtgctgcaatttca

SEQ ID NO: 73346 - DNA, 25 bp, Saccharomyces pastorianus
gattcatcgtcatctgtactgaaca

SEQ ID NO: 73347 - DNA, 25 bp, Saccharomyces pastorianus
aggtatacgtacaagtaagcctact

SEQ ID NO: 73348 - DNA, 25 bp, Saccharomyces pastorianus
ttctgccgtgcccaaaggctataaa

SEQ ID NO: 73349 - DNA, 25 bp, Saccharomyces pastorianus
gaatgccctcaaagaacctattaag

SEQ ID NO: 73350 - DNA, 25 bp, Saccharomyces pastorianus
ggtgactctgagttatacaatccag

SEQ ID NO: 73351 - DNA, 25 bp, Saccharomyces pastorianus
ctgcttttgaaatgacgggtgactc

SEQ ID NO: 73352 - DNA, 25 bp, Saccharomyces pastorianus
gagatcgaaaactggctcaacagat

SEQ ID NO: 73353 - DNA, 25 bp, Saccharomyces pastorianus
gatgacgaaacagctagcacgaaat

SEQ ID NO: 73354 - DNA, 25 bp, Saccharomyces pastorianus
taagcctactacacgcacagcaaat

SEQ ID NO: 73355 - DNA, 25 bp, Saccharomyces pastorianus
ggtaagaacacgaatgccctcaaag

SEQ ID NO: 73356 - DNA, 25 bp, Saccharomyces pastorianus
gaaattacgttctgccgtgcccaaa

SEQ ID NO: 73357 - DNA, 25 bp, Saccharomyces pastorianus
aatataccgcctcgcaagagatcga

SEQ ID NO: 73358 - DNA, 25 bp, Saccharomyces pastorianus
aaagttattctactctcgatgtgaa

SEQ ID NO: 73359 - DNA, 25 bp, Saccharomyces pastorianus
ttattactataggtccgttcggcta

SEQ ID NO: 73360 - DNA, 25 bp, Saccharomyces pastorianus
gcagccgcgggtcagatatgtcaat

SEQ ID NO: 73361 - DNA, 25 bp, Saccharomyces pastorianus
gaacgctacggtgggcaacttgatc

SEQ ID NO: 73362 - DNA, 25 bp, Saccharomyces pastorianus
gtgcaagtctcttctctacaatgga

SEQ ID NO: 73363 - DNA, 25 bp, Saccharomyces pastorianus
ttacccctcgtgcaaaaattctttg

SEQ ID NO: 73364 - DNA, 25 bp, Saccharomyces pastorianus
tcaaaagacccttaatggccactcc

SEQ ID NO: 73365 - DNA, 25 bp, Saccharomyces pastorianus
gcagtacataccgttttcgtggccg

SEQ ID NO: 73366 - DNA, 25 bp, Saccharomyces pastorianus
ttgggcgacgcttcgaaacacacga

SEQ ID NO: 73367 - DNA, 25 bp, Saccharomyces pastorianus
agtccaatgatcaattacccctcgt

SEQ ID NO: 73368 - DNA, 25 bp, Saccharomyces pastorianus
gttcggctattgatccagccttatt

SEQ ID NO: 73369 - DNA, 25 bp, Saccharomyces pastorianus
cacgggcatcgtggtcgagtgccaa

SEQ ID NO: 73370 - DNA, 25 bp, Saccharomyces pastorianus
tgtggcaccgccaacagaaacacgc

SEQ ID NO: 73371 - DNA, 25 bp, Saccharomyces pastorianus
gatgccctccagagaggccgcgttg

SEQ ID NO: 73372 - DNA, 25 bp, Saccharomyces pastorianus
gcgaggccgctcgtgctgaaaaaga

SEQ ID NO: 73373 - DNA, 25 bp, Saccharomyces pastorianus
tcacgtgagcagaaccgccggcttg

SEQ ID NO: 73374 - DNA, 25 bp, Saccharomyces pastorianus
agaaacacggtcacgtgagcagaac

SEQ ID NO: 73375 - DNA, 25 bp, Saccharomyces pastorianus
ttgcagctgtggcaccgccaacaga

SEQ ID NO: 73376 - DNA, 25 bp, Saccharomyces pastorianus
tatcgcgaagcacgaacggcatggc

SEQ ID NO: 73377 - DNA, 25 bp, Saccharomyces pastorianus
gtgtgacacgatgccctccagagag

SEQ ID NO: 73378 - DNA, 25 bp, Saccharomyces pastorianus
gccggcgcagtatcgcgaagcacga

SEQ ID NO: 73379 - DNA, 25 bp, Saccharomyces pastorianus
ctggccgccgcgtcgtgtgacacga

SEQ ID NO: 73380 - DNA, 25 bp, Saccharomyces pastorianus
aaacacggccagaaccgctgcgggc

SEQ ID NO: 73381 - DNA, 25 bp, Saccharomyces pastorianus
tacgagttaaagctccgcaaacacg

SEQ ID NO: 73382 - DNA, 25 bp, Saccharomyces pastorianus
accgctgcgggcttattttggcagg

SEQ ID NO: 73383 - DNA, 25 bp, Saccharomyces pastorianus
gcaaaagtggccctgaatacgagtt

SEQ ID NO: 73384 - DNA, 25 bp, Saccharomyces pastorianus
tattttggcaggaaagaatcgcacc

SEQ ID NO: 73385 - DNA, 25 bp, Saccharomyces pastorianus
gaaagaatcgcaccagcgacacacg

SEQ ID NO: 73386 - DNA, 25 bp, Saccharomyces pastorianus
tgcgggcttattttggcaggaaaga

SEQ ID NO: 73387 - DNA, 25 bp, Saccharomyces pastorianus
tttctgcaaaagtggccctgaatac

SEQ ID NO: 73388 - DNA, 25 bp, Saccharomyces pastorianus
gtttttcaaagacatagatttctgc

SEQ ID NO: 73389 - DNA, 25 bp, Saccharomyces pastorianus
gtggccctgaatacgagttaaagct

SEQ ID NO: 73390 - DNA, 25 bp, Saccharomyces pastorianus
ttaaagctccgcaaacacggccaga

SEQ ID NO: 73391 - DNA, 25 bp, Saccharomyces pastorianus
agcggtctcttaatcatactggtcc

SEQ ID NO: 73392 - DNA, 25 bp, Saccharomyces pastorianus
agtctcatctgttcagttccctgga

SEQ ID NO: 73393 - DNA, 25 bp, Saccharomyces pastorianus
gggcgaaatcaggtcccacatcgaa

SEQ ID NO: 73394 - DNA, 25 bp, Saccharomyces pastorianus
aatcatactggtccttgtttgttcg

SEQ ID NO: 73395 - DNA, 25 bp, Saccharomyces pastorianus
ggcagcttctcggacgaacagtgta

SEQ ID NO: 73396 - DNA, 25 bp, Saccharomyces pastorianus
aacattatttctttgctcttgcaac

SEQ ID NO: 73397 - DNA, 25 bp, Saccharomyces pastorianus
ttccctggagactgaactgaagttt

SEQ ID NO: 73398 - DNA, 25 bp, Saccharomyces pastorianus
acctgaggttgaacgactcttccaa

SEQ ID NO: 73399 - DNA, 25 bp, Saccharomyces pastorianus
gagagctgaactccatccatgacga

SEQ ID NO: 73400 - DNA, 25 bp, Saccharomyces pastorianus
gtttgccatccaaaactccagggac

SEQ ID NO: 73401 - DNA, 25 bp, Saccharomyces pastorianus
tgagcatcatttgcaactcttgaaa

SEQ ID NO: 73402 - DNA, 25 bp, Saccharomyces pastorianus
ctttcctcaaaaacctcactttgat

SEQ ID NO: 73403 - DNA, 25 bp, Saccharomyces pastorianus
gcactattaaccctttgcggtaatg

SEQ ID NO: 73404 - DNA, 25 bp, Saccharomyces pastorianus
aaacaatcgtctggtacgacacccg

SEQ ID NO: 73405 - DNA, 25 bp, Saccharomyces pastorianus
gtctggtacgacacccgctgcggca

SEQ ID NO: 73406 - DNA, 25 bp, Saccharomyces pastorianus
gaaaagcactattaaccctttgcgg

SEQ ID NO: 73407 - DNA, 25 bp, Saccharomyces pastorianus
cactattaaccctttgcggtaatga

SEQ ID NO: 73408 - DNA, 25 bp, Saccharomyces pastorianus
aatcgtctggtacgacacccgctgc

SEQ ID NO: 73409 - DNA, 25 bp, Saccharomyces pastorianus
tgcggcaaattacctttcctcaaaa

SEQ ID NO: 73410 - DNA, 25 bp, Saccharomyces pastorianus
tacgacacccgctgcggcaaattac

SEQ ID NO: 73411 - DNA, 25 bp, Saccharomyces pastorianus
atggcacatcgaaaagcactattaa

SEQ ID NO: 73412 - DNA, 25 bp, Saccharomyces pastorianus
gcggtaatgaaaacaatcgtctggt

SEQ ID NO: 73413 - DNA, 25 bp, Saccharomyces pastorianus
gaattgaccagaagagctgacgtta

SEQ ID NO: 73414 - DNA, 25 bp, Saccharomyces pastorianus
gagaaatcaccgacatcaaacaatt

SEQ ID NO: 73415 - DNA, 25 bp, Saccharomyces pastorianus
gctagagaaatcaccgacatcaaac

SEQ ID NO: 73416 - DNA, 25 bp, Saccharomyces pastorianus
aatttttggaattgaccagaagagc

SEQ ID NO: 73417 - DNA, 25 bp, Saccharomyces pastorianus
tcaccgacatcaaacaatttttgga

SEQ ID NO: 73418 - DNA, 25 bp, Saccharomyces pastorianus
aattgaccagaagagctgacgttaa

SEQ ID NO: 73419 - DNA, 25 bp, Saccharomyces pastorianus
gaaatcaccgacatcaaacaatttt

SEQ ID NO: 73420 - DNA, 25 bp, Saccharomyces pastorianus
aatcaccgacatcaaacaatttttg

SEQ ID NO: 73421 - DNA, 25 bp, Saccharomyces pastorianus
attgaccagaagagctgacgttaag

SEQ ID NO: 73422 - DNA, 25 bp, Saccharomyces pastorianus
ggaattgaccagaagagctgacgtt

SEQ ID NO: 73423 - DNA, 25 bp, Saccharomyces pastorianus
tttggaattgaccagaagagctgac

SEQ ID NO: 73424 - DNA, 25 bp, Saccharomyces pastorianus
ccacggatacttgatgttcttacca

SEQ ID NO: 73425 - DNA, 25 bp, Saccharomyces pastorianus
aagggagccgcctgcagcctgactt

SEQ ID NO: 73426 - DNA, 25 bp, Saccharomyces pastorianus
aggtccagcggatgcgtcaccatag

SEQ ID NO: 73427 - DNA, 25 bp, Saccharomyces pastorianus
ttttgacaggtccagcggatgcgtc

SEQ ID NO: 73428 - DNA, 25 bp, Saccharomyces pastorianus
gtcaccatagttgcaaagattcccg

SEQ ID NO: 73429 - DNA, 25 bp, Saccharomyces pastorianus
atcttgaacagagtaggcttgggca

SEQ ID NO: 73430 - DNA, 25 bp, Saccharomyces pastorianus
atagttgcaaagattcccgccgcac

SEQ ID NO: 73431 - DNA, 25 bp, Saccharomyces pastorianus
ataccaccacggatacttgatgttc

SEQ ID NO: 73432 - DNA, 25 bp, Saccharomyces pastorianus
atgctctccagcatcttgaacagag

SEQ ID NO: 73433 - DNA, 25 bp, Saccharomyces pastorianus
agcggatgcgtcaccatagttgcaa

SEQ ID NO: 73434 - DNA, 25 bp, Saccharomyces pastorianus
gcagcctgacttttgacaggtccag

SEQ ID NO: 73435 - DNA, 25 bp, Saccharomyces pastorianus
aatctctttacaccgagacgttgaa

SEQ ID NO: 73436 - DNA, 25 bp, Saccharomyces pastorianus
attatcttctgcttcttttcaacca

SEQ ID NO: 73437 - DNA, 25 bp, Saccharomyces pastorianus
aatagcattctatctcctaatttga

SEQ ID NO: 73438 - DNA, 25 bp, Saccharomyces pastorianus
gaagtggtggtcttgcattttcgtc

SEQ ID NO: 73439 - DNA, 25 bp, Saccharomyces pastorianus
attttcgtcttcatccaactctttg

SEQ ID NO: 73440 - DNA, 25 bp, Saccharomyces pastorianus
gcccaacatttccactattgcagaa

SEQ ID NO: 73441 - DNA, 25 bp, Saccharomyces pastorianus
atgacgagtacttccactcagtttc

SEQ ID NO: 73442 - DNA, 25 bp, Saccharomyces pastorianus
gctaaggcgatccaattcaactcag

SEQ ID NO: 73443 - DNA, 25 bp, Saccharomyces pastorianus
tctaccccatctataaaccatcatg

SEQ ID NO: 73444 - DNA, 25 bp, Saccharomyces pastorianus
aacgcaaaacttaagctcgcatatg

SEQ ID NO: 73445 - DNA, 25 bp, Saccharomyces pastorianus
ttcgtattcccctgtacatgttgga

SEQ ID NO: 73446 - DNA, 25 bp, Saccharomyces pastorianus
gtaaccacaaccctatgaactctaa

SEQ ID NO: 73447 - DNA, 25 bp, Saccharomyces pastorianus
taattacaatactttccatccctcc

SEQ ID NO: 73448 - DNA, 25 bp, Saccharomyces pastorianus
gaccctgccagaaggctttatgtca

SEQ ID NO: 73449 - DNA, 25 bp, Saccharomyces pastorianus
atccctccatgcatacaaaatcttc

SEQ ID NO: 73450 - DNA, 25 bp, Saccharomyces pastorianus
ggcggcaaaccctcataattacaat

SEQ ID NO: 73451 - DNA, 25 bp, Saccharomyces pastorianus
attgatcctcaccaaacagatttgt

SEQ ID NO: 73452 - DNA, 25 bp, Saccharomyces pastorianus
agcttacatagatgaccctgccaga

SEQ ID NO: 73453 - DNA, 25 bp, Saccharomyces pastorianus
aaaccattcaagtgtccagtcattg

SEQ ID NO: 73454 - DNA, 25 bp, Saccharomyces pastorianus
gaactctaacgtaaacacggcggca

SEQ ID NO: 73455 - DNA, 25 bp, Saccharomyces pastorianus
taacaactacaaactgcctcagcaa

SEQ ID NO: 73456 - DNA, 25 bp, Saccharomyces pastorianus
gtatcatagattgcatggtcaccaa

SEQ ID NO: 73457 - DNA, 25 bp, Saccharomyces pastorianus
attctcaagggatgggcggtgtttc

SEQ ID NO: 73458 - DNA, 25 bp, Saccharomyces pastorianus
cagcacacaccttctatcttaataa

SEQ ID NO: 73459 - DNA, 25 bp, Saccharomyces pastorianus
taccactgctaccaacactttacaa

SEQ ID NO: 73460 - DNA, 25 bp, Saccharomyces pastorianus
gaattcttcttcaaatcccaacatt

SEQ ID NO: 73461 - DNA, 25 bp, Saccharomyces pastorianus
gaagtagtattgtgcctccttcagc

SEQ ID NO: 73462 - DNA, 25 bp, Saccharomyces pastorianus
cagacactactaactccgcaagata

SEQ ID NO: 73463 - DNA, 25 bp, Saccharomyces pastorianus
ggtccattagcgttggttcttggtt

SEQ ID NO: 73464 - DNA, 25 bp, Saccharomyces pastorianus
acggagagagtccatagcccattct

SEQ ID NO: 73465 - DNA, 25 bp, Saccharomyces pastorianus
ataacgtccatttgtactcgcctaa

SEQ ID NO: 73466 - DNA, 25 bp, Saccharomyces pastorianus
gactacagatttcaacggcatcaat

SEQ ID NO: 73467 - DNA, 25 bp, Saccharomyces pastorianus
aaacagtgctgtcgctgctgctgct

SEQ ID NO: 73468 - DNA, 25 bp, Saccharomyces pastorianus
gccattgttcaaaccctttcttgta

SEQ ID NO: 73469 - DNA, 25 bp, Saccharomyces pastorianus
taacagaccccaccgtgcctttgtt

SEQ ID NO: 73470 - DNA, 25 bp, Saccharomyces pastorianus
ctttcttgtaacagaccccaccgtg

SEQ ID NO: 73471 - DNA, 25 bp, Saccharomyces pastorianus
gtgcctttgtttcagcggtccctta

SEQ ID NO: 73472 - DNA, 25 bp, Saccharomyces pastorianus
tgttcaaaccctttcttgtaacaga

SEQ ID NO: 73473 - DNA, 25 bp, Saccharomyces pastorianus
tggccattgttcaaaccctttcttg

SEQ ID NO: 73474 - DNA, 25 bp, Saccharomyces pastorianus
tgtttcagcggtcccttacctgaag

SEQ ID NO: 73475 - DNA, 25 bp, Saccharomyces pastorianus
tttcagcggtcccttacctgaagaa

SEQ ID NO: 73476 - DNA, 25 bp, Saccharomyces pastorianus
ttcagcggtcccttacctgaagaaa

SEQ ID NO: 73477 - DNA, 25 bp, Saccharomyces pastorianus
tttgtttcagcggtcccttacctga

SEQ ID NO: 73478 - DNA, 25 bp, Saccharomyces pastorianus
atggccattgttcaaaccctttctt

SEQ ID NO: 73479 - DNA, 25 bp, Saccharomyces pastorianus
tatttgccgtcttggtattcctcta

SEQ ID NO: 73480 - DNA, 25 bp, Saccharomyces pastorianus
gatcttctccattcttcggtttaat

SEQ ID NO: 73481 - DNA, 25 bp, Saccharomyces pastorianus
atgttgttatcgctggatcttctcc

SEQ ID NO: 73482 - DNA, 25 bp, Saccharomyces pastorianus
aatgtgccgtgctcacagtaacaga

SEQ ID NO: 73483 - DNA, 25 bp, Saccharomyces pastorianus
tacacattcctgtcgattatcgtct

SEQ ID NO: 73484 - DNA, 25 bp, Saccharomyces pastorianus
aaggcaagttgaccccatggaagct

SEQ ID NO: 73485 - DNA, 25 bp, Saccharomyces pastorianus
atatgtatgttcctgccgttagagc

SEQ ID NO: 73486 - DNA, 25 bp, Saccharomyces pastorianus
gtatcatcactgctttcttcctaat

SEQ ID NO: 73487 - DNA, 25 bp, Saccharomyces pastorianus
agtaaagccgacttacacctggacg

SEQ ID NO: 73488 - DNA, 25 bp, Saccharomyces pastorianus
tcagtggtttgggtagcgctatctt

SEQ ID NO: 73489 - DNA, 25 bp, Saccharomyces pastorianus
tattcctctatatcgcacacagttg

SEQ ID NO: 73490 - DNA, 25 bp, Saccharomyces pastorianus
caacgtgatttatggctcgattctc

SEQ ID NO: 73491 - DNA, 25 bp, Saccharomyces pastorianus
gcaggttctaagttatcgcccagtg

SEQ ID NO: 73492 - DNA, 25 bp, Saccharomyces pastorianus
caatagcaatgcaacaccttctcga

SEQ ID NO: 73493 - DNA, 25 bp, Saccharomyces pastorianus
gagacgtactcttcaaagcttgtga

SEQ ID NO: 73494 - DNA, 25 bp, Saccharomyces pastorianus
gaggagctgaacacccaaggtcctt

SEQ ID NO: 73495 - DNA, 25 bp, Saccharomyces pastorianus
cgagtcttccgcgttggtagcacaa

SEQ ID NO: 73496 - DNA, 25 bp, Saccharomyces pastorianus
gaacgaactgataactaagctccgg

SEQ ID NO: 73497 - DNA, 25 bp, Saccharomyces pastorianus
agggttcgagtcacctttaacgcag

SEQ ID NO: 73498 - DNA, 25 bp, Saccharomyces pastorianus
taagctccggagtagcgcaggttct

SEQ ID NO: 73499 - DNA, 25 bp, Saccharomyces pastorianus
accttctcgacctattgacatacga

SEQ ID NO: 73500 - DNA, 25 bp, Saccharomyces pastorianus
tgaccttatcgattcatccaatgaa

SEQ ID NO: 73501 - DNA, 25 bp, Saccharomyces pastorianus
tttcccattcgatggtctgcttgga

SEQ ID NO: 73502 - DNA, 25 bp, Saccharomyces pastorianus
cattcgatggtctgcttggaggaga

SEQ ID NO: 73503 - DNA, 25 bp, Saccharomyces pastorianus
gtgcgcacccttggccttgtgaaag

SEQ ID NO: 73504 - DNA, 25 bp, Saccharomyces pastorianus
ggaagtccaggtattgcttaccctc

SEQ ID NO: 73505 - DNA, 25 bp, Saccharomyces pastorianus
agtgaccctggttgacggcggagta

SEQ ID NO: 73506 - DNA, 25 bp, Saccharomyces pastorianus
tacttgttttcccattcgatggtct

SEQ ID NO: 73507 - DNA, 25 bp, Saccharomyces pastorianus
gtccaggtattgcttaccctctggg

SEQ ID NO: 73508 - DNA, 25 bp, Saccharomyces pastorianus
tattgcttaccctctgggtcccaca

SEQ ID NO: 73509 - DNA, 25 bp, Saccharomyces pastorianus
gcacccttggccttgtgaaagacca

SEQ ID NO: 73510 - DNA, 25 bp, Saccharomyces pastorianus
gtaggcactgaggaagtccaggtat

SEQ ID NO: 73511 - DNA, 25 bp, Saccharomyces pastorianus
ggccttgtgaaagaccacgggcaaa

SEQ ID NO: 73512 - DNA, 25 bp, Saccharomyces pastorianus
gaggccaagccagacatcgttctgt

SEQ ID NO: 73513 - DNA, 25 bp, Saccharomyces pastorianus
aggtccgtggtatgggtctgctcac

SEQ ID NO: 73514 - DNA, 25 bp, Saccharomyces pastorianus
agtctaacggtgtcatctccgaggt

SEQ ID NO: 73515 - DNA, 25 bp, Saccharomyces pastorianus
gacgagatccaaaccggtatcggca

SEQ ID NO: 73516 - DNA, 25 bp, Saccharomyces pastorianus
accgcatgggacttgtgtctgctca

SEQ ID NO: 73517 - DNA, 25 bp, Saccharomyces pastorianus
gacccctccaagactaacggcaaga

SEQ ID NO: 73518 - DNA, 25 bp, Saccharomyces pastorianus
cggctctttcatcgccaagttgaaa

SEQ ID NO: 73519 - DNA, 25 bp, Saccharomyces pastorianus
cagaaccggtgagttactgtgctac

SEQ ID NO: 73520 - DNA, 25 bp, Saccharomyces pastorianus
tgtctgctcatgaagggccacggcc

SEQ ID NO: 73521 - DNA, 25 bp, Saccharomyces pastorianus
acatcgttctgttgggtaaggccct

SEQ ID NO: 73522 - DNA, 25 bp, Saccharomyces pastorianus
taccagtctcatgtgtgttgtcctc

SEQ ID NO: 73523 - DNA, 25 bp, Saccharomyces pastorianus
ataacaaagtgccaagccttttcaa

SEQ ID NO: 73524 - DNA, 25 bp, Saccharomyces pastorianus
ttggattgggacctcttttgtaccg

SEQ ID NO: 73525 - DNA, 25 bp, Saccharomyces pastorianus
gaatgatgtccaaggaaccccaaga

SEQ ID NO: 73526 - DNA, 25 bp, Saccharomyces pastorianus
ctcttttgtaccgttcctgtgaata

SEQ ID NO: 73527 - DNA, 25 bp, Saccharomyces pastorianus
gaagtgcttcagagaatcaacgaga

SEQ ID NO: 73528 - DNA, 25 bp, Saccharomyces pastorianus
agccttttcaaattagccgcccaat

SEQ ID NO: 73529 - DNA, 25 bp, Saccharomyces pastorianus
ctcaccagaaaacccgagcctaaat

SEQ ID NO: 73530 - DNA, 25 bp, Saccharomyces pastorianus
accaggatactgctttaccaaaggc

SEQ ID NO: 73531 - DNA, 25 bp, Saccharomyces pastorianus
tttaccaaaggcaacctcaccagaa

SEQ ID NO: 73532 - DNA, 25 bp, Saccharomyces pastorianus
tataaagacctttccaaccaagacg

SEQ ID NO: 73533 - DNA, 25 bp, Saccharomyces pastorianus
accgttcctgtgaatattatcgagc

SEQ ID NO: 73534 - DNA, 25 bp, Saccharomyces pastorianus
gttagccattgaatgtcaagccctg

SEQ ID NO: 73535 - DNA, 25 bp, Saccharomyces pastorianus
caagaagtcgtgagtactgaagata

SEQ ID NO: 73536 - DNA, 25 bp, Saccharomyces pastorianus
taaagaaggtttgagtgccactcaa

SEQ ID NO: 73537 - DNA, 25 bp, Saccharomyces pastorianus
tgtcggctctactctagaaaacaaa

SEQ ID NO: 73538 - DNA, 25 bp, Saccharomyces pastorianus
tgtcggctccatcattgccctagat

SEQ ID NO: 73539 - DNA, 25 bp, Saccharomyces pastorianus
gtggtattattgtcggctctactct

SEQ ID NO: 73540 - DNA, 25 bp, Saccharomyces pastorianus
aatcgatgacgtcatgaccgctggc

SEQ ID NO: 73541 - DNA, 25 bp, Saccharomyces pastorianus
aatgtcaagccctgagatttggttc

SEQ ID NO: 73542 - DNA, 25 bp, Saccharomyces pastorianus
gaccgctggcactgccattaatgaa

SEQ ID NO: 73543 - DNA, 25 bp, Saccharomyces pastorianus
ctaagggtcaagttgtcggctccat

SEQ ID NO: 73544 - DNA, 25 bp, Saccharomyces pastorianus
gaatcaccatatttcttcaatttag

SEQ ID NO: 73545 - DNA, 25 bp, Saccharomyces pastorianus
attgctcgggattcagcttggttaa

SEQ ID NO: 73546 - DNA, 25 bp, Saccharomyces pastorianus
gtccttcattttctggctgggaaac

SEQ ID NO: 73547 - DNA, 25 bp, Saccharomyces pastorianus
tggccatggacagtgcttgcaatga

SEQ ID NO: 73548 - DNA, 25 bp, Saccharomyces pastorianus
aaacttgcccttggccatggacagt

SEQ ID NO: 73549 - DNA, 25 bp, Saccharomyces pastorianus
agtagcttttgtccttcattttctg

SEQ ID NO: 73550 - DNA, 25 bp, Saccharomyces pastorianus
atgcattctacaaacttgcccttgg

SEQ ID NO: 73551 - DNA, 25 bp, Saccharomyces pastorianus
tgggaaactgttttgatgtcatcaa

SEQ ID NO: 73552 - DNA, 25 bp, Saccharomyces pastorianus
ctatttggaaatacgcatgtgtaca

SEQ ID NO: 73553 - DNA, 25 bp, Saccharomyces pastorianus
gtttcacagcagttaattgctcggg

SEQ ID NO: 73554 - DNA, 25 bp, Saccharomyces pastorianus
gatgcaggaaccagtagcttttgtc

SEQ ID NO: 73555 - DNA, 25 bp, Saccharomyces pastorianus
ttatccacaattttacctgggatgt

SEQ ID NO: 73556 - DNA, 25 bp, Saccharomyces pastorianus
tgttgtttcccaggccttaaaaatg

SEQ ID NO: 73557 - DNA, 25 bp, Saccharomyces pastorianus
gaaattcatgccgttttgattacga

SEQ ID NO: 73558 - DNA, 25 bp, Saccharomyces pastorianus
ttgtccttgggttccttcattagaa

SEQ ID NO: 73559 - DNA, 25 bp, Saccharomyces pastorianus
gagaccagattgaacatcagtttcg

SEQ ID NO: 73560 - DNA, 25 bp, Saccharomyces pastorianus
aatatgccctgatacaaccgaattg

SEQ ID NO: 73561 - DNA, 25 bp, Saccharomyces pastorianus
gttgagattctttaatcatcctggg

SEQ ID NO: 73562 - DNA, 25 bp, Saccharomyces pastorianus
atttggacccaaacttactagctgg

SEQ ID NO: 73563 - DNA, 25 bp, Saccharomyces pastorianus
atctcgacgaagttactaatggcca

SEQ ID NO: 73564 - DNA, 25 bp, Saccharomyces pastorianus
acaaatcttatccattgtccttggg

SEQ ID NO: 73565 - DNA, 25 bp, Saccharomyces pastorianus
acttactagctggtgttgtttccca

SEQ ID NO: 73566 - DNA, 25 bp, Saccharomyces pastorianus
catcagtttcgaattttgactcaaa

SEQ ID NO: 73567 - DNA, 25 bp, Saccharomyces pastorianus
tttaagaactcctcacaagaccatg

SEQ ID NO: 73568 - DNA, 25 bp, Saccharomyces pastorianus
gaactattcgcaaaaactccaaagg

SEQ ID NO: 73569 - DNA, 25 bp, Saccharomyces pastorianus
gaacaatctgtatgattccgtgaga

SEQ ID NO: 73570 - DNA, 25 bp, Saccharomyces pastorianus
agagaatacattacagttcgccaat

SEQ ID NO: 73571 - DNA, 25 bp, Saccharomyces pastorianus
tgatgagctttaacacaggtggaat

SEQ ID NO: 73572 - DNA, 25 bp, Saccharomyces pastorianus
gaaggaaatcttaactcaaatgctg

SEQ ID NO: 73573 - DNA, 25 bp, Saccharomyces pastorianus
aaatttgctgtccacttacaatcta

SEQ ID NO: 73574 - DNA, 25 bp, Saccharomyces pastorianus
gattccgtgagattattgtcttcta

SEQ ID NO: 73575 - DNA, 25 bp, Saccharomyces pastorianus
attttatccagccaagcaagctata

SEQ ID NO: 73576 - DNA, 25 bp, Saccharomyces pastorianus
gaccatggacctatatacttttgca

SEQ ID NO: 73577 - DNA, 25 bp, Saccharomyces pastorianus
gacagtttcaatagagacatcacgt

SEQ ID NO: 73578 - DNA, 25 bp, Saccharomyces pastorianus
actgggccacagattgaggatgatg

SEQ ID NO: 73579 - DNA, 25 bp, Saccharomyces pastorianus
gataacttggctgatctatccatta

SEQ ID NO: 73580 - DNA, 25 bp, Saccharomyces pastorianus
ttagaacctttaggtgacaccgaag

SEQ ID NO: 73581 - DNA, 25 bp, Saccharomyces pastorianus
cagagagctttggaagagtcccaga

SEQ ID NO: 73582 - DNA, 25 bp, Saccharomyces pastorianus
gatctatccattacttcgagccaag

SEQ ID NO: 73583 - DNA, 25 bp, Saccharomyces pastorianus
atacaagccgacgaaatggaccttt

SEQ ID NO: 73584 - DNA, 25 bp, Saccharomyces pastorianus
gaattgacgctgaaactgggccaca

SEQ ID NO: 73585 - DNA, 25 bp, Saccharomyces pastorianus
gagtcccagaggttacatgaaacac

SEQ ID NO: 73586 - DNA, 25 bp, Saccharomyces pastorianus
gcgctcctggaatcgcaagaagcac

SEQ ID NO: 73587 - DNA, 25 bp, Saccharomyces pastorianus
ggaatgaaaccttgaacaccgagtt

SEQ ID NO: 73588 - DNA, 25 bp, Saccharomyces pastorianus
attcagttaagaattgcgctcctgg

SEQ ID NO: 73589 - DNA, 25 bp, Saccharomyces pastorianus
gacgtccttattatcgttaccgctt

SEQ ID NO: 73590 - DNA, 25 bp, Saccharomyces pastorianus
atatagctcaagcagacccattcga

SEQ ID NO: 73591 - DNA, 25 bp, Saccharomyces pastorianus
agaccacttgctttgtatcgttgcc

SEQ ID NO: 73592 - DNA, 25 bp, Saccharomyces pastorianus
acagtggtcaattccgcatcttctc

SEQ ID NO: 73593 - DNA, 25 bp, Saccharomyces pastorianus
agaaggtgcccgtttgattcaagac

SEQ ID NO: 73594 - DNA, 25 bp, Saccharomyces pastorianus
attctctctatgacgtgttgactac

SEQ ID NO: 73595 - DNA, 25 bp, Saccharomyces pastorianus
ggcgttgtacgttactcaatgtgtc

SEQ ID NO: 73596 - DNA, 25 bp, Saccharomyces pastorianus
attgttgtcgttgttggctttaagc

SEQ ID NO: 73597 - DNA, 25 bp, Saccharomyces pastorianus
ggttaagcgcttccacagtggtcaa

SEQ ID NO: 73598 - DNA, 25 bp, Saccharomyces pastorianus
gttaccgcttactttatgatgtttt

SEQ ID NO: 73599 - DNA, 25 bp, Saccharomyces pastorianus
atcttctcttttcttggcgttgtac

SEQ ID NO: 73600 - DNA, 25 bp, Saccharomyces pastorianus
gcctttgccgaaacgtactctagta

SEQ ID NO: 73601 - DNA, 25 bp, Saccharomyces pastorianus
actacactggcgacgttttgcattt

SEQ ID NO: 73602 - DNA, 25 bp, Saccharomyces pastorianus
taaaattgtgggtgcctttgccgaa

SEQ ID NO: 73603 - DNA, 25 bp, Saccharomyces pastorianus
agggccagagccttagggatcaact

SEQ ID NO: 73604 - DNA, 25 bp, Saccharomyces pastorianus
gataacctggtgaccatcggttcct

SEQ ID NO: 73605 - DNA, 25 bp, Saccharomyces pastorianus
ggttcctccttggaccattgtaaag

SEQ ID NO: 73606 - DNA, 25 bp, Saccharomyces pastorianus
aaagtcctggatccaattccttcta

SEQ ID NO: 73607 - DNA, 25 bp, Saccharomyces pastorianus
gtcggtgaaatatttgcgtcccctt

SEQ ID NO: 73608 - DNA, 25 bp, Saccharomyces pastorianus
gatagagccttcgtggatttcgaca

SEQ ID NO: 73609 - DNA, 25 bp, Saccharomyces pastorianus
ggatcaactgtcgtgtcgctgtcat

SEQ ID NO: 73610 - DNA, 25 bp, Saccharomyces pastorianus
ttgcattttggtctatctgctgaaa

SEQ ID NO: 73611 - DNA, 25 bp, Saccharomyces pastorianus
gtccttccgttatcgagggtatact

SEQ ID NO: 73612 - DNA, 25 bp, Saccharomyces pastorianus
atgattctatggttcgtcgccacgg

SEQ ID NO: 73613 - DNA, 25 bp, Saccharomyces pastorianus
gcagtcgcgaacgattccgggtgtt

SEQ ID NO: 73614 - DNA, 25 bp, Saccharomyces pastorianus
tactgtgtgaggtctctcgtgggct

SEQ ID NO: 73615 - DNA, 25 bp, Saccharomyces pastorianus
taatcttgatagcagcatttatctg

SEQ ID NO: 73616 - DNA, 25 bp, Saccharomyces pastorianus
ggaatctacggcagtcgcgaacgat

SEQ ID NO: 73617 - DNA, 25 bp, Saccharomyces pastorianus
agaagcaacggtggcagcagcagca

SEQ ID NO: 73618 - DNA, 25 bp, Saccharomyces pastorianus
acgattccgggtgttctgctttatt

SEQ ID NO: 73619 - DNA, 25 bp, Saccharomyces pastorianus
gggtatactgtgtgaggtctctcgt

SEQ ID NO: 73620 - DNA, 25 bp, Saccharomyces pastorianus
gggcaccttgctcatgattctatgg

SEQ ID NO: 73621 - DNA, 25 bp, Saccharomyces pastorianus
aagcgagcttggaatctacggcagt

SEQ ID NO: 73622 - DNA, 25 bp, Saccharomyces pastorianus
ctgaagatagcgtggtacgtgtacc

SEQ ID NO: 73623 - DNA, 25 bp, Saccharomyces pastorianus
ttgcacacgtcgctgaagatagcgt

SEQ ID NO: 73624 - DNA, 25 bp, Saccharomyces pastorianus
aacagtctcgttaccaaatggttga

SEQ ID NO: 73625 - DNA, 25 bp, Saccharomyces pastorianus
taaaaaacagtctcgttaccaaatg

SEQ ID NO: 73626 - DNA, 25 bp, Saccharomyces pastorianus
cacgtcgctgaagatagcgtggtac

SEQ ID NO: 73627 - DNA, 25 bp, Saccharomyces pastorianus
cgtcgctgaagatagcgtggtacgt

SEQ ID NO: 73628 - DNA, 25 bp, Saccharomyces pastorianus
acagtctcgttaccaaatggttgaa

SEQ ID NO: 73629 - DNA, 25 bp, Saccharomyces pastorianus
tgcacacgtcgctgaagatagcgtg

SEQ ID NO: 73630 - DNA, 25 bp, Saccharomyces pastorianus
cacacgtcgctgaagatagcgtggt

SEQ ID NO: 73631 - DNA, 25 bp, Saccharomyces pastorianus
gaagatagcgtggtacgtgtaccgt

SEQ ID NO: 73632 - DNA, 25 bp, Saccharomyces pastorianus
aaacagtctcgttaccaaatggttg

SEQ ID NO: 73633 - DNA, 25 bp, Saccharomyces pastorianus
gtcaggcgcttatctactgctgggc

SEQ ID NO: 73634 - DNA, 25 bp, Saccharomyces pastorianus
atggcccatagtgacgcagttcctt

SEQ ID NO: 73635 - DNA, 25 bp, Saccharomyces pastorianus
aggtgatcagacacatcctgtcgaa

SEQ ID NO: 73636 - DNA, 25 bp, Saccharomyces pastorianus
gggacggtacgttcgactttgccat

SEQ ID NO: 73637 - DNA, 25 bp, Saccharomyces pastorianus
aaacttacaccagctgccaaggcta

SEQ ID NO: 73638 - DNA, 25 bp, Saccharomyces pastorianus
gttcatcactggtccacgagggaga

SEQ ID NO: 73639 - DNA, 25 bp, Saccharomyces pastorianus
atctcgattgccgtagttcatcact

SEQ ID NO: 73640 - DNA, 25 bp, Saccharomyces pastorianus
acatgatcggttcggatcgctcgga

SEQ ID NO: 73641 - DNA, 25 bp, Saccharomyces pastorianus
tcggagtgaaccctaacgtatacat

SEQ ID NO: 73642 - DNA, 25 bp, Saccharomyces pastorianus
tagaggtatagacccggcctacaat

SEQ ID NO: 73643 - DNA, 25 bp, Saccharomyces pastorianus
gagatagcgccgcatttttcgcaga

SEQ ID NO: 73644 - DNA, 25 bp, Saccharomyces pastorianus
tggtcaaggtacaggcgctacgtct

SEQ ID NO: 73645 - DNA, 25 bp, Saccharomyces pastorianus
acttgggcttctggcggagaatcta

SEQ ID NO: 73646 - DNA, 25 bp, Saccharomyces pastorianus
caagatggtggcaacaggtccgctt

SEQ ID NO: 73647 - DNA, 25 bp, Saccharomyces pastorianus
gatcgacttatggtggagcttccac

SEQ ID NO: 73648 - DNA, 25 bp, Saccharomyces pastorianus
gaacaatcaaggaaacaagtcgaac

SEQ ID NO: 73649 - DNA, 25 bp, Saccharomyces pastorianus
acttatggtggagcttccacttggg

SEQ ID NO: 73650 - DNA, 25 bp, Saccharomyces pastorianus
caacaggtccgcttggaacaatcaa

SEQ ID NO: 73651 - DNA, 25 bp, Saccharomyces pastorianus
ttccacttgggcttctggcggagaa

SEQ ID NO: 73652 - DNA, 25 bp, Saccharomyces pastorianus
gtggaactggtgacagatcgactta

SEQ ID NO: 73653 - DNA, 25 bp, Saccharomyces pastorianus
ggtacaggcgctacgtctacttggg

SEQ ID NO: 73654 - DNA, 25 bp, Saccharomyces pastorianus
gcggagaatctaatggtgctatgtc

SEQ ID NO: 73655 - DNA, 25 bp, Saccharomyces pastorianus
gaaacggttttgaagctgcgacgat

SEQ ID NO: 73656 - DNA, 25 bp, Saccharomyces pastorianus
ggtaactttaccgacgactctgaat

SEQ ID NO: 73657 - DNA, 25 bp, Saccharomyces pastorianus
ggtcgtctatattcctaactcaaaa

SEQ ID NO: 73658 - DNA, 25 bp, Saccharomyces pastorianus
acaacatcactgagcgtcttggaat

SEQ ID NO: 73659 - DNA, 25 bp, Saccharomyces pastorianus
cgacgactctgaattcttgggctgt

SEQ ID NO: 73660 - DNA, 25 bp, Saccharomyces pastorianus
ggccgagtggcgtctgtatgactta

SEQ ID NO: 73661 - DNA, 25 bp, Saccharomyces pastorianus
tgggctgtatcggttgtgctatcat

SEQ ID NO: 73662 - DNA, 25 bp, Saccharomyces pastorianus
tcaaaacttgccattagtcccacta

SEQ ID NO: 73663 - DNA, 25 bp, Saccharomyces pastorianus
atggcttttccatacgttccagatg

SEQ ID NO: 73664 - DNA, 25 bp, Saccharomyces pastorianus
gtatgacttacacctatgagcgcca

SEQ ID NO: 73665 - DNA, 25 bp, Saccharomyces pastorianus
ttaacggacctggagtacgtgccac

SEQ ID NO: 73666 - DNA, 25 bp, Saccharomyces pastorianus
ctggtcacaatagaactgtcccttc

SEQ ID NO: 73667 - DNA, 25 bp, Saccharomyces pastorianus
aagtgagtcttcctctacaagtgga

SEQ ID NO: 73668 - DNA, 25 bp, Saccharomyces pastorianus
aagcgtctcccatgtttgcatcata

SEQ ID NO: 73669 - DNA, 25 bp, Saccharomyces pastorianus
aagcttattcgtcagtttgttcaaa

SEQ ID NO: 73670 - DNA, 25 bp, Saccharomyces pastorianus
gattggatcctacatgcttttgttg

SEQ ID NO: 73671 - DNA, 25 bp, Saccharomyces pastorianus
aaactgttggttcctctggtgttat

SEQ ID NO: 73672 - DNA, 25 bp, Saccharomyces pastorianus
gccgcgctaggtgtatcgttaatta

SEQ ID NO: 73673 - DNA, 25 bp, Saccharomyces pastorianus
tatcatcaagctttttccacacgaa

SEQ ID NO: 73674 - DNA, 25 bp, Saccharomyces pastorianus
gcatcatgttttgtggtcctgccaa

SEQ ID NO: 73675 - DNA, 25 bp, Saccharomyces pastorianus
accgttactcttatagccttttcag

SEQ ID NO: 73676 - DNA, 25 bp, Saccharomyces pastorianus
atcaaaattcattcgcaagcgtctc

SEQ ID NO: 73677 - DNA, 25 bp, Saccharomyces pastorianus
atcgacttcgtcacttgggtagctg

SEQ ID NO: 73678 - DNA, 25 bp, Saccharomyces pastorianus
ggagttccatccctgttcgcaagaa

SEQ ID NO: 73679 - DNA, 25 bp, Saccharomyces pastorianus
aaatatcgacctagccgacttggcg

SEQ ID NO: 73680 - DNA, 25 bp, Saccharomyces pastorianus
tatcagggtacccaatcgacttcgt

SEQ ID NO: 73681 - DNA, 25 bp, Saccharomyces pastorianus
gagaatgcgcatccaaggcggctaa

SEQ ID NO: 73682 - DNA, 25 bp, Saccharomyces pastorianus
ggttcattggatgccgtactatcgt

SEQ ID NO: 73683 - DNA, 25 bp, Saccharomyces pastorianus
gcatctatcttgagcatgtcactgc

SEQ ID NO: 73684 - DNA, 25 bp, Saccharomyces pastorianus
cttggagtcagcagcatgggcgaat

SEQ ID NO: 73685 - DNA, 25 bp, Saccharomyces pastorianus
aaagcacgccttggacaactacgaa

SEQ ID NO: 73686 - DNA, 25 bp, Saccharomyces pastorianus
gcgaaagactactacaggctgccaa

SEQ ID NO: 73687 - DNA, 25 bp, Saccharomyces pastorianus
gggtagctgagcattgttctgcgaa

SEQ ID NO: 73688 - DNA, 25 bp, Saccharomyces pastorianus
gaggtactaccgctatttaaattct

SEQ ID NO: 73689 - DNA, 25 bp, Saccharomyces pastorianus
tacctacatttaccaacgacccaat

SEQ ID NO: 73690 - DNA, 25 bp, Saccharomyces pastorianus
aaattcttgatacctatgtgcagac

SEQ ID NO: 73691 - DNA, 25 bp, Saccharomyces pastorianus
gatgaactgtactctctgttgaata

SEQ ID NO: 73692 - DNA, 25 bp, Saccharomyces pastorianus
attttgcccaacacaggcgctataa

SEQ ID NO: 73693 - DNA, 25 bp, Saccharomyces pastorianus
actcagcaaacttgtgcacgctttt

SEQ ID NO: 73694 - DNA, 25 bp, Saccharomyces pastorianus
gatcacattaactcacaaacggcaa

SEQ ID NO: 73695 - DNA, 25 bp, Saccharomyces pastorianus
tggacgagcattttggtaggacttc

SEQ ID NO: 73696 - DNA, 25 bp, Saccharomyces pastorianus
gaacagagcctatccagtgaatttg

SEQ ID NO: 73697 - DNA, 25 bp, Saccharomyces pastorianus
gcgtttataacagatcttgcaccaa

SEQ ID NO: 73698 - DNA, 25 bp, Saccharomyces pastorianus
attcatactagctttcgctcttcaa

SEQ ID NO: 73699 - DNA, 25 bp, Saccharomyces pastorianus
agggaccaaccgcagaagttccatc

SEQ ID NO: 73700 - DNA, 25 bp, Saccharomyces pastorianus
agttccatccaaaatcctgtgttca

SEQ ID NO: 73701 - DNA, 25 bp, Saccharomyces pastorianus
gaccttctccagtgctaagcatgaa

SEQ ID NO: 73702 - DNA, 25 bp, Saccharomyces pastorianus
aggactcccatcttgggcgcgaaag

SEQ ID NO: 73703 - DNA, 25 bp, Saccharomyces pastorianus
aaagcagctttcgaagacggacctt

SEQ ID NO: 73704 - DNA, 25 bp, Saccharomyces pastorianus
gctgatcaacaggtacttgctggca

SEQ ID NO: 73705 - DNA, 25 bp, Saccharomyces pastorianus
ttgtccacggacagtttctcgtcag

SEQ ID NO: 73706 - DNA, 25 bp, Saccharomyces pastorianus
aagccgcttgatgtggcgcagacgt

SEQ ID NO: 73707 - DNA, 25 bp, Saccharomyces pastorianus
aatgcgagcgtcactggagggacca

SEQ ID NO: 73708 - DNA, 25 bp, Saccharomyces pastorianus
caagaaacccagttcgttcaggact

SEQ ID NO: 73709 - DNA, 25 bp, Saccharomyces pastorianus
accgtattcgctctattctaacaac

SEQ ID NO: 73710 - DNA, 25 bp, Saccharomyces pastorianus
agacactcgtcctgctacggtatac

SEQ ID NO: 73711 - DNA, 25 bp, Saccharomyces pastorianus
agagaatccacttcgatgctttcgt

SEQ ID NO: 73712 - DNA, 25 bp, Saccharomyces pastorianus
gacagtcttccttaggtgacacagc

SEQ ID NO: 73713 - DNA, 25 bp, Saccharomyces pastorianus
atagcggaaacttcgcccattattc

SEQ ID NO: 73714 - DNA, 25 bp, Saccharomyces pastorianus
aacgctcaaagcctaggtccagaca

SEQ ID NO: 73715 - DNA, 25 bp, Saccharomyces pastorianus
gaacgcacggcagctaatttgagaa

SEQ ID NO: 73716 - DNA, 25 bp, Saccharomyces pastorianus
atagcagtactcttattcaccaact

SEQ ID NO: 73717 - DNA, 25 bp, Saccharomyces pastorianus
ctgaattggattcgctggcagcaaa

SEQ ID NO: 73718 - DNA, 25 bp, Saccharomyces pastorianus
ccatcgtctaatcttcccaatgaaa

SEQ ID NO: 73719 - DNA, 25 bp, Saccharomyces pastorianus
tcagccaaatgatactactctccca

SEQ ID NO: 73720 - DNA, 25 bp, Saccharomyces pastorianus
attcgtcccgctccaagaagagtaa

SEQ ID NO: 73721 - DNA, 25 bp, Saccharomyces pastorianus
gcaatgagtctcatcttggattcaa

SEQ ID NO: 73722 - DNA, 25 bp, Saccharomyces pastorianus
tgcagattcagactccgacaacgac

SEQ ID NO: 73723 - DNA, 25 bp, Saccharomyces pastorianus
aaaagaggacgacatgggcccaccg

SEQ ID NO: 73724 - DNA, 25 bp, Saccharomyces pastorianus
gttatagcggccaagcgagccagaa

SEQ ID NO: 73725 - DNA, 25 bp, Saccharomyces pastorianus
ttttcattggttcagagcacgagca

SEQ ID NO: 73726 - DNA, 25 bp, Saccharomyces pastorianus
tatatcctaaggaaccacctgcccg

SEQ ID NO: 73727 - DNA, 25 bp, Saccharomyces pastorianus
cacaattcaaccactgtaccagagc

SEQ ID NO: 73728 - DNA, 25 bp, Saccharomyces pastorianus
accaccgggcccacagaatagtaag

SEQ ID NO: 73729 - DNA, 25 bp, Saccharomyces pastorianus
agtagcttcttttcctaaagccata

SEQ ID NO: 73730 - DNA, 25 bp, Saccharomyces pastorianus
tatgaagaaaggaccaccgggccca

SEQ ID NO: 73731 - DNA, 25 bp, Saccharomyces pastorianus
gggttattcctccagatttgcagat

SEQ ID NO: 73732 - DNA, 25 bp, Saccharomyces pastorianus
ggcccgcagggaataagttggcttt

SEQ ID NO: 73733 - DNA, 25 bp, Saccharomyces pastorianus
ggaaagagctttcgcttactcactg

SEQ ID NO: 73734 - DNA, 25 bp, Saccharomyces pastorianus
cactgtcgccgtgttttcctttgtt

SEQ ID NO: 73735 - DNA, 25 bp, Saccharomyces pastorianus
cgccgcgcaaaaagaggcccgcagg

SEQ ID NO: 73736 - DNA, 25 bp, Saccharomyces pastorianus
tttcgcttactcactgtcgccgtgt

SEQ ID NO: 73737 - DNA, 25 bp, Saccharomyces pastorianus
ttggctttaccggaacttcgccaga

SEQ ID NO: 73738 - DNA, 25 bp, Saccharomyces pastorianus
cccttgcattgcctggaaagagctt

SEQ ID NO: 73739 - DNA, 25 bp, Saccharomyces pastorianus
cagacaacggcggaggacccttgca

SEQ ID NO: 73740 - DNA, 25 bp, Saccharomyces pastorianus
aagagctttcgcttactcactgtcg

SEQ ID NO: 73741 - DNA, 25 bp, Saccharomyces pastorianus
gggcgcttaaatccgccgcgcaaaa

SEQ ID NO: 73742 - DNA, 25 bp, Saccharomyces pastorianus
ttaccggaacttcgccagacaacgg

SEQ ID NO: 73743 - DNA, 25 bp, Saccharomyces pastorianus
aggtgccacctacggtaagccaact

SEQ ID NO: 73744 - DNA, 25 bp, Saccharomyces pastorianus
gctagaagactaggttacaaggcca

SEQ ID NO: 73745 - DNA, 25 bp, Saccharomyces pastorianus
aagactaggttacaaggccaagcaa

SEQ ID NO: 73746 - DNA, 25 bp, Saccharomyces pastorianus
gatttaccgtgtcagggttagacgt

SEQ ID NO: 73747 - DNA, 25 bp, Saccharomyces pastorianus
gacctgttccaaaaggtgccaccta

SEQ ID NO: 73748 - DNA, 25 bp, Saccharomyces pastorianus
tgttccaaaaggtgccacctacggt

SEQ ID NO: 73749 - DNA, 25 bp, Saccharomyces pastorianus
tcgtgatttaccgtgtcagggttag

SEQ ID NO: 73750 - DNA, 25 bp, Saccharomyces pastorianus
aggtttcgtgatttaccgtgtcagg

SEQ ID NO: 73751 - DNA, 25 bp, Saccharomyces pastorianus
gtgatttaccgtgtcagggttagac

SEQ ID NO: 73752 - DNA, 25 bp, Saccharomyces pastorianus
gtttcgtgatttaccgtgtcagggt

SEQ ID NO: 73753 - DNA, 25 bp, Saccharomyces pastorianus
gagacctgttccaaaaggtgccacc

SEQ ID NO: 73754 - DNA, 25 bp, Saccharomyces pastorianus
tatcatctcctgtgctgttttgcct

SEQ ID NO: 73755 - DNA, 25 bp, Saccharomyces pastorianus
ctcgtcatctttgtatagcctcttg

SEQ ID NO: 73756 - DNA, 25 bp, Saccharomyces pastorianus
agcctcttgttctctagggtctcta

SEQ ID NO: 73757 - DNA, 25 bp, Saccharomyces pastorianus
tgttctctagggtctctatcatctc

SEQ ID NO: 73758 - DNA, 25 bp, Saccharomyces pastorianus
gtatagcctcttgttctctagggtc

SEQ ID NO: 73759 - DNA, 25 bp, Saccharomyces pastorianus
gtcctcgtcatctttgtatagcctc

SEQ ID NO: 73760 - DNA, 25 bp, Saccharomyces pastorianus
ctttgtatagcctcttgttctctag

SEQ ID NO: 73761 - DNA, 25 bp, Saccharomyces pastorianus
tcttgttctctagggtctctatcat

SEQ ID NO: 73762 - DNA, 25 bp, Saccharomyces pastorianus
gtcatctttgtatagcctcttgttc

SEQ ID NO: 73763 - DNA, 25 bp, Saccharomyces pastorianus
tctctatcatctcctgtgctgtttt

SEQ ID NO: 73764 - DNA, 25 bp, Saccharomyces pastorianus
tagggtctctatcatctcctgtgct

SEQ ID NO: 73765 - DNA, 25 bp, Saccharomyces pastorianus
aacgatgattcgtatggatcttcta

SEQ ID NO: 73766 - DNA, 25 bp, Saccharomyces pastorianus
cggttcttccaacaacgatgacact

SEQ ID NO: 73767 - DNA, 25 bp, Saccharomyces pastorianus
gaacaagtcatcttacggttcttcc

SEQ ID NO: 73768 - DNA, 25 bp, Saccharomyces pastorianus
acgatgacacttatggttcttccaa

SEQ ID NO: 73769 - DNA, 25 bp, Saccharomyces pastorianus
cgacgactcatatggatcttctaac

SEQ ID NO: 73770 - DNA, 25 bp, Saccharomyces pastorianus
aacaacgatgacacttacggctctt

SEQ ID NO: 73771 - DNA, 25 bp, Saccharomyces pastorianus
ggctcttccaacaacgacgactcat

SEQ ID NO: 73772 - DNA, 25 bp, Saccharomyces pastorianus
aagaacaagtcctcttacggctctt

SEQ ID NO: 73773 - DNA, 25 bp, Saccharomyces pastorianus
ggttcttccaacaacgatgacactt

SEQ ID NO: 73774 - DNA, 25 bp, Saccharomyces pastorianus
ggttcttccaacaacgacgactcat

SEQ ID NO: 73775 - DNA, 25 bp, Saccharomyces pastorianus
gattcgtatggatcttctaacaaga

SEQ ID NO: 73776 - DNA, 25 bp, Saccharomyces pastorianus
aaccaatacggtggcgacgacaatt

SEQ ID NO: 73777 - DNA, 25 bp, Saccharomyces pastorianus
aacgatggttcgtatggttccaaca

SEQ ID NO: 73778 - DNA, 25 bp, Saccharomyces pastorianus
gtatggttccaacaataatgattct

SEQ ID NO: 73779 - DNA, 25 bp, Saccharomyces pastorianus
gtaaccaatacggtggcgacgacaa

SEQ ID NO: 73780 - DNA, 25 bp, Saccharomyces pastorianus
ttcatctaacaatggtggccgtaac

SEQ ID NO: 73781 - DNA, 25 bp, Saccharomyces pastorianus
aatggtggccgtaaccaatacggtg

SEQ ID NO: 73782 - DNA, 25 bp, Saccharomyces pastorianus
gtggccgtaaccaatacggtggcga

SEQ ID NO: 73783 - DNA, 25 bp, Saccharomyces pastorianus
ggttcatctaacaatggtggccgta

SEQ ID NO: 73784 - DNA, 25 bp, Saccharomyces pastorianus
tatggttcatctaacaatggtggcc

SEQ ID NO: 73785 - DNA, 25 bp, Saccharomyces pastorianus
tctaacaatggtggccgtaaccaat

SEQ ID NO: 73786 - DNA, 25 bp, Saccharomyces pastorianus
ggttccaacaataatgattcttatg

SEQ ID NO: 73787 - DNA, 25 bp, Saccharomyces pastorianus
gtctataccgttgattgagctcagt

SEQ ID NO: 73788 - DNA, 25 bp, Saccharomyces pastorianus
agacttccccaatagactcattgtc

SEQ ID NO: 73789 - DNA, 25 bp, Saccharomyces pastorianus
ttatgaatttctcaaccccagcaga

SEQ ID NO: 73790 - DNA, 25 bp, Saccharomyces pastorianus
agggatccgaacacatgcaatactg

SEQ ID NO: 73791 - DNA, 25 bp, Saccharomyces pastorianus
tcttctacaacacctagggatccga

SEQ ID NO: 73792 - DNA, 25 bp, Saccharomyces pastorianus
taccctcttcgccttgtggaatgta

SEQ ID NO: 73793 - DNA, 25 bp, Saccharomyces pastorianus
ttccttaactggttcacacttcaac

SEQ ID NO: 73794 - DNA, 25 bp, Saccharomyces pastorianus
tgttgccaccgtaaagaagcttgtc

SEQ ID NO: 73795 - DNA, 25 bp, Saccharomyces pastorianus
gagctcagtcactcaagttcagcag

SEQ ID NO: 73796 - DNA, 25 bp, Saccharomyces pastorianus
aaattccattgaccagtgacgccga

SEQ ID NO: 73797 - DNA, 25 bp, Saccharomyces pastorianus
atttcttcgaatcaccaacttcctt

SEQ ID NO: 73798 - DNA, 25 bp, Saccharomyces pastorianus
gaagacccgtgtcaaggattttctc

SEQ ID NO: 73799 - DNA, 25 bp, Saccharomyces pastorianus
ggataccactgctttaaacaccgtt

SEQ ID NO: 73800 - DNA, 25 bp, Saccharomyces pastorianus
ttttctcattcattatcctcatagt

SEQ ID NO: 73801 - DNA, 25 bp, Saccharomyces pastorianus
tggcgttgttcggaggacctgaaaa

SEQ ID NO: 73802 - DNA, 25 bp, Saccharomyces pastorianus
attgagactttagccgttttcagaa

SEQ ID NO: 73803 - DNA, 25 bp, Saccharomyces pastorianus
gatagactagcttcatggcgttgtt

SEQ ID NO: 73804 - DNA, 25 bp, Saccharomyces pastorianus
gcgatctgatacgtgagcggctaaa

SEQ ID NO: 73805 - DNA, 25 bp, Saccharomyces pastorianus
gcttggtatccaatgtttcctcgga

SEQ ID NO: 73806 - DNA, 25 bp, Saccharomyces pastorianus
aaacggagcggttcttctcatcaat

SEQ ID NO: 73807 - DNA, 25 bp, Saccharomyces pastorianus
gagatacccttacacttggatatga

SEQ ID NO: 73808 - DNA, 25 bp, Saccharomyces pastorianus
aagatcgttctacctacagatttgg

SEQ ID NO: 73809 - DNA, 25 bp, Saccharomyces pastorianus
cacgatctaggttttttggcgctac

SEQ ID NO: 73810 - DNA, 25 bp, Saccharomyces pastorianus
gaacacctaagatcgtatacctaca

SEQ ID NO: 73811 - DNA, 25 bp, Saccharomyces pastorianus
aactttatgcccgactctatcttaa

SEQ ID NO: 73812 - DNA, 25 bp, Saccharomyces pastorianus
caatgagtgaatcggcttttgcatc

SEQ ID NO: 73813 - DNA, 25 bp, Saccharomyces pastorianus
gcttttgcatctttgggtccagtag

SEQ ID NO: 73814 - DNA, 25 bp, Saccharomyces pastorianus
gccacaattgctgatcttagtaaca

SEQ ID NO: 73815 - DNA, 25 bp, Saccharomyces pastorianus
gaaatagaatggttcctccggtggg

SEQ ID NO: 73816 - DNA, 25 bp, Saccharomyces pastorianus
gaatacagctgttaaccctgcacgc

SEQ ID NO: 73817 - DNA, 25 bp, Saccharomyces pastorianus
gggataatacgccagctatagctca

SEQ ID NO: 73818 - DNA, 25 bp, Saccharomyces pastorianus
tcaacatcttctggccatcaatcaa

SEQ ID NO: 73819 - DNA, 25 bp, Saccharomyces pastorianus
tttacgatatcagcaccgaactctc

SEQ ID NO: 73820 - DNA, 25 bp, Saccharomyces pastorianus
gaactatctaaactggaccgcctac

SEQ ID NO: 73821 - DNA, 25 bp, Saccharomyces pastorianus
gcggctgcagcgtatggttctatta

SEQ ID NO: 73822 - DNA, 25 bp, Saccharomyces pastorianus
ctctgatttacctgatattggcaat

SEQ ID NO: 73823 - DNA, 25 bp, Saccharomyces pastorianus
aagcggatttgatgtagcggctgca

SEQ ID NO: 73824 - DNA, 25 bp, Saccharomyces pastorianus
aaacttgagtttccattcacacagg

SEQ ID NO: 73825 - DNA, 25 bp, Saccharomyces pastorianus
gaccgcctacataactctcatgatc

SEQ ID NO: 73826 - DNA, 25 bp, Saccharomyces pastorianus
aactgtctaccttcaggattggcct

SEQ ID NO: 73827 - DNA, 25 bp, Saccharomyces pastorianus
gctggatcacgctaattctaggttt

SEQ ID NO: 73828 - DNA, 25 bp, Saccharomyces pastorianus
ggaggacagcgtgactagacattat

SEQ ID NO: 73829 - DNA, 25 bp, Saccharomyces pastorianus
gaggtatataccgagctggatcacg

SEQ ID NO: 73830 - DNA, 25 bp, Saccharomyces pastorianus
ctcctctgcaggtttagttacggtt

SEQ ID NO: 73831 - DNA, 25 bp, Saccharomyces pastorianus
aagatcataggtgcccagtgtccgg

SEQ ID NO: 73832 - DNA, 25 bp, Saccharomyces pastorianus
agaagcggatcaccgactttcggag

SEQ ID NO: 73833 - DNA, 25 bp, Saccharomyces pastorianus
gcttgttttcattcgacagcggcaa

SEQ ID NO: 73834 - DNA, 25 bp, Saccharomyces pastorianus
aacacccggtcgcagcggaagctgt

SEQ ID NO: 73835 - DNA, 25 bp, Saccharomyces pastorianus
tccagtgcctggacagagccaatgt

SEQ ID NO: 73836 - DNA, 25 bp, Saccharomyces pastorianus
agcggcaagaaggattctcaacccc

SEQ ID NO: 73837 - DNA, 25 bp, Saccharomyces pastorianus
gagccaatgttctggacgccaccga

SEQ ID NO: 73838 - DNA, 25 bp, Saccharomyces pastorianus
gtgtccggcggagaacaagaagttt

SEQ ID NO: 73839 - DNA, 25 bp, Saccharomyces pastorianus
gtccagggacgtgttcttccagtgc

SEQ ID NO: 73840 - DNA, 25 bp, Saccharomyces pastorianus
tgcgctcacagttggatcaagtact

SEQ ID NO: 73841 - DNA, 25 bp, Saccharomyces pastorianus
aagtttgaggagaactgcgctcaca

SEQ ID NO: 73842 - DNA, 25 bp, Saccharomyces pastorianus
ttcacagacggaataacgataacaa

SEQ ID NO: 73843 - DNA, 25 bp, Saccharomyces pastorianus
gatgtccttgacgaagaaccagtaa

SEQ ID NO: 73844 - DNA, 25 bp, Saccharomyces pastorianus
aacagaagccaattcacagacggaa

SEQ ID NO: 73845 - DNA, 25 bp, Saccharomyces pastorianus
gaaccagtaaagaaacagaagccaa

SEQ ID NO: 73846 - DNA, 25 bp, Saccharomyces pastorianus
gccgatgtccttgacgaagaaccag

SEQ ID NO: 73847 - DNA, 25 bp, Saccharomyces pastorianus
gacactgaaaccaagacaaatcaca

SEQ ID NO: 73848 - DNA, 25 bp, Saccharomyces pastorianus
aagagacactgaaaccaagacaaat

SEQ ID NO: 73849 - DNA, 25 bp, Saccharomyces pastorianus
agaagccaattcacagacggaataa

SEQ ID NO: 73850 - DNA, 25 bp, Saccharomyces pastorianus
gccaattcacagacggaataacgat

SEQ ID NO: 73851 - DNA, 25 bp, Saccharomyces pastorianus
tatatgggccgatgtccttgacgaa

SEQ ID NO: 73852 - DNA, 25 bp, Saccharomyces pastorianus
tctatatgggccgatgtccttgacg

SEQ ID NO: 73853 - DNA, 25 bp, Saccharomyces pastorianus
aacttgcgggttttgagcatacgac

SEQ ID NO: 73854 - DNA, 25 bp, Saccharomyces pastorianus
ggatgtggttaatctatccaacctt

SEQ ID NO: 73855 - DNA, 25 bp, Saccharomyces pastorianus
tacagtcgacggaaacctgcttcgt

SEQ ID NO: 73856 - DNA, 25 bp, Saccharomyces pastorianus
agtgatgcagatacagtttccgtaa

SEQ ID NO: 73857 - DNA, 25 bp, Saccharomyces pastorianus
gacatgatcctcctttaaacggtaa

SEQ ID NO: 73858 - DNA, 25 bp, Saccharomyces pastorianus
gaaccttcgccgtttgaagttcaat

SEQ ID NO: 73859 - DNA, 25 bp, Saccharomyces pastorianus
gtgatgatgaattcctccagagcat

SEQ ID NO: 73860 - DNA, 25 bp, Saccharomyces pastorianus
tccagagcatagcaggtgaccttgt

SEQ ID NO: 73861 - DNA, 25 bp, Saccharomyces pastorianus
taaggttggcttcgcatgctttgaa

SEQ ID NO: 73862 - DNA, 25 bp, Saccharomyces pastorianus
tttacgagacagtgcttccgacctg

SEQ ID NO: 73863 - DNA, 25 bp, Saccharomyces pastorianus
gcaggtgaccttgtttccttgacaa

SEQ ID NO: 73864 - DNA, 25 bp, Saccharomyces pastorianus
aatccttggcagtgttgtgttcttc

SEQ ID NO: 73865 - DNA, 25 bp, Saccharomyces pastorianus
atgtccttaccagcgtagtccaaga

SEQ ID NO: 73866 - DNA, 25 bp, Saccharomyces pastorianus
gtattgctcgacatcttcgtagttt

SEQ ID NO: 73867 - DNA, 25 bp, Saccharomyces pastorianus
ttcattatctccgtgatgtccttac

SEQ ID NO: 73868 - DNA, 25 bp, Saccharomyces pastorianus
aagtaacccagcaatccttggcagt

SEQ ID NO: 73869 - DNA, 25 bp, Saccharomyces pastorianus
aaacagctccagtgtcttggaagta

SEQ ID NO: 73870 - DNA, 25 bp, Saccharomyces pastorianus
gtagtccaagatgaactcctcacca

SEQ ID NO: 73871 - DNA, 25 bp, Saccharomyces pastorianus
gtacatcgctgtctttcattatctc

SEQ ID NO: 73872 - DNA, 25 bp, Saccharomyces pastorianus
ggtcacgtcataaatctttctgttc

SEQ ID NO: 73873 - DNA, 25 bp, Saccharomyces pastorianus
gttctatcactattccttacagctc

SEQ ID NO: 73874 - DNA, 25 bp, Saccharomyces pastorianus
tgtgttcttctaccgtcttcttaga

SEQ ID NO: 73875 - DNA, 25 bp, Saccharomyces pastorianus
agaaggaccaaacagcggctctagc

SEQ ID NO: 73876 - DNA, 25 bp, Saccharomyces pastorianus
ttgtcaaccacaccctgtacatgga

SEQ ID NO: 73877 - DNA, 25 bp, Saccharomyces pastorianus
gaaagctgaccttcgcagatgtcaa

SEQ ID NO: 73878 - DNA, 25 bp, Saccharomyces pastorianus
gaagcaatacgaccaacctctcgaa

SEQ ID NO: 73879 - DNA, 25 bp, Saccharomyces pastorianus
aaagcgatgccgagagtttgcccaa

SEQ ID NO: 73880 - DNA, 25 bp, Saccharomyces pastorianus
ctgctctgagacatacatccgtgtt

SEQ ID NO: 73881 - DNA, 25 bp, Saccharomyces pastorianus
gagagtttgcccaagctacaacctg

SEQ ID NO: 73882 - DNA, 25 bp, Saccharomyces pastorianus
gggccatttacaggctaagccactt

SEQ ID NO: 73883 - DNA, 25 bp, Saccharomyces pastorianus
tacaacctgccatcagcgtaagtag

SEQ ID NO: 73884 - DNA, 25 bp, Saccharomyces pastorianus
taacttcatgtacgcctacctgaac

SEQ ID NO: 73885 - DNA, 25 bp, Saccharomyces pastorianus
agcaggtcctgctgagtaacttcat

SEQ ID NO: 73886 - DNA, 25 bp, Saccharomyces pastorianus
ggacggatccatttatttcagtata

SEQ ID NO: 73887 - DNA, 25 bp, Saccharomyces pastorianus
aaaggcggcctagacgacattttcg

SEQ ID NO: 73888 - DNA, 25 bp, Saccharomyces pastorianus
ataattctcagcaattcggtggcca

SEQ ID NO: 73889 - DNA, 25 bp, Saccharomyces pastorianus
gtgcaaccagtctttgtaaatccga

SEQ ID NO: 73890 - DNA, 25 bp, Saccharomyces pastorianus
tcggtggccattgctgcacaaacag

SEQ ID NO: 73891 - DNA, 25 bp, Saccharomyces pastorianus
gatgaccagctgtgtggttacatca

SEQ ID NO: 73892 - DNA, 25 bp, Saccharomyces pastorianus
ttgagtatcctttgctcccaatata

SEQ ID NO: 73893 - DNA, 25 bp, Saccharomyces pastorianus
gaatggatcctcacgtcggagttgc

SEQ ID NO: 73894 - DNA, 25 bp, Saccharomyces pastorianus
tttacgaaccactttcccgatgatt

SEQ ID NO: 73895 - DNA, 25 bp, Saccharomyces pastorianus
tatagactacttgggcgatgcaaat

SEQ ID NO: 73896 - DNA, 25 bp, Saccharomyces pastorianus
gaagccgatactcatctgttgtaat

SEQ ID NO: 73897 - DNA, 25 bp, Saccharomyces pastorianus
cattggatatgagagctgtttcgtt

SEQ ID NO: 73898 - DNA, 25 bp, Saccharomyces pastorianus
gagccccgttccaaaggattttcat

SEQ ID NO: 73899 - DNA, 25 bp, Saccharomyces pastorianus
tccatggtttgcgacttagagctgc

SEQ ID NO: 73900 - DNA, 25 bp, Saccharomyces pastorianus
atgcctcctggtagcgaaatgacaa

SEQ ID NO: 73901 - DNA, 25 bp, Saccharomyces pastorianus
tgtttcgttatattccgttgcctat

SEQ ID NO: 73902 - DNA, 25 bp, Saccharomyces pastorianus
ggtttttaaggatgcctcctggtag

SEQ ID NO: 73903 - DNA, 25 bp, Saccharomyces pastorianus
cacttggcgcgggttgttagattac

SEQ ID NO: 73904 - DNA, 25 bp, Saccharomyces pastorianus
agtgatcatttgtccatggtttgcg

SEQ ID NO: 73905 - DNA, 25 bp, Saccharomyces pastorianus
gggtgaacctgaaatttccaattgg

SEQ ID NO: 73906 - DNA, 25 bp, Saccharomyces pastorianus
gatggcacaacttcacaactcattg

SEQ ID NO: 73907 - DNA, 25 bp, Saccharomyces pastorianus
gttgcctataaaaacgttcatccag

SEQ ID NO: 73908 - DNA, 25 bp, Saccharomyces pastorianus
gctagaccagagaatatccgggatg

SEQ ID NO: 73909 - DNA, 25 bp, Saccharomyces pastorianus
gaaagtcaacctatcacgatgctcc

SEQ ID NO: 73910 - DNA, 25 bp, Saccharomyces pastorianus
atgctccccgatatatcacttgaca

SEQ ID NO: 73911 - DNA, 25 bp, Saccharomyces pastorianus
aacagtatcgagattcgctgccgca

SEQ ID NO: 73912 - DNA, 25 bp, Saccharomyces pastorianus
gcaatttgaaaactcgctgttgggt

SEQ ID NO: 73913 - DNA, 25 bp, Saccharomyces pastorianus
ttcgctgccgcaattgactgagaga

SEQ ID NO: 73914 - DNA, 25 bp, Saccharomyces pastorianus
gaaccatacagcttctacaagatga

SEQ ID NO: 73915 - DNA, 25 bp, Saccharomyces pastorianus
agaaggttgaactcgcaaatcacaa

SEQ ID NO: 73916 - DNA, 25 bp, Saccharomyces pastorianus
gggtgaatgaactctacagaaccat

SEQ ID NO: 73917 - DNA, 25 bp, Saccharomyces pastorianus
gcagtcatcaagcacgtttgccaat

SEQ ID NO: 73918 - DNA, 25 bp, Saccharomyces pastorianus
aacgttatgttggtgttccaggaat

SEQ ID NO: 73919 - DNA, 25 bp, Saccharomyces pastorianus
gcgtagcttgcatgtgagtgtcaga

SEQ ID NO: 73920 - DNA, 25 bp, Saccharomyces pastorianus
agagcttgcgttcctttgatggtat

SEQ ID NO: 73921 - DNA, 25 bp, Saccharomyces pastorianus
gtgggatcatatgacttccattgag

SEQ ID NO: 73922 - DNA, 25 bp, Saccharomyces pastorianus
gttgcgcgaccaaattgttatagct

SEQ ID NO: 73923 - DNA, 25 bp, Saccharomyces pastorianus
ctttgatggtatttccgagcggaca

SEQ ID NO: 73924 - DNA, 25 bp, Saccharomyces pastorianus
cttgtacagcaaggcaaggtcctct

SEQ ID NO: 73925 - DNA, 25 bp, Saccharomyces pastorianus
cagagactctctgcgtaaattgcaa

SEQ ID NO: 73926 - DNA, 25 bp, Saccharomyces pastorianus
attactatgctatttctcacgggag

SEQ ID NO: 73927 - DNA, 25 bp, Saccharomyces pastorianus
gccaatttctgtggtaatagcaagc

SEQ ID NO: 73928 - DNA, 25 bp, Saccharomyces pastorianus
tggcaaggcactttggcatggcact

SEQ ID NO: 73929 - DNA, 25 bp, Saccharomyces pastorianus
gatcgacattctttatattcactgg

SEQ ID NO: 73930 - DNA, 25 bp, Saccharomyces pastorianus
gaatttgggtcgttccctcaagagt

SEQ ID NO: 73931 - DNA, 25 bp, Saccharomyces pastorianus
cattcccaagggtagttcaagcagt

SEQ ID NO: 73932 - DNA, 25 bp, Saccharomyces pastorianus
acggacccagatcattggttcctta

SEQ ID NO: 73933 - DNA, 25 bp, Saccharomyces pastorianus
aactttacgatttctgtcctggaca

SEQ ID NO: 73934 - DNA, 25 bp, Saccharomyces pastorianus
acggtatcgtgtccagaccagtcaa

SEQ ID NO: 73935 - DNA, 25 bp, Saccharomyces pastorianus
cactgcatggtttactgttgatcta

SEQ ID NO: 73936 - DNA, 25 bp, Saccharomyces pastorianus
tccaacaaggttgccacggtatcgt

SEQ ID NO: 73937 - DNA, 25 bp, Saccharomyces pastorianus
atgccgctaagaacatatctgccgt

SEQ ID NO: 73938 - DNA, 25 bp, Saccharomyces pastorianus
tagaaggtcagctgctcattcccaa

SEQ ID NO: 73939 - DNA, 25 bp, Saccharomyces pastorianus
cctcaagagtctttcgctgtggaat

SEQ ID NO: 73940 - DNA, 25 bp, Saccharomyces pastorianus
gcatacagtttctactcatctgaag

SEQ ID NO: 73941 - DNA, 25 bp, Saccharomyces pastorianus
tcccaacaatatacatgcgatcctt

SEQ ID NO: 73942 - DNA, 25 bp, Saccharomyces pastorianus
ggacccagaagtagcaatcacgccc

SEQ ID NO: 73943 - DNA, 25 bp, Saccharomyces pastorianus
tttctctgcttggacccagaagtag

SEQ ID NO: 73944 - DNA, 25 bp, Saccharomyces pastorianus
cacaaatttggaggtctttctctgc

SEQ ID NO: 73945 - DNA, 25 bp, Saccharomyces pastorianus
tatttacccatcacaaatttggagg

SEQ ID NO: 73946 - DNA, 25 bp, Saccharomyces pastorianus
tcattattcatctcttccttgcttt

SEQ ID NO: 73947 - DNA, 25 bp, Saccharomyces pastorianus
gcgatcctttgtttcatatagcgta

SEQ ID NO: 73948 - DNA, 25 bp, Saccharomyces pastorianus
atatagcgtatatttacccatcaca

SEQ ID NO: 73949 - DNA, 25 bp, Saccharomyces pastorianus
ggtccattgcgtcattattcatctc

SEQ ID NO: 73950 - DNA, 25 bp, Saccharomyces pastorianus
ccccaccaagggaatggtccattgc

SEQ ID NO: 73951 - DNA, 25 bp, Saccharomyces pastorianus
gaacatggtttctcttttattgctc

SEQ ID NO: 73952 - DNA, 25 bp, Saccharomyces pastorianus
tgaaaggcagcacaaaatccggatg

SEQ ID NO: 73953 - DNA, 25 bp, Saccharomyces pastorianus
atgtaccctctttaggatctcgacg

SEQ ID NO: 73954 - DNA, 25 bp, Saccharomyces pastorianus
ggacgatagtgaacgcaattctgct

SEQ ID NO: 73955 - DNA, 25 bp, Saccharomyces pastorianus
gacggttgacagtccttgcaagcat

SEQ ID NO: 73956 - DNA, 25 bp, Saccharomyces pastorianus
ggatctcgacggatttatcactagc

SEQ ID NO: 73957 - DNA, 25 bp, Saccharomyces pastorianus
attccttctttttgattcggacgat

SEQ ID NO: 73958 - DNA, 25 bp, Saccharomyces pastorianus
attgcatagccagtgtcgtcatctt

SEQ ID NO: 73959 - DNA, 25 bp, Saccharomyces pastorianus
tcatcttggcatttctcgactggca

SEQ ID NO: 73960 - DNA, 25 bp, Saccharomyces pastorianus
aaatccggatgcctttctaactcat

SEQ ID NO: 73961 - DNA, 25 bp, Saccharomyces pastorianus
tggcgaatggccgaattccttcttt

SEQ ID NO: 73962 - DNA, 25 bp, Saccharomyces pastorianus
gcttcgagttgcttttgcatggagg

SEQ ID NO: 73963 - DNA, 25 bp, Saccharomyces pastorianus
ttggacgatgttactgctggcacta

SEQ ID NO: 73964 - DNA, 25 bp, Saccharomyces pastorianus
gagaaggcggccagcacatcgaatt

SEQ ID NO: 73965 - DNA, 25 bp, Saccharomyces pastorianus
agtgctagcgcggatggtgtaaaca

SEQ ID NO: 73966 - DNA, 25 bp, Saccharomyces pastorianus
tactctcaatactgtgtccgtcgta

SEQ ID NO: 73967 - DNA, 25 bp, Saccharomyces pastorianus
tgatcaggatgccacacacagcgat

SEQ ID NO: 73968 - DNA, 25 bp, Saccharomyces pastorianus
tagagtctcagcgtgtcgacgacga

SEQ ID NO: 73969 - DNA, 25 bp, Saccharomyces pastorianus
ggtatttactcacaagttctgccaa

SEQ ID NO: 73970 - DNA, 25 bp, Saccharomyces pastorianus
gtgatcaccccactgttgaacggag

SEQ ID NO: 73971 - DNA, 25 bp, Saccharomyces pastorianus
aagacacattttgaccggtacggat

SEQ ID NO: 73972 - DNA, 25 bp, Saccharomyces pastorianus
gattcccatccaagagcgaacgatt

SEQ ID NO: 73973 - DNA, 25 bp, Saccharomyces pastorianus
atgacctagatctgctccctggaga

SEQ ID NO: 73974 - DNA, 25 bp, Saccharomyces pastorianus
aaaacctctacaatcgttgctctgg

SEQ ID NO: 73975 - DNA, 25 bp, Saccharomyces pastorianus
aagagaaccttccatgggtcgagaa

SEQ ID NO: 73976 - DNA, 25 bp, Saccharomyces pastorianus
gaacgaggtgatcaccacggttcgt

SEQ ID NO: 73977 - DNA, 25 bp, Saccharomyces pastorianus
agacgccatgacgaatgccgcgcag

SEQ ID NO: 73978 - DNA, 25 bp, Saccharomyces pastorianus
ggtacaccaagaacacacggttttg

SEQ ID NO: 73979 - DNA, 25 bp, Saccharomyces pastorianus
aagacttcgcctccacaagacagat

SEQ ID NO: 73980 - DNA, 25 bp, Saccharomyces pastorianus
ctggagctaaatgcatctgacgata

SEQ ID NO: 73981 - DNA, 25 bp, Saccharomyces pastorianus
aatcgttgctctggcgcgtgaaata

SEQ ID NO: 73982 - DNA, 25 bp, Saccharomyces pastorianus
aagttgccgcaccttttgttctacg

SEQ ID NO: 73983 - DNA, 25 bp, Saccharomyces pastorianus
aactactctaacatggttctggagc

SEQ ID NO: 73984 - DNA, 25 bp, Saccharomyces pastorianus
gggatacctcaacaagacggattca

SEQ ID NO: 73985 - DNA, 25 bp, Saccharomyces pastorianus
ggccgctttcaagacggtttctaag

SEQ ID NO: 73986 - DNA, 25 bp, Saccharomyces pastorianus
atcccgtgtacctgtttgtgtgcaa

SEQ ID NO: 73987 - DNA, 25 bp, Saccharomyces pastorianus
ggtgcagtcttccatcttgaacaag

SEQ ID NO: 73988 - DNA, 25 bp, Saccharomyces pastorianus
aacccgttcacgaatgaggcgcatc

SEQ ID NO: 73989 - DNA, 25 bp, Saccharomyces pastorianus
acggtttctaagtacgggctgctgc

SEQ ID NO: 73990 - DNA, 25 bp, Saccharomyces pastorianus
cagtacttgagcagcgaccgcggaa

SEQ ID NO: 73991 - DNA, 25 bp, Saccharomyces pastorianus
ctgggagctgtacacggacttcaat

SEQ ID NO: 73992 - DNA, 25 bp, Saccharomyces pastorianus
gacaggtgtacaagcccgtgctgga

SEQ ID NO: 73993 - DNA, 25 bp, Saccharomyces pastorianus
tgagcgcagtcaagtaccagccaac

SEQ ID NO: 73994 - DNA, 25 bp, Saccharomyces pastorianus
ttgtgtgcaacaaggaccccggcgt

SEQ ID NO: 73995 - DNA, 25 bp, Saccharomyces pastorianus
aggaagttcgtgtcgcaggtcaaca

SEQ ID NO: 73996 - DNA, 25 bp, Saccharomyces pastorianus
taaggctagtatgggcttttcttcg

SEQ ID NO: 73997 - DNA, 25 bp, Saccharomyces pastorianus
atgtcctttggaatcttcagttcgt

SEQ ID NO: 73998 - DNA, 25 bp, Saccharomyces pastorianus
attctcactattttgtctaggcttt

SEQ ID NO: 73999 - DNA, 25 bp, Saccharomyces pastorianus
attctcgtcattatctaaggctagt

SEQ ID NO: 74000 - DNA, 25 bp, Saccharomyces pastorianus
ggtgtttagcatccgcggtgtcatt

SEQ ID NO: 74001 - DNA, 25 bp, Saccharomyces pastorianus
cggtgtcattctcgtcattatctaa

SEQ ID NO: 74002 - DNA, 25 bp, Saccharomyces pastorianus
gtatgggcttttcttcgtctgtttc

SEQ ID NO: 74003 - DNA, 25 bp, Saccharomyces pastorianus
cagttcgttgtttatattctcacta

SEQ ID NO: 74004 - DNA, 25 bp, Saccharomyces pastorianus
tgatagggtgtttagcatccgcggt

SEQ ID NO: 74005 - DNA, 25 bp, Saccharomyces pastorianus
ctggagcaccagtagagcctaaaga

SEQ ID NO: 74006 - DNA, 25 bp, Saccharomyces pastorianus
gtttctttaacatctcctggagcac

SEQ ID NO: 74007 - DNA, 25 bp, Saccharomyces pastorianus
tgacatcattgacacggactccgaa

SEQ ID NO: 74008 - DNA, 25 bp, Saccharomyces pastorianus
acctcgctcggtgtagaatcttcag

SEQ ID NO: 74009 - DNA, 25 bp, Saccharomyces pastorianus
gataacggtgcttccggaattattg

SEQ ID NO: 74010 - DNA, 25 bp, Saccharomyces pastorianus
gaatacgattccaccttagataacg

SEQ ID NO: 74011 - DNA, 25 bp, Saccharomyces pastorianus
aaaatccattcagcgaccctataac

SEQ ID NO: 74012 - DNA, 25 bp, Saccharomyces pastorianus
gatctttccgatgaagaccaccttg

SEQ ID NO: 74013 - DNA, 25 bp, Saccharomyces pastorianus
gaagggtctatatctgcatcctcta

SEQ ID NO: 74014 - DNA, 25 bp, Saccharomyces pastorianus
accttgcaagcttgtcttcatctga

SEQ ID NO: 74015 - DNA, 25 bp, Saccharomyces pastorianus
agccgctgctactagtataactgcc

SEQ ID NO: 74016 - DNA, 25 bp, Saccharomyces pastorianus
aagccatgcattactttttgaccat

SEQ ID NO: 74017 - DNA, 25 bp, Saccharomyces pastorianus
gagcctgctaccacagaagggtcta

SEQ ID NO: 74018 - DNA, 25 bp, Saccharomyces pastorianus
attcctgaacatatgcacaaccttg

SEQ ID NO: 74019 - DNA, 25 bp, Saccharomyces pastorianus
gtttttaggtagttcatcagtatca

SEQ ID NO: 74020 - DNA, 25 bp, Saccharomyces pastorianus
gatattacattacctgcccttgtca

SEQ ID NO: 74021 - DNA, 25 bp, Saccharomyces pastorianus
tcaggcctccatctcgaatagcatt

SEQ ID NO: 74022 - DNA, 25 bp, Saccharomyces pastorianus
atagtgtttctattcaggcctccat

SEQ ID NO: 74023 - DNA, 25 bp, Saccharomyces pastorianus
atctcttcagctttccgtcatttat

SEQ ID NO: 74024 - DNA, 25 bp, Saccharomyces pastorianus
ttacgtcgtcatacagtagtttgct

SEQ ID NO: 74025 - DNA, 25 bp, Saccharomyces pastorianus
aattggtcgcaggttacgtcgtcat

SEQ ID NO: 74026 - DNA, 25 bp, Saccharomyces pastorianus
atttctgacgtactcaattggtcgc

SEQ ID NO: 74027 - DNA, 25 bp, Saccharomyces pastorianus
tggccatcttttggtctgtatgctg

SEQ ID NO: 74028 - DNA, 25 bp, Saccharomyces pastorianus
acaattgtcttgtcacccgatatta

SEQ ID NO: 74029 - DNA, 25 bp, Saccharomyces pastorianus
gattcatccatttatcgacccattg

SEQ ID NO: 74030 - DNA, 25 bp, Saccharomyces pastorianus
atgctaggcccatcctgtatttaaa

SEQ ID NO: 74031 - DNA, 25 bp, Saccharomyces pastorianus
gagatcttttttccagacgttccaa

SEQ ID NO: 74032 - DNA, 25 bp, Saccharomyces pastorianus
gatgtgcctaaagtacccggtaata

SEQ ID NO: 74033 - DNA, 25 bp, Saccharomyces pastorianus
tatcgacccattgacccgtgaaaaa

SEQ ID NO: 74034 - DNA, 25 bp, Saccharomyces pastorianus
gacaaatatcccttggttggcatgg

SEQ ID NO: 74035 - DNA, 25 bp, Saccharomyces pastorianus
agtgcagcacttggtctttatgttg

SEQ ID NO: 74036 - DNA, 25 bp, Saccharomyces pastorianus
acgttccaagcctcgcggtattgta

SEQ ID NO: 74037 - DNA, 25 bp, Saccharomyces pastorianus
tggccaggattctctagctttgcta

SEQ ID NO: 74038 - DNA, 25 bp, Saccharomyces pastorianus
aaggctcgggaaggcgcttttgaca

SEQ ID NO: 74039 - DNA, 25 bp, Saccharomyces pastorianus
agtcatcgatttcatgccagctggc

SEQ ID NO: 74040 - DNA, 25 bp, Saccharomyces pastorianus
gaagacttcccaaatttcggttatg

SEQ ID NO: 74041 - DNA, 25 bp, Saccharomyces pastorianus
ctgcaactaaggctaacagcggtaa

SEQ ID NO: 74042 - DNA, 25 bp, Saccharomyces pastorianus
tcatgagtagatccaacaacgaatc

SEQ ID NO: 74043 - DNA, 25 bp, Saccharomyces pastorianus
gattctgtcagcaacctcatcaaag

SEQ ID NO: 74044 - DNA, 25 bp, Saccharomyces pastorianus
attgctccaatactatttgggcgac

SEQ ID NO: 74045 - DNA, 25 bp, Saccharomyces pastorianus
gagatgccacaacagaaatgacaga

SEQ ID NO: 74046 - DNA, 25 bp, Saccharomyces pastorianus
accgcgttttgtctaggagattcat

SEQ ID NO: 74047 - DNA, 25 bp, Saccharomyces pastorianus
aaggtaaccatatactgcaactaag

SEQ ID NO: 74048 - DNA, 25 bp, Saccharomyces pastorianus
aatctgtatgcaccaattttcaaac

SEQ ID NO: 74049 - DNA, 25 bp, Saccharomyces pastorianus
ttgcactgagcatgaccgcgttttg

SEQ ID NO: 74050 - DNA, 25 bp, Saccharomyces pastorianus
tcggttatggattgaattcggattc

SEQ ID NO: 74051 - DNA, 25 bp, Saccharomyces pastorianus
gctcttcttcttactgatcacgttg

SEQ ID NO: 74052 - DNA, 25 bp, Saccharomyces pastorianus
atcacgttggtgtctgttattgtca

SEQ ID NO: 74053 - DNA, 25 bp, Saccharomyces pastorianus
ttcccgtaacggcagatttttcaga

SEQ ID NO: 74054 - DNA, 25 bp, Saccharomyces pastorianus
gacaattttggtagttccaccctca

SEQ ID NO: 74055 - DNA, 25 bp, Saccharomyces pastorianus
gcctgtacactggttgttacgccaa

SEQ ID NO: 74056 - DNA, 25 bp, Saccharomyces pastorianus
agctggatcactctgttcttcatga

SEQ ID NO: 74057 - DNA, 25 bp, Saccharomyces pastorianus
aaacgaagtggtctctactcctgtc

SEQ ID NO: 74058 - DNA, 25 bp, Saccharomyces pastorianus
gcagtttcgcttccactaagatgac

SEQ ID NO: 74059 - DNA, 25 bp, Saccharomyces pastorianus
tgggcaatgcttttgatcgcgctct

SEQ ID NO: 74060 - DNA, 25 bp, Saccharomyces pastorianus
taaaggcatttcaccaccaggatcg

SEQ ID NO: 74061 - DNA, 25 bp, Saccharomyces pastorianus
agtcatggcggctacgtacaggaaa

SEQ ID NO: 74062 - DNA, 25 bp, Saccharomyces pastorianus
gtttctgactcaggtgtatcgtcgg

SEQ ID NO: 74063 - DNA, 25 bp, Saccharomyces pastorianus
aatgaggaccatatcctgctaggaa

SEQ ID NO: 74064 - DNA, 25 bp, Saccharomyces pastorianus
gattccccgattagtaaggctttat

SEQ ID NO: 74065 - DNA, 25 bp, Saccharomyces pastorianus
atgaacgttctttggcattactaag

SEQ ID NO: 74066 - DNA, 25 bp, Saccharomyces pastorianus
gcgaacccaaccaacttgcagaaaa

SEQ ID NO: 74067 - DNA, 25 bp, Saccharomyces pastorianus
gataatgcaagtaccttacctaatg

SEQ ID NO: 74068 - DNA, 25 bp, Saccharomyces pastorianus
gaaaaaagctttaccgtcagacagt

SEQ ID NO: 74069 - DNA, 25 bp, Saccharomyces pastorianus
atcaagctgtgacttgcgaacccaa

SEQ ID NO: 74070 - DNA, 25 bp, Saccharomyces pastorianus
tattggaccaatactcaaccaccac

SEQ ID NO: 74071 - DNA, 25 bp, Saccharomyces pastorianus
gtaatttcgtcttcgattccccgat

SEQ ID NO: 74072 - DNA, 25 bp, Saccharomyces pastorianus
tgtaatcaaggcaccgttccaattc

SEQ ID NO: 74073 - DNA, 25 bp, Saccharomyces pastorianus
gccgataaagaagctcgcggtttga

SEQ ID NO: 74074 - DNA, 25 bp, Saccharomyces pastorianus
gaatcgaccttggttcaaactcctg

SEQ ID NO: 74075 - DNA, 25 bp, Saccharomyces pastorianus
gaaagaagcatgttggaccatctct

SEQ ID NO: 74076 - DNA, 25 bp, Saccharomyces pastorianus
gaattactaagccacgaatcgacct

SEQ ID NO: 74077 - DNA, 25 bp, Saccharomyces pastorianus
ttgggccatatcttacctatccgat

SEQ ID NO: 74078 - DNA, 25 bp, Saccharomyces pastorianus
gtttgcaaagaccagacatcatcag

SEQ ID NO: 74079 - DNA, 25 bp, Saccharomyces pastorianus
tgattcgaacttaatccctccattg

SEQ ID NO: 74080 - DNA, 25 bp, Saccharomyces pastorianus
tttggttgacgcttgttgggccata

SEQ ID NO: 74081 - DNA, 25 bp, Saccharomyces pastorianus
ggaccatctctaatattacggcagg

SEQ ID NO: 74082 - DNA, 25 bp, Saccharomyces pastorianus
atccctccattggtcaaactgttgg

SEQ ID NO: 74083 - DNA, 25 bp, Saccharomyces pastorianus
ggtaacaccgaacaaatccaagcag

SEQ ID NO: 74084 - DNA, 25 bp, Saccharomyces pastorianus
gttttacactttcaagagcaagggc

SEQ ID NO: 74085 - DNA, 25 bp, Saccharomyces pastorianus
atcgacgccaacaaagtcatatatg

SEQ ID NO: 74086 - DNA, 25 bp, Saccharomyces pastorianus
ggccgatcacggaaatgtaactttg

SEQ ID NO: 74087 - DNA, 25 bp, Saccharomyces pastorianus
gagtggtgtgtctaatcgttaccaa

SEQ ID NO: 74088 - DNA, 25 bp, Saccharomyces pastorianus
ttcgctaccccatatcactgatata

SEQ ID NO: 74089 - DNA, 25 bp, Saccharomyces pastorianus
ccccattaatatcttcgaggatgaa

SEQ ID NO: 74090 - DNA, 25 bp, Saccharomyces pastorianus
atcgttaccaagacaattcgttcaa

SEQ ID NO: 74091 - DNA, 25 bp, Saccharomyces pastorianus
tgtcttcgaatagcacttcgctacc

SEQ ID NO: 74092 - DNA, 25 bp, Saccharomyces pastorianus
gggcagctgacttcgtttcagaaat

SEQ ID NO: 74093 - DNA, 25 bp, Saccharomyces pastorianus
gagcaagggcagctgacttcgtttc

SEQ ID NO: 74094 - DNA, 25 bp, Saccharomyces pastorianus
agatttgttgaaggacgatacggtc

SEQ ID NO: 74095 - DNA, 25 bp, Saccharomyces pastorianus
tatcagccgcatgattgacctggca

SEQ ID NO: 74096 - DNA, 25 bp, Saccharomyces pastorianus
tggtcttcagcaattatcttcgcct

SEQ ID NO: 74097 - DNA, 25 bp, Saccharomyces pastorianus
gaaacgcagcatattatcagccgca

SEQ ID NO: 74098 - DNA, 25 bp, Saccharomyces pastorianus
tgacgagtcgcactctccagaaaaa

SEQ ID NO: 74099 - DNA, 25 bp, Saccharomyces pastorianus
tgatccaccttcttatgacgagtcg

SEQ ID NO: 74100 - DNA, 25 bp, Saccharomyces pastorianus
tcagggcgtgattgtgactccttga

SEQ ID NO: 74101 - DNA, 25 bp, Saccharomyces pastorianus
agatggcctagcgttcaaagtggtt

SEQ ID NO: 74102 - DNA, 25 bp, Saccharomyces pastorianus
gaggacccttggattcgtagcatta

SEQ ID NO: 74103 - DNA, 25 bp, Saccharomyces pastorianus
tgacctggcacctgcatgtagagga

SEQ ID NO: 74104 - DNA, 25 bp, Saccharomyces pastorianus
gactccttgagtagcttggtaacga

SEQ ID NO: 74105 - DNA, 25 bp, Saccharomyces pastorianus
ggaccacaacgactattgcattcat

SEQ ID NO: 74106 - DNA, 25 bp, Saccharomyces pastorianus
gcttattgcaggcagctggacttcc

SEQ ID NO: 74107 - DNA, 25 bp, Saccharomyces pastorianus
agagagacatcaacactgctaaagt

SEQ ID NO: 74108 - DNA, 25 bp, Saccharomyces pastorianus
gagcctgttaccagaaagagcacat

SEQ ID NO: 74109 - DNA, 25 bp, Saccharomyces pastorianus
cttccactgttcattttgcaacgac

SEQ ID NO: 74110 - DNA, 25 bp, Saccharomyces pastorianus
aaatcattcaactagcgaacctcaa

SEQ ID NO: 74111 - DNA, 25 bp, Saccharomyces pastorianus
atccaaaaagacgttcggctcctct

SEQ ID NO: 74112 - DNA, 25 bp, Saccharomyces pastorianus
ggcgtatatcaagagcctgttacca

SEQ ID NO: 74113 - DNA, 25 bp, Saccharomyces pastorianus
ggtgatacgaagattccgtcacaaa

SEQ ID NO: 74114 - DNA, 25 bp, Saccharomyces pastorianus
gttgctggaacaagaagcgtcttct

SEQ ID NO: 74115 - DNA, 25 bp, Saccharomyces pastorianus
gagcaactatgagccagagtggtat

SEQ ID NO: 74116 - DNA, 25 bp, Saccharomyces pastorianus
ttgcaacgacgatttctgctccaag

SEQ ID NO: 74117 - DNA, 25 bp, Saccharomyces pastorianus
tcctcaaggccccaagggaggtaat

SEQ ID NO: 74118 - DNA, 25 bp, Saccharomyces pastorianus
atcctacaagcgtgaaatgccttca

SEQ ID NO: 74119 - DNA, 25 bp, Saccharomyces pastorianus
acagtagtagcaatcgtagacccaa

SEQ ID NO: 74120 - DNA, 25 bp, Saccharomyces pastorianus
aacaaacgccatcctacaagcgtga

SEQ ID NO: 74121 - DNA, 25 bp, Saccharomyces pastorianus
gcaatacacaggctcttcctcaagg

SEQ ID NO: 74122 - DNA, 25 bp, Saccharomyces pastorianus
gatagcggtagcaacttcagtgcaa

SEQ ID NO: 74123 - DNA, 25 bp, Saccharomyces pastorianus
gcgtgaaatgccttcagagaatgat

SEQ ID NO: 74124 - DNA, 25 bp, Saccharomyces pastorianus
gtagacccaatgaaacccaaagata

SEQ ID NO: 74125 - DNA, 25 bp, Saccharomyces pastorianus
gaagcaaatttcagagacaagacta

SEQ ID NO: 74126 - DNA, 25 bp, Saccharomyces pastorianus
gcaacttcagtgcaaataacagtag

SEQ ID NO: 74127 - DNA, 25 bp, Saccharomyces pastorianus
aagaacacatcctaccaacaaacgc

SEQ ID NO: 74128 - DNA, 25 bp, Saccharomyces pastorianus
tgaggtatcgaataaccgcagaact

SEQ ID NO: 74129 - DNA, 25 bp, Saccharomyces pastorianus
agagcgttgcccagtgtgtggtctt

SEQ ID NO: 74130 - DNA, 25 bp, Saccharomyces pastorianus
aactctacgtctgggttcttcatta

SEQ ID NO: 74131 - DNA, 25 bp, Saccharomyces pastorianus
aacgcagagcgttgcccagtgtgtg

SEQ ID NO: 74132 - DNA, 25 bp, Saccharomyces pastorianus
aaccgcagaactctacgtctgggtt

SEQ ID NO: 74133 - DNA, 25 bp, Saccharomyces pastorianus
cccagtgtgtggtcttcttcaacaa

SEQ ID NO: 74134 - DNA, 25 bp, Saccharomyces pastorianus
ttcattatgatgtaacgcagagcgt

SEQ ID NO: 74135 - DNA, 25 bp, Saccharomyces pastorianus
gtgtggtcttcttcaacaatctgga

SEQ ID NO: 74136 - DNA, 25 bp, Saccharomyces pastorianus
cgaataaccgcagaactctacgtct

SEQ ID NO: 74137 - DNA, 25 bp, Saccharomyces pastorianus
tggtcttcttcaacaatctggaaag

SEQ ID NO: 74138 - DNA, 25 bp, Saccharomyces pastorianus
acgtctgggttcttcattatgatgt

SEQ ID NO: 74139 - DNA, 25 bp, Saccharomyces pastorianus
ggtctaaatactaatccatacgatt

SEQ ID NO: 74140 - DNA, 25 bp, Saccharomyces pastorianus
actatcgctatacttctaccttgtt

SEQ ID NO: 74141 - DNA, 25 bp, Saccharomyces pastorianus
gctatacttctaccttgttgtttgg

SEQ ID NO: 74142 - DNA, 25 bp, Saccharomyces pastorianus
atactaatccatacgattctgaaac

SEQ ID NO: 74143 - DNA, 25 bp, Saccharomyces pastorianus
atcgctatacttctaccttgttgtt

SEQ ID NO: 74144 - DNA, 25 bp, Saccharomyces pastorianus
gattctgaaactatcgctatacttc

SEQ ID NO: 74145 - DNA, 25 bp, Saccharomyces pastorianus
accttgttgtttggatatgagtatt

SEQ ID NO: 74146 - DNA, 25 bp, Saccharomyces pastorianus
aaactatcgctatacttctaccttg

SEQ ID NO: 74147 - DNA, 25 bp, Saccharomyces pastorianus
gagtattttcattgttacacgtttt

SEQ ID NO: 74148 - DNA, 25 bp, Saccharomyces pastorianus
tcaccaattggtctaaatactaatc

SEQ ID NO: 74149 - DNA, 25 bp, Saccharomyces pastorianus
acttctaccttgttgtttggatatg

SEQ ID NO: 74150 - DNA, 25 bp, Saccharomyces pastorianus
tcctggaaatcccatttggaattgt

SEQ ID NO: 74151 - DNA, 25 bp, Saccharomyces pastorianus
gatttcccggtaatagtcgctataa

SEQ ID NO: 74152 - DNA, 25 bp, Saccharomyces pastorianus
agaccttcaagttcaataagaccaa

SEQ ID NO: 74153 - DNA, 25 bp, Saccharomyces pastorianus
ttcccggtaatagtcgctataaata

SEQ ID NO: 74154 - DNA, 25 bp, Saccharomyces pastorianus
tcttattaggaatcggttgggccgt

SEQ ID NO: 74155 - DNA, 25 bp, Saccharomyces pastorianus
agcatatattttgttgacggtctta

SEQ ID NO: 74156 - DNA, 25 bp, Saccharomyces pastorianus
gtcgctataaatataagaccttcaa

SEQ ID NO: 74157 - DNA, 25 bp, Saccharomyces pastorianus
ctggaaatcccatttggaattgttt

SEQ ID NO: 74158 - DNA, 25 bp, Saccharomyces pastorianus
caataagaccaatgaacccgaatat

SEQ ID NO: 74159 - DNA, 25 bp, Saccharomyces pastorianus
gttgacggtcttattaggaatcggt

SEQ ID NO: 74160 - DNA, 25 bp, Saccharomyces pastorianus
ttagatttcccggtaatagtcgcta

SEQ ID NO: 74161 - DNA, 25 bp, Saccharomyces pastorianus
tggtggattccacgtcgaactcgaa

SEQ ID NO: 74162 - DNA, 25 bp, Saccharomyces pastorianus
tgtatacagaccagcgcgaggcttc

SEQ ID NO: 74163 - DNA, 25 bp, Saccharomyces pastorianus
gcagggtacccctggtgcaaatatc

SEQ ID NO: 74164 - DNA, 25 bp, Saccharomyces pastorianus
cgacgttatggaccagttctctcaa

SEQ ID NO: 74165 - DNA, 25 bp, Saccharomyces pastorianus
ggcaggtggacaacaccgacgttat

SEQ ID NO: 74166 - DNA, 25 bp, Saccharomyces pastorianus
aactcgaactcggacagcagggtac

SEQ ID NO: 74167 - DNA, 25 bp, Saccharomyces pastorianus
aacaaggaacgggtcgcatcctctc

SEQ ID NO: 74168 - DNA, 25 bp, Saccharomyces pastorianus
gttcaccaccaagggctacatacat

SEQ ID NO: 74169 - DNA, 25 bp, Saccharomyces pastorianus
tgactctcacataacgcacgatagc

SEQ ID NO: 74170 - DNA, 25 bp, Saccharomyces pastorianus
ggcagtaagcgggttcaccaccaag

SEQ ID NO: 74171 - DNA, 25 bp, Saccharomyces pastorianus
tacatacatgcgttggtggattcca

SEQ ID NO: 74172 - DNA, 25 bp, Saccharomyces pastorianus
accgggtgatgttgtcattaccata

SEQ ID NO: 74173 - DNA, 25 bp, Saccharomyces pastorianus
gaaaccacggatgctgactgctatt

SEQ ID NO: 74174 - DNA, 25 bp, Saccharomyces pastorianus
gtacaagtcacaaccagctcatagt

SEQ ID NO: 74175 - DNA, 25 bp, Saccharomyces pastorianus
ggatcctaaattccaagtcactgat

SEQ ID NO: 74176 - DNA, 25 bp, Saccharomyces pastorianus
gactggagcctgaaaatgccttgaa

SEQ ID NO: 74177 - DNA, 25 bp, Saccharomyces pastorianus
agtcactgttcagccaggtacaagt

SEQ ID NO: 74178 - DNA, 25 bp, Saccharomyces pastorianus
atcaagctcgatatcatacctggtg

SEQ ID NO: 74179 - DNA, 25 bp, Saccharomyces pastorianus
gcccaattgcttcaagactgtcgaa

SEQ ID NO: 74180 - DNA, 25 bp, Saccharomyces pastorianus
ggtgaagtacttaagcccaattgct

SEQ ID NO: 74181 - DNA, 25 bp, Saccharomyces pastorianus
ggattcggtcatctgtacgtcaaat

SEQ ID NO: 74182 - DNA, 25 bp, Saccharomyces pastorianus
aatgccagggccttggtttcatcaa

SEQ ID NO: 74183 - DNA, 25 bp, Saccharomyces pastorianus
tgttacatcttctaccgaggccaaa

SEQ ID NO: 74184 - DNA, 25 bp, Saccharomyces pastorianus
aaggaaggctcttactgctcttacg

SEQ ID NO: 74185 - DNA, 25 bp, Saccharomyces pastorianus
gctaacttctcaggtcccaatgaaa

SEQ ID NO: 74186 - DNA, 25 bp, Saccharomyces pastorianus
ttggttccagaatcttccgctgtta

SEQ ID NO: 74187 - DNA, 25 bp, Saccharomyces pastorianus
gggacttcttctgcggtttcttcaa

SEQ ID NO: 74188 - DNA, 25 bp, Saccharomyces pastorianus
gatcaatgggtggtctgctatgtaa

SEQ ID NO: 74189 - DNA, 25 bp, Saccharomyces pastorianus
tcgactacttcttcaagcggaacca

SEQ ID NO: 74190 - DNA, 25 bp, Saccharomyces pastorianus
agacggtactattgcctgtagccaa

SEQ ID NO: 74191 - DNA, 25 bp, Saccharomyces pastorianus
gtcatcgtcgattccaatggccaaa

SEQ ID NO: 74192 - DNA, 25 bp, Saccharomyces pastorianus
tacgcttgtcaaccgggcatgtcta

SEQ ID NO: 74193 - DNA, 25 bp, Saccharomyces pastorianus
gacacttctactggtggctcatgta

SEQ ID NO: 74194 - DNA, 25 bp, Saccharomyces pastorianus
caatcctccctatattcgaaagcgt

SEQ ID NO: 74195 - DNA, 25 bp, Saccharomyces pastorianus
tattaacttcaacccctagcaatgt

SEQ ID NO: 74196 - DNA, 25 bp, Saccharomyces pastorianus
aaattctaccttcacagccattgat

SEQ ID NO: 74197 - DNA, 25 bp, Saccharomyces pastorianus
gccaaagttggtccatcggcttgaa

SEQ ID NO: 74198 - DNA, 25 bp, Saccharomyces pastorianus
gttcgaaccgaaactagcactagtg

SEQ ID NO: 74199 - DNA, 25 bp, Saccharomyces pastorianus
gagactcctttgcatatttgtgata

SEQ ID NO: 74200 - DNA, 25 bp, Saccharomyces pastorianus
aaacaattcaacactcttcaaccat

SEQ ID NO: 74201 - DNA, 25 bp, Saccharomyces pastorianus
gcaatgttcctccacttcatataga

SEQ ID NO: 74202 - DNA, 25 bp, Saccharomyces pastorianus
acctctgtaaggctgttcgaaccga

SEQ ID NO: 74203 - DNA, 25 bp, Saccharomyces pastorianus
tagacatacttactggcaatcctcc

SEQ ID NO: 74204 - DNA, 25 bp, Saccharomyces pastorianus
aaaccgattccttcttttatgagat

SEQ ID NO: 74205 - DNA, 25 bp, Saccharomyces pastorianus
aatgaagattctactgccgttgaga

SEQ ID NO: 74206 - DNA, 25 bp, Saccharomyces pastorianus
gaaccgttgacgactatagacttta

SEQ ID NO: 74207 - DNA, 25 bp, Saccharomyces pastorianus
tgcggttgccgtccaaaaactacaa

SEQ ID NO: 74208 - DNA, 25 bp, Saccharomyces pastorianus
aacacgtcattgtgcggttgccgtc

SEQ ID NO: 74209 - DNA, 25 bp, Saccharomyces pastorianus
gaaccgccattgtctactaaggaaa

SEQ ID NO: 74210 - DNA, 25 bp, Saccharomyces pastorianus
atcagtctctgttgaattatctaac

SEQ ID NO: 74211 - DNA, 25 bp, Saccharomyces pastorianus
ggaactgaagcccaatacttctata

SEQ ID NO: 74212 - DNA, 25 bp, Saccharomyces pastorianus
gatagtcatagtgaaccgccattgt

SEQ ID NO: 74213 - DNA, 25 bp, Saccharomyces pastorianus
tttggtgccttcgaagtaaacgaca

SEQ ID NO: 74214 - DNA, 25 bp, Saccharomyces pastorianus
aaaagcttccataacaagaccgtat

SEQ ID NO: 74215 - DNA, 25 bp, Saccharomyces pastorianus
cagtagtgccaccaatcagaatttg

SEQ ID NO: 74216 - DNA, 25 bp, Saccharomyces pastorianus
gatagaatcttattggatgccccat

SEQ ID NO: 74217 - DNA, 25 bp, Saccharomyces pastorianus
acactggttgtgtttttgctaatga

SEQ ID NO: 74218 - DNA, 25 bp, Saccharomyces pastorianus
ggtaagaagttccatcctagtgtaa

SEQ ID NO: 74219 - DNA, 25 bp, Saccharomyces pastorianus
gatgctcgtgagttcccaaaagtta

SEQ ID NO: 74220 - DNA, 25 bp, Saccharomyces pastorianus
taagaccacctacatatctgccatg

SEQ ID NO: 74221 - DNA, 25 bp, Saccharomyces pastorianus
cgatgggttctttgttgccaaattc

SEQ ID NO: 74222 - DNA, 25 bp, Saccharomyces pastorianus
gttgactgcaactccaaacacggtg

SEQ ID NO: 74223 - DNA, 25 bp, Saccharomyces pastorianus
gtcgaaactggtttggccatcggta

SEQ ID NO: 74224 - DNA, 25 bp, Saccharomyces pastorianus
gatcaatctgttaaggtttcccgta

SEQ ID NO: 74225 - DNA, 25 bp, Saccharomyces pastorianus
gtattttggatatggctgctgcacc

SEQ ID NO: 74226 - DNA, 25 bp, Saccharomyces pastorianus
ttttatccgctattgactccgttga

SEQ ID NO: 74227 - DNA, 25 bp, Saccharomyces pastorianus
gacgacgatgtcttcgaactggaaa

SEQ ID NO: 74228 - DNA, 25 bp, Saccharomyces pastorianus
agtttgggaatgtctcttccgacaa

SEQ ID NO: 74229 - DNA, 25 bp, Saccharomyces pastorianus
aaagcgcggtgttcaatgacggcaa

SEQ ID NO: 74230 - DNA, 25 bp, Saccharomyces pastorianus
cagaggctgacacggtagttgaact

SEQ ID NO: 74231 - DNA, 25 bp, Saccharomyces pastorianus
ggcggtgttatcgtcggagcaatta

SEQ ID NO: 74232 - DNA, 25 bp, Saccharomyces pastorianus
gaaatttttcctgaccatctttgcc

SEQ ID NO: 74233 - DNA, 25 bp, Saccharomyces pastorianus
ggaaaatcttgctgtagtacaatct

SEQ ID NO: 74234 - DNA, 25 bp, Saccharomyces pastorianus
tccccaaagtagaaggcggtgttat

SEQ ID NO: 74235 - DNA, 25 bp, Saccharomyces pastorianus
atctttgccgatgttctttttgaaa

SEQ ID NO: 74236 - DNA, 25 bp, Saccharomyces pastorianus
cgtgtgggacgctatttctgatgca

SEQ ID NO: 74237 - DNA, 25 bp, Saccharomyces pastorianus
gttgaactagccgtagtgctggtta

SEQ ID NO: 74238 - DNA, 25 bp, Saccharomyces pastorianus
acagtttcgattggcttttccgtca

SEQ ID NO: 74239 - DNA, 25 bp, Saccharomyces pastorianus
agtttcgattggcttttccgtcagg

SEQ ID NO: 74240 - DNA, 25 bp, Saccharomyces pastorianus
ttcttcgtcaaagacagtttcgatt

SEQ ID NO: 74241 - DNA, 25 bp, Saccharomyces pastorianus
acaaagtggagattggcgaagccaa

SEQ ID NO: 74242 - DNA, 25 bp, Saccharomyces pastorianus
aatgctttacggacttttcaaacag

SEQ ID NO: 74243 - DNA, 25 bp, Saccharomyces pastorianus
ttttcaatgctttacggacttttca

SEQ ID NO: 74244 - DNA, 25 bp, Saccharomyces pastorianus
tgctttacggacttttcaaacagtt

SEQ ID NO: 74245 - DNA, 25 bp, Saccharomyces pastorianus
tttccgtcagggaagcatgtccgaa

SEQ ID NO: 74246 - DNA, 25 bp, Saccharomyces pastorianus
ggaagcatgtccgaaaacactgacg

SEQ ID NO: 74247 - DNA, 25 bp, Saccharomyces pastorianus
tccgtcagggaagcatgtccgaaaa

SEQ ID NO: 74248 - DNA, 25 bp, Saccharomyces pastorianus
ttcgattggcttttccgtcagggaa

SEQ ID NO: 74249 - DNA, 25 bp, Saccharomyces pastorianus
tgtcctctttcaaaataacgtgttc

SEQ ID NO: 74250 - DNA, 25 bp, Saccharomyces pastorianus
taaactctctagaacaaacttcttt

SEQ ID NO: 74251 - DNA, 25 bp, Saccharomyces pastorianus
ttaccaactcagacaattcttcgtt

SEQ ID NO: 74252 - DNA, 25 bp, Saccharomyces pastorianus
tctttaataaatggtgttccaccat

SEQ ID NO: 74253 - DNA, 25 bp, Saccharomyces pastorianus
tatccataaactctctagaacaaac

SEQ ID NO: 74254 - DNA, 25 bp, Saccharomyces pastorianus
caaaataacgtgttccatggtatcc

SEQ ID NO: 74255 - DNA, 25 bp, Saccharomyces pastorianus
aaatggtgttccaccattcttaaca

SEQ ID NO: 74256 - DNA, 25 bp, Saccharomyces pastorianus
gtttttaccaactcagacaattctt

SEQ ID NO: 74257 - DNA, 25 bp, Saccharomyces pastorianus
aattcttcgttattgtcctctttca

SEQ ID NO: 74258 - DNA, 25 bp, Saccharomyces pastorianus
tcttcgttattgtcctctttcaaaa

SEQ ID NO: 74259 - DNA, 25 bp, Saccharomyces pastorianus
atggtttttaccaactcagacaatt

SEQ ID NO: 74260 - DNA, 25 bp, Saccharomyces pastorianus
ggaagatcgaggtcaccattcggaa

SEQ ID NO: 74261 - DNA, 25 bp, Saccharomyces pastorianus
gcaacgcatcgaatccttagggctg

SEQ ID NO: 74262 - DNA, 25 bp, Saccharomyces pastorianus
accattcggaatgctttcgctagtg

SEQ ID NO: 74263 - DNA, 25 bp, Saccharomyces pastorianus
gctttttctattaacgtgtccaact

SEQ ID NO: 74264 - DNA, 25 bp, Saccharomyces pastorianus
gtgtccaactcacctggcgtactga

SEQ ID NO: 74265 - DNA, 25 bp, Saccharomyces pastorianus
ctgacccttctagaccttaagacat

SEQ ID NO: 74266 - DNA, 25 bp, Saccharomyces pastorianus
cagaaatctctaatgctatgggaag

SEQ ID NO: 74267 - DNA, 25 bp, Saccharomyces pastorianus
ttctactgactatccatcaatttgg

SEQ ID NO: 74268 - DNA, 25 bp, Saccharomyces pastorianus
aatccttagggctgacccttctaga

SEQ ID NO: 74269 - DNA, 25 bp, Saccharomyces pastorianus
aatgctttcgctagtggctttttct

SEQ ID NO: 74270 - DNA, 25 bp, Saccharomyces pastorianus
ggcgtactgacggacattctgtttt

SEQ ID NO: 74271 - DNA, 25 bp, Saccharomyces pastorianus
aattcatgaagaacgacgacgacga

SEQ ID NO: 74272 - DNA, 25 bp, Saccharomyces pastorianus
catctcatagtctccaatgttgggt

SEQ ID NO: 74273 - DNA, 25 bp, Saccharomyces pastorianus
aacttttggcagcaataccgacgaa

SEQ ID NO: 74274 - DNA, 25 bp, Saccharomyces pastorianus
ggatctcaatagttgcaatgacgat

SEQ ID NO: 74275 - DNA, 25 bp, Saccharomyces pastorianus
gataactcagagtgggatctcaata

SEQ ID NO: 74276 - DNA, 25 bp, Saccharomyces pastorianus
cgggcaagctatcaagcagagtcat

SEQ ID NO: 74277 - DNA, 25 bp, Saccharomyces pastorianus
aatacaccatcaaacgccaattcag

SEQ ID NO: 74278 - DNA, 25 bp, Saccharomyces pastorianus
tcagacacagaatccacagaacaga

SEQ ID NO: 74279 - DNA, 25 bp, Saccharomyces pastorianus
aagaagcgacctcatctcatagtct

SEQ ID NO: 74280 - DNA, 25 bp, Saccharomyces pastorianus
gaaacagtttggtcgagataactca

SEQ ID NO: 74281 - DNA, 25 bp, Saccharomyces pastorianus
taccgacgaagccaatcccaagaag

SEQ ID NO: 74282 - DNA, 25 bp, Saccharomyces pastorianus
gatgttgcaagtgaactctgagttc

SEQ ID NO: 74283 - DNA, 25 bp, Saccharomyces pastorianus
gtgtatgtcactacttatctcccat

SEQ ID NO: 74284 - DNA, 25 bp, Saccharomyces pastorianus
gtgcccgctccatggaagttgagaa

SEQ ID NO: 74285 - DNA, 25 bp, Saccharomyces pastorianus
tcctccatctccaacgtatctatga

SEQ ID NO: 74286 - DNA, 25 bp, Saccharomyces pastorianus
aagtatcttgtttccttggcatcct

SEQ ID NO: 74287 - DNA, 25 bp, Saccharomyces pastorianus
gatgactgtcaattttcttctttaa

SEQ ID NO: 74288 - DNA, 25 bp, Saccharomyces pastorianus
tatggtgtcgaggttcatcgtgata

SEQ ID NO: 74289 - DNA, 25 bp, Saccharomyces pastorianus
atgttctagcgcttgatgactgtca

SEQ ID NO: 74290 - DNA, 25 bp, Saccharomyces pastorianus
ctgagttccgtgtacagagtatcat

SEQ ID NO: 74291 - DNA, 25 bp, Saccharomyces pastorianus
tttcgatataataggtgcccgctcc

SEQ ID NO: 74292 - DNA, 25 bp, Saccharomyces pastorianus
gttttttctgcggttgatttggaca

SEQ ID NO: 74293 - DNA, 25 bp, Saccharomyces pastorianus
gaaccaccctatacctggagagcta

SEQ ID NO: 74294 - DNA, 25 bp, Saccharomyces pastorianus
agtttagcggtctccatcatatcta

SEQ ID NO: 74295 - DNA, 25 bp, Saccharomyces pastorianus
ggtctggacctaatacttacatgcc

SEQ ID NO: 74296 - DNA, 25 bp, Saccharomyces pastorianus
gattttggtcctatgtcatgctcaa

SEQ ID NO: 74297 - DNA, 25 bp, Saccharomyces pastorianus
ggagtggacccaatccttagattaa

SEQ ID NO: 74298 - DNA, 25 bp, Saccharomyces pastorianus
aacgtggttccaatactaggtctat

SEQ ID NO: 74299 - DNA, 25 bp, Saccharomyces pastorianus
aattccagctcggtttcttgtagaa

SEQ ID NO: 74300 - DNA, 25 bp, Saccharomyces pastorianus
atcattttgtctatcctgtggttct

SEQ ID NO: 74301 - DNA, 25 bp, Saccharomyces pastorianus
atatgtctcctatctcgcagttgta

SEQ ID NO: 74302 - DNA, 25 bp, Saccharomyces pastorianus
ctgctttcgtaactttggcttctga

SEQ ID NO: 74303 - DNA, 25 bp, Saccharomyces pastorianus
tatttctcgcaaccacatatgtctc

SEQ ID NO: 74304 - DNA, 25 bp, Saccharomyces pastorianus
ggcacattatgcgttgggcgactat

SEQ ID NO: 74305 - DNA, 25 bp, Saccharomyces pastorianus
tgagtcccttaatagccaaaaccgt

SEQ ID NO: 74306 - DNA, 25 bp, Saccharomyces pastorianus
ctgatccccgtataggtattggttt

SEQ ID NO: 74307 - DNA, 25 bp, Saccharomyces pastorianus
ggcgactatcgcaaatcattcatta

SEQ ID NO: 74308 - DNA, 25 bp, Saccharomyces pastorianus
gaataatccagttttgttgacgtta

SEQ ID NO: 74309 - DNA, 25 bp, Saccharomyces pastorianus
gaacacaagcgcctcaatcttggta

SEQ ID NO: 74310 - DNA, 25 bp, Saccharomyces pastorianus
gtcctttcggaatcttcattctggt

SEQ ID NO: 74311 - DNA, 25 bp, Saccharomyces pastorianus
atcttcattctggtgtggtagggca

SEQ ID NO: 74312 - DNA, 25 bp, Saccharomyces pastorianus
ggcagagagctcttcaaatcaattc

SEQ ID NO: 74313 - DNA, 25 bp, Saccharomyces pastorianus
gttatcaaccctgtgttacaacctg

SEQ ID NO: 74314 - DNA, 25 bp, Saccharomyces pastorianus
gtgagtttcataattctctaaccga

SEQ ID NO: 74315 - DNA, 25 bp, Saccharomyces pastorianus
gcgtggaaacttgcgattcgtcttc

SEQ ID NO: 74316 - DNA, 25 bp, Saccharomyces pastorianus
acgccaccgctgtccattttttaat

SEQ ID NO: 74317 - DNA, 25 bp, Saccharomyces pastorianus
gaaacttgcgattcgtcttcatcta

SEQ ID NO: 74318 - DNA, 25 bp, Saccharomyces pastorianus
ttttggtctctaccggtgtattttg

SEQ ID NO: 74319 - DNA, 25 bp, Saccharomyces pastorianus
tctaccggtgtattttgttgctcat

SEQ ID NO: 74320 - DNA, 25 bp, Saccharomyces pastorianus
attttgttgctcattctgcgtggaa

SEQ ID NO: 74321 - DNA, 25 bp, Saccharomyces pastorianus
gtggtttctgcaaatggcacagttg

SEQ ID NO: 74322 - DNA, 25 bp, Saccharomyces pastorianus
tccattttttaatctcgaatctttt

SEQ ID NO: 74323 - DNA, 25 bp, Saccharomyces pastorianus
tcaacggctatatcccacgaccaga

SEQ ID NO: 74324 - DNA, 25 bp, Saccharomyces pastorianus
gctcattctgcgtggaaacttgcga

SEQ ID NO: 74325 - DNA, 25 bp, Saccharomyces pastorianus
catggttccataatgtggtttctgc

SEQ ID NO: 74326 - DNA, 25 bp, Saccharomyces pastorianus
ggaattcgtgcatcgagatctgctt

SEQ ID NO: 74327 - DNA, 25 bp, Saccharomyces pastorianus
gataagggcttggaattcgtgcatc

SEQ ID NO: 74328 - DNA, 25 bp, Saccharomyces pastorianus
ttggaattcgtgcatcgagatctgc

SEQ ID NO: 74329 - DNA, 25 bp, Saccharomyces pastorianus
ggcttggaattcgtgcatcgagatc

SEQ ID NO: 74330 - DNA, 25 bp, Saccharomyces pastorianus
tggaattcgtgcatcgagatctgct

SEQ ID NO: 74331 - DNA, 25 bp, Saccharomyces pastorianus
gcttggaattcgtgcatcgagatct

SEQ ID NO: 74332 - DNA, 25 bp, Saccharomyces pastorianus
taagggcttggaattcgtgcatcga

SEQ ID NO: 74333 - DNA, 25 bp, Saccharomyces pastorianus
ataagggcttggaattcgtgcatcg

SEQ ID NO: 74334 - DNA, 25 bp, Saccharomyces pastorianus
gaaaaatatcgataagggcttggaa

SEQ ID NO: 74335 - DNA, 25 bp, Saccharomyces pastorianus
agggcttggaattcgtgcatcgaga

SEQ ID NO: 74336 - DNA, 25 bp, Saccharomyces pastorianus
aagggcttggaattcgtgcatcgag

SEQ ID NO: 74337 - DNA, 25 bp, Saccharomyces pastorianus
gattctattgccgagtgctgcgatc

SEQ ID NO: 74338 - DNA, 25 bp, Saccharomyces pastorianus
ggcatgacacgtgatgatttgttta

SEQ ID NO: 74339 - DNA, 25 bp, Saccharomyces pastorianus
gtgttcctagaaagccaggcatgac

SEQ ID NO: 74340 - DNA, 25 bp, Saccharomyces pastorianus
gccaactgggcgattctattgccga

SEQ ID NO: 74341 - DNA, 25 bp, Saccharomyces pastorianus
ctccaaggtctttgtgcttgtcatt

SEQ ID NO: 74342 - DNA, 25 bp, Saccharomyces pastorianus
aacgcttctatcgttgttatccctg

SEQ ID NO: 74343 - DNA, 25 bp, Saccharomyces pastorianus
agtgctgcgatctctccaaggtctt

SEQ ID NO: 74344 - DNA, 25 bp, Saccharomyces pastorianus
ccgcaggcggcattcaaaactgttt

SEQ ID NO: 74345 - DNA, 25 bp, Saccharomyces pastorianus
gatttgtttaacgtgaatgccggta

SEQ ID NO: 74346 - DNA, 25 bp, Saccharomyces pastorianus
gttatccctgcaggtgttcctagaa

SEQ ID NO: 74347 - DNA, 25 bp, Saccharomyces pastorianus
atgccggtatcattagccaactggg

SEQ ID NO: 74348 - DNA, 25 bp, Saccharomyces pastorianus
acttgtggctttggtagcggcatct

SEQ ID NO: 74349 - DNA, 25 bp, Saccharomyces pastorianus
gtctcctaatatttttcacggactt

SEQ ID NO: 74350 - DNA, 25 bp, Saccharomyces pastorianus
gatgctgtcattttgtctcctaata

SEQ ID NO: 74351 - DNA, 25 bp, Saccharomyces pastorianus
gtagcactaatatatctcttgggtt

SEQ ID NO: 74352 - DNA, 25 bp, Saccharomyces pastorianus
gacggacaaactcatttcctcgaaa

SEQ ID NO: 74353 - DNA, 25 bp, Saccharomyces pastorianus
tgcatttcatttatcacttcgtcaa

SEQ ID NO: 74354 - DNA, 25 bp, Saccharomyces pastorianus
tatttgatacctttgttccccacca

SEQ ID NO: 74355 - DNA, 25 bp, Saccharomyces pastorianus
aacagttttcttcatttcggtatca

SEQ ID NO: 74356 - DNA, 25 bp, Saccharomyces pastorianus
atatctcttgggttcgatgctgtca

SEQ ID NO: 74357 - DNA, 25 bp, Saccharomyces pastorianus
atcagtagtgtgttgttccttgcca

SEQ ID NO: 74358 - DNA, 25 bp, Saccharomyces pastorianus
ggaacgagtcactagtagcactaat

SEQ ID NO: 74359 - DNA, 25 bp, Saccharomyces pastorianus
ccaggatgccaaatacacaccgaga

SEQ ID NO: 74360 - DNA, 25 bp, Saccharomyces pastorianus
gaaagccagactgtgggtccacgta

SEQ ID NO: 74361 - DNA, 25 bp, Saccharomyces pastorianus
aacaggctctgtgctcccaggatgc

SEQ ID NO: 74362 - DNA, 25 bp, Saccharomyces pastorianus
gagattcatcaactctttgttagaa

SEQ ID NO: 74363 - DNA, 25 bp, Saccharomyces pastorianus
tctgatgctgtacctgaggaagcag

SEQ ID NO: 74364 - DNA, 25 bp, Saccharomyces pastorianus
aggatagcgacagggctcagttgaa

SEQ ID NO: 74365 - DNA, 25 bp, Saccharomyces pastorianus
acttgcaggcattcgtggagcacgc

SEQ ID NO: 74366 - DNA, 25 bp, Saccharomyces pastorianus
tggtcgacaggagcgatctgatgct

SEQ ID NO: 74367 - DNA, 25 bp, Saccharomyces pastorianus
gagacacgactacaacaggctctgt

SEQ ID NO: 74368 - DNA, 25 bp, Saccharomyces pastorianus
cacgctggccgagatgtggtcgaca

SEQ ID NO: 74369 - DNA, 25 bp, Saccharomyces pastorianus
gtgggtccacgtagagacacgacta

SEQ ID NO: 74370 - DNA, 25 bp, Saccharomyces pastorianus
gttcgactgcttcgtctttttacca

SEQ ID NO: 74371 - DNA, 25 bp, Saccharomyces pastorianus
tttactatcttgctacttttactat

SEQ ID NO: 74372 - DNA, 25 bp, Saccharomyces pastorianus
attatctgtgatcttcctgttcgac

SEQ ID NO: 74373 - DNA, 25 bp, Saccharomyces pastorianus
ttttaccagaagcagggccgccttt

SEQ ID NO: 74374 - DNA, 25 bp, Saccharomyces pastorianus
gtctttttaccagaagcagggccgc

SEQ ID NO: 74375 - DNA, 25 bp, Saccharomyces pastorianus
tgatcttcctgttcgactgcttcgt

SEQ ID NO: 74376 - DNA, 25 bp, Saccharomyces pastorianus
cttgctacttttactattatctgtg

SEQ ID NO: 74377 - DNA, 25 bp, Saccharomyces pastorianus
gactgcttcgtctttttaccagaag

SEQ ID NO: 74378 - DNA, 25 bp, Saccharomyces pastorianus
atctgtgatcttcctgttcgactgc

SEQ ID NO: 74379 - DNA, 25 bp, Saccharomyces pastorianus
agcagggccgccttttgaggctaac

SEQ ID NO: 74380 - DNA, 25 bp, Saccharomyces pastorianus
gctaacctttactatcttgctactt

SEQ ID NO: 74381 - DNA, 25 bp, Saccharomyces pastorianus
attagttgcaactcaggcagtgcgc

SEQ ID NO: 74382 - DNA, 25 bp, Saccharomyces pastorianus
gagtgacaattctccagtgactaca

SEQ ID NO: 74383 - DNA, 25 bp, Saccharomyces pastorianus
gcaggttttggtgtttggaccccat

SEQ ID NO: 74384 - DNA, 25 bp, Saccharomyces pastorianus
gattctactaccatcaccaagagtg

SEQ ID NO: 74385 - DNA, 25 bp, Saccharomyces pastorianus
agttcactaatgaccagttcccgct

SEQ ID NO: 74386 - DNA, 25 bp, Saccharomyces pastorianus
atttcggcaactacgcaggtggcag

SEQ ID NO: 74387 - DNA, 25 bp, Saccharomyces pastorianus
aacagcgtgatttccagttcactaa

SEQ ID NO: 74388 - DNA, 25 bp, Saccharomyces pastorianus
aggcagtgcgcaaggcgtctttatt

SEQ ID NO: 74389 - DNA, 25 bp, Saccharomyces pastorianus
ccagttcccgctaaagtctatcaag

SEQ ID NO: 74390 - DNA, 25 bp, Saccharomyces pastorianus
gactacaggcgattatgcggcacag

SEQ ID NO: 74391 - DNA, 25 bp, Saccharomyces pastorianus
aataaatgccaatgacgtcgtctac

SEQ ID NO: 74392 - DNA, 25 bp, Saccharomyces pastorianus
aaagcctgccaatgttccgaaaatc

SEQ ID NO: 74393 - DNA, 25 bp, Saccharomyces pastorianus
ggcaccatcataccttcaaatctag

SEQ ID NO: 74394 - DNA, 25 bp, Saccharomyces pastorianus
gggaaagctcacatgtgcgtcgtta

SEQ ID NO: 74395 - DNA, 25 bp, Saccharomyces pastorianus
caaatctagcgtccaacccgttgaa

SEQ ID NO: 74396 - DNA, 25 bp, Saccharomyces pastorianus
ccgagcacccacagcaagatttgaa

SEQ ID NO: 74397 - DNA, 25 bp, Saccharomyces pastorianus
aaggcacattacttcctatttgcat

SEQ ID NO: 74398 - DNA, 25 bp, Saccharomyces pastorianus
gtcgttagtaaagagccgggctcct

SEQ ID NO: 74399 - DNA, 25 bp, Saccharomyces pastorianus
ggagcacaaagctgctgaccaagct

SEQ ID NO: 74400 - DNA, 25 bp, Saccharomyces pastorianus
aagctgatgaatcgtctccactctt

SEQ ID NO: 74401 - DNA, 25 bp, Saccharomyces pastorianus
gaatattctgaattacttccaggag

SEQ ID NO: 74402 - DNA, 25 bp, Saccharomyces pastorianus
aatcgtggacgagtctgatgtcttt

SEQ ID NO: 74403 - DNA, 25 bp, Saccharomyces pastorianus
tagtggccgatcctgatcttttaca

SEQ ID NO: 74404 - DNA, 25 bp, Saccharomyces pastorianus
aacactgtcatgaggaccatcctat

SEQ ID NO: 74405 - DNA, 25 bp, Saccharomyces pastorianus
gtgcgcccttcaaggttacagtgat

SEQ ID NO: 74406 - DNA, 25 bp, Saccharomyces pastorianus
catccctcatcaatttttaccaaac

SEQ ID NO: 74407 - DNA, 25 bp, Saccharomyces pastorianus
tgtaagggccatctcgtgtctaaaa

SEQ ID NO: 74408 - DNA, 25 bp, Saccharomyces pastorianus
gaattgcattcccatatcttcgagc

SEQ ID NO: 74409 - DNA, 25 bp, Saccharomyces pastorianus
ggaatccaatgtggcgcactatctg

SEQ ID NO: 74410 - DNA, 25 bp, Saccharomyces pastorianus
ggactctgccgtgtcaattgtacat

SEQ ID NO: 74411 - DNA, 25 bp, Saccharomyces pastorianus
ttgtacatttgaaacgtgcgccctt

SEQ ID NO: 74412 - DNA, 25 bp, Saccharomyces pastorianus
aattgctatcctcctatgttactga

SEQ ID NO: 74413 - DNA, 25 bp, Saccharomyces pastorianus
attgacctgccccataatctagtgg

SEQ ID NO: 74414 - DNA, 25 bp, Saccharomyces pastorianus
gttctactcaagacgatgtttcctt

SEQ ID NO: 74415 - DNA, 25 bp, Saccharomyces pastorianus
aacatgtttgtgtgcggcccggaca

SEQ ID NO: 74416 - DNA, 25 bp, Saccharomyces pastorianus
ggtcttcgacatctcccaagggaag

SEQ ID NO: 74417 - DNA, 25 bp, Saccharomyces pastorianus
ctcaaccagttcttcgaccatggaa

SEQ ID NO: 74418 - DNA, 25 bp, Saccharomyces pastorianus
tcgtccaacatggtccttgcagaaa

SEQ ID NO: 74419 - DNA, 25 bp, Saccharomyces pastorianus
agaccttcgaagtgctcatgaccga

SEQ ID NO: 74420 - DNA, 25 bp, Saccharomyces pastorianus
ttcgagagtaacatcccggtcttcg

SEQ ID NO: 74421 - DNA, 25 bp, Saccharomyces pastorianus
acaccttgcatgtgaccccggagaa

SEQ ID NO: 74422 - DNA, 25 bp, Saccharomyces pastorianus
aagacaacctgaacgtcctcttgca

SEQ ID NO: 74423 - DNA, 25 bp, Saccharomyces pastorianus
aagctcgacgacatctacctgaact

SEQ ID NO: 74424 - DNA, 25 bp, Saccharomyces pastorianus
gaaagagctattccgtgggcagaaa

SEQ ID NO: 74425 - DNA, 25 bp, Saccharomyces pastorianus
agaaaatataccgtgcgctgtaaca

SEQ ID NO: 74426 - DNA, 25 bp, Saccharomyces pastorianus
atttgggcatcgttgtgggccaagc

SEQ ID NO: 74427 - DNA, 25 bp, Saccharomyces pastorianus
aaacctcacggatttttcagtggat

SEQ ID NO: 74428 - DNA, 25 bp, Saccharomyces pastorianus
gcaacagcaagaatcatcttcccca

SEQ ID NO: 74429 - DNA, 25 bp, Saccharomyces pastorianus
gtattttccgcagatgatgacttat

SEQ ID NO: 74430 - DNA, 25 bp, Saccharomyces pastorianus
gaaaaacgtcatcaaggcactcaca

SEQ ID NO: 74431 - DNA, 25 bp, Saccharomyces pastorianus
aacggtttactggtctgtatattcg

SEQ ID NO: 74432 - DNA, 25 bp, Saccharomyces pastorianus
ggcactcacattacttgacctaatt

SEQ ID NO: 74433 - DNA, 25 bp, Saccharomyces pastorianus
ttacctatcagagtggcaaaccata

SEQ ID NO: 74434 - DNA, 25 bp, Saccharomyces pastorianus
gaaaccatacctattgttcagccaa

SEQ ID NO: 74435 - DNA, 25 bp, Saccharomyces pastorianus
gatgttatgctaaacctcacggatt

SEQ ID NO: 74436 - DNA, 25 bp, Saccharomyces pastorianus
atttgcctcctcttctttgatattg

SEQ ID NO: 74437 - DNA, 25 bp, Saccharomyces pastorianus
gagcaatttctaattctcccgtgtg

SEQ ID NO: 74438 - DNA, 25 bp, Saccharomyces pastorianus
aaatgcgtggtaacagtcgtcgaac

SEQ ID NO: 74439 - DNA, 25 bp, Saccharomyces pastorianus
agttcctgtatctgggtggcgagtt

SEQ ID NO: 74440 - DNA, 25 bp, Saccharomyces pastorianus
gtggctgatttatccatatcgtgta

SEQ ID NO: 74441 - DNA, 25 bp, Saccharomyces pastorianus
tatgcagtggccctgttagagccag

SEQ ID NO: 74442 - DNA, 25 bp, Saccharomyces pastorianus
cgagttgtcttggtggtccatacta

SEQ ID NO: 74443 - DNA, 25 bp, Saccharomyces pastorianus
tactattacctttgtcgccacggaa

SEQ ID NO: 74444 - DNA, 25 bp, Saccharomyces pastorianus
gtggcaacaaagtcagttcttcctt

SEQ ID NO: 74445 - DNA, 25 bp, Saccharomyces pastorianus
gacgagattcttcctaaaacacgag

SEQ ID NO: 74446 - DNA, 25 bp, Saccharomyces pastorianus
gtcatcctgctcaaaaatggcttca

SEQ ID NO: 74447 - DNA, 25 bp, Saccharomyces pastorianus
gaagccttattagcaagtctttcta

SEQ ID NO: 74448 - DNA, 25 bp, Saccharomyces pastorianus
acattggtttcgagttggcttctgc

SEQ ID NO: 74449 - DNA, 25 bp, Saccharomyces pastorianus
atctgttgtggcctcttctgctgtt

SEQ ID NO: 74450 - DNA, 25 bp, Saccharomyces pastorianus
aagtctttctacttctgctgtcact

SEQ ID NO: 74451 - DNA, 25 bp, Saccharomyces pastorianus
tcagaagttgacttcgctgccgtcg

SEQ ID NO: 74452 - DNA, 25 bp, Saccharomyces pastorianus
gttgctgccacctcatctgttgtgg

SEQ ID NO: 74453 - DNA, 25 bp, Saccharomyces pastorianus
gctgactacatattgttatctcaag

SEQ ID NO: 74454 - DNA, 25 bp, Saccharomyces pastorianus
tggtactcctccagattagaacctg

SEQ ID NO: 74455 - DNA, 25 bp, Saccharomyces pastorianus
aagatccaacttctggtttctcctt

SEQ ID NO: 74456 - DNA, 25 bp, Saccharomyces pastorianus
aatcgctttactagcagctctcgca

SEQ ID NO: 74457 - DNA, 25 bp, Saccharomyces pastorianus
ttagaacctgagattgaagccttat

SEQ ID NO: 74458 - DNA, 25 bp, Saccharomyces pastorianus
ttcccgcttttttcgtccctgcgct

SEQ ID NO: 74459 - DNA, 25 bp, Saccharomyces pastorianus
tttttcgtccctgcgcttcccgcgg

SEQ ID NO: 74460 - DNA, 25 bp, Saccharomyces pastorianus
tggcgggtacccctcgctcgcgggt

SEQ ID NO: 74461 - DNA, 25 bp, Saccharomyces pastorianus
ttcccgcggctacgcgcagtggcga

SEQ ID NO: 74462 - DNA, 25 bp, Saccharomyces pastorianus
ttctgtggcgggtacccctcgctcg

SEQ ID NO: 74463 - DNA, 25 bp, Saccharomyces pastorianus
cgggctacggccgtttctgtggcgg

SEQ ID NO: 74464 - DNA, 25 bp, Saccharomyces pastorianus
gctacgcgcagtggcgagccgggct

SEQ ID NO: 74465 - DNA, 25 bp, Saccharomyces pastorianus
ggctacggccgtttctgtggcgggt

SEQ ID NO: 74466 - DNA, 25 bp, Saccharomyces pastorianus
acgcgcagtggcgagccgggctacg

SEQ ID NO: 74467 - DNA, 25 bp, Saccharomyces pastorianus
cgagccgggctacggccgtttctgt

SEQ ID NO: 74468 - DNA, 25 bp, Saccharomyces pastorianus
ggcgagccgggctacggccgtttct

SEQ ID NO: 74469 - DNA, 25 bp, Saccharomyces pastorianus
gtttgaggcagactcccaaatggtg

SEQ ID NO: 74470 - DNA, 25 bp, Saccharomyces pastorianus
atcgctgaaagactatgggcatccg

SEQ ID NO: 74471 - DNA, 25 bp, Saccharomyces pastorianus
atggttgcacagagctgcctgttca

SEQ ID NO: 74472 - DNA, 25 bp, Saccharomyces pastorianus
aggtgaagcgttagccatcgatggc

SEQ ID NO: 74473 - DNA, 25 bp, Saccharomyces pastorianus
catcgatggctacgcatggttgcac

SEQ ID NO: 74474 - DNA, 25 bp, Saccharomyces pastorianus
agctgcctgttcatgcgcttatgaa

SEQ ID NO: 74475 - DNA, 25 bp, Saccharomyces pastorianus
tattgcaaacttaacggtatccgtt

SEQ ID NO: 74476 - DNA, 25 bp, Saccharomyces pastorianus
gggtattcagggtcttcttccacaa

SEQ ID NO: 74477 - DNA, 25 bp, Saccharomyces pastorianus
aaacccggtgtcattacgtagatat

SEQ ID NO: 74478 - DNA, 25 bp, Saccharomyces pastorianus
gggaaagccgactgacaaatatctt

SEQ ID NO: 74479 - DNA, 25 bp, Saccharomyces pastorianus
ggtatccgttacattgtggccccgt

SEQ ID NO: 74480 - DNA, 25 bp, Saccharomyces pastorianus
gagatttgagcccatatgacttcca

SEQ ID NO: 74481 - DNA, 25 bp, Saccharomyces pastorianus
agtttcaaagggtcttctgccctat

SEQ ID NO: 74482 - DNA, 25 bp, Saccharomyces pastorianus
gcagtcatggcgtttcagtttcaaa

SEQ ID NO: 74483 - DNA, 25 bp, Saccharomyces pastorianus
gacatagaccatcatttgcatctga

SEQ ID NO: 74484 - DNA, 25 bp, Saccharomyces pastorianus
gcaaagagtggatcatgctcccaaa

SEQ ID NO: 74485 - DNA, 25 bp, Saccharomyces pastorianus
ttgcatctgaaaatcgctcaaggag

SEQ ID NO: 74486 - DNA, 25 bp, Saccharomyces pastorianus
tacgaagcggcagtcatggcgtttc

SEQ ID NO: 74487 - DNA, 25 bp, Saccharomyces pastorianus
acgggatccccaaagtaggcttgat

SEQ ID NO: 74488 - DNA, 25 bp, Saccharomyces pastorianus
atgacttccaccaacctttagcgaa

SEQ ID NO: 74489 - DNA, 25 bp, Saccharomyces pastorianus
aggcgataacaacggcacggaagtt

SEQ ID NO: 74490 - DNA, 25 bp, Saccharomyces pastorianus
tgctcccaaaattgtagccaacttt

SEQ ID NO: 74491 - DNA, 25 bp, Saccharomyces pastorianus
tgataggcatctccaaccttttacg

SEQ ID NO: 74492 - DNA, 25 bp, Saccharomyces pastorianus
tatgatccctctactttctttttat

SEQ ID NO: 74493 - DNA, 25 bp, Saccharomyces pastorianus
aaccctatattttccatcccaaatg

SEQ ID NO: 74494 - DNA, 25 bp, Saccharomyces pastorianus
gaagacaaacttggccgatttctgg

SEQ ID NO: 74495 - DNA, 25 bp, Saccharomyces pastorianus
tcgctgcttcgaaacttcttagtga

SEQ ID NO: 74496 - DNA, 25 bp, Saccharomyces pastorianus
ctgatgacccaattgcgacgactgt

SEQ ID NO: 74497 - DNA, 25 bp, Saccharomyces pastorianus
ttattcctcagatacctcgaaggcc

SEQ ID NO: 74498 - DNA, 25 bp, Saccharomyces pastorianus
aggcgctatgccgttttcaatgcat

SEQ ID NO: 74499 - DNA, 25 bp, Saccharomyces pastorianus
caagtcccgagttgtacgctttaat

SEQ ID NO: 74500 - DNA, 25 bp, Saccharomyces pastorianus
ctattaccggttatacgagcttcct

SEQ ID NO: 74501 - DNA, 25 bp, Saccharomyces pastorianus
gactgtcacacatacaatctccatt

SEQ ID NO: 74502 - DNA, 25 bp, Saccharomyces pastorianus
tccaggcgtcaaacagggtccggtt

SEQ ID NO: 74503 - DNA, 25 bp, Saccharomyces pastorianus
aattcacttatcagccctatgacat

SEQ ID NO: 74504 - DNA, 25 bp, Saccharomyces pastorianus
gagtttccgcatttgccgaatgagt

SEQ ID NO: 74505 - DNA, 25 bp, Saccharomyces pastorianus
aggtaagctgccattctctagtatc

SEQ ID NO: 74506 - DNA, 25 bp, Saccharomyces pastorianus
ctattcttttgaaactccaggcgtc

SEQ ID NO: 74507 - DNA, 25 bp, Saccharomyces pastorianus
gggaaagctatacctagaccctctt

SEQ ID NO: 74508 - DNA, 25 bp, Saccharomyces pastorianus
accgccttacaattgctcttgacag

SEQ ID NO: 74509 - DNA, 25 bp, Saccharomyces pastorianus
ctatattggcgttggtgtgcggtcc

SEQ ID NO: 74510 - DNA, 25 bp, Saccharomyces pastorianus
aagatggctgcaccaacttcctaag

SEQ ID NO: 74511 - DNA, 25 bp, Saccharomyces pastorianus
gaagcaataccgaaatccccaatga

SEQ ID NO: 74512 - DNA, 25 bp, Saccharomyces pastorianus
ggtactggaatagtgaccgccttac

SEQ ID NO: 74513 - DNA, 25 bp, Saccharomyces pastorianus
tacgagcatactagtcaatggacgt

SEQ ID NO: 74514 - DNA, 25 bp, Saccharomyces pastorianus
gttcccaaggttgttcgcgatgatg

SEQ ID NO: 74515 - DNA, 25 bp, Saccharomyces pastorianus
atccgccattttttgcctattttga

SEQ ID NO: 74516 - DNA, 25 bp, Saccharomyces pastorianus
atggacgttagattatccgccattt

SEQ ID NO: 74517 - DNA, 25 bp, Saccharomyces pastorianus
gttcgcgatgatggctgtttggaca

SEQ ID NO: 74518 - DNA, 25 bp, Saccharomyces pastorianus
ttatcccagtttgttcccaaggttg

SEQ ID NO: 74519 - DNA, 25 bp, Saccharomyces pastorianus
taaactccctatgagcgaatggtat

SEQ ID NO: 74520 - DNA, 25 bp, Saccharomyces pastorianus
gacgtcaaaggttaccgcatccgag

SEQ ID NO: 74521 - DNA, 25 bp, Saccharomyces pastorianus
gattcctgattattttagcaccgac

SEQ ID NO: 74522 - DNA, 25 bp, Saccharomyces pastorianus
aatctaagcgctattcgttatggaa

SEQ ID NO: 74523 - DNA, 25 bp, Saccharomyces pastorianus
ttagcaccgactttgatgttcatag

SEQ ID NO: 74524 - DNA, 25 bp, Saccharomyces pastorianus
tcgttggagatggtcgacacttcaa

SEQ ID NO: 74525 - DNA, 25 bp, Saccharomyces pastorianus
gcgtctttaagcgtaagtgaaccta

SEQ ID NO: 74526 - DNA, 25 bp, Saccharomyces pastorianus
gcatccactgatgaattctctggca

SEQ ID NO: 74527 - DNA, 25 bp, Saccharomyces pastorianus
cacaaccggatcaggcgctattaat

SEQ ID NO: 74528 - DNA, 25 bp, Saccharomyces pastorianus
ggcggtattgatgctgagtcacaca

SEQ ID NO: 74529 - DNA, 25 bp, Saccharomyces pastorianus
aagtagggcgtacacaaccggatca

SEQ ID NO: 74530 - DNA, 25 bp, Saccharomyces pastorianus
gaagacgcagccgatgtattgaaaa

SEQ ID NO: 74531 - DNA, 25 bp, Saccharomyces pastorianus
gaaatagtcttgctgcatccactga

SEQ ID NO: 74532 - DNA, 25 bp, Saccharomyces pastorianus
atatcgtttacgtcgctacctaagt

SEQ ID NO: 74533 - DNA, 25 bp, Saccharomyces pastorianus
gctctttgcaagaaacgttgactat

SEQ ID NO: 74534 - DNA, 25 bp, Saccharomyces pastorianus
tttcttctgttcttaaccagtgata

SEQ ID NO: 74535 - DNA, 25 bp, Saccharomyces pastorianus
gcatacattttctgatcaacattcg

SEQ ID NO: 74536 - DNA, 25 bp, Saccharomyces pastorianus
gagagatatcccgacttggcaccaa

SEQ ID NO: 74537 - DNA, 25 bp, Saccharomyces pastorianus
gatataccaagaacgaaccctcata

SEQ ID NO: 74538 - DNA, 25 bp, Saccharomyces pastorianus
tggtgtctcaccaaactgctagaac

SEQ ID NO: 74539 - DNA, 25 bp, Saccharomyces pastorianus
atctttgggccattagacatcctgc

SEQ ID NO: 74540 - DNA, 25 bp, Saccharomyces pastorianus
atgacttagtcacaccgtttttcga

SEQ ID NO: 74541 - DNA, 25 bp, Saccharomyces pastorianus
tacggaatatttaccgccttctcaa

SEQ ID NO: 74542 - DNA, 25 bp, Saccharomyces pastorianus
atccccttgtatcagttcaaatccg

SEQ ID NO: 74543 - DNA, 25 bp, Saccharomyces pastorianus
acatcctgccagtgggtacgtgcaa

SEQ ID NO: 74544 - DNA, 25 bp, Saccharomyces pastorianus
aaggacccttctacatatatgacag

SEQ ID NO: 74545 - DNA, 25 bp, Saccharomyces pastorianus
gtacaaactagcttgcaacggatat

SEQ ID NO: 74546 - DNA, 25 bp, Saccharomyces pastorianus
aaattcgacgactctgatgaagaag

SEQ ID NO: 74547 - DNA, 25 bp, Saccharomyces pastorianus
gacacaggattctaaagcattgcca

SEQ ID NO: 74548 - DNA, 25 bp, Saccharomyces pastorianus
ttcgacgactctgatgaagaagaag

SEQ ID NO: 74549 - DNA, 25 bp, Saccharomyces pastorianus
tttgataaattcgacgactctgatg

SEQ ID NO: 74550 - DNA, 25 bp, Saccharomyces pastorianus
gagggaagttcaaaattcagttact

SEQ ID NO: 74551 - DNA, 25 bp, Saccharomyces pastorianus
ggattctaaagcattgccaccaaag

SEQ ID NO: 74552 - DNA, 25 bp, Saccharomyces pastorianus
attcagttactaccaacgacacagg

SEQ ID NO: 74553 - DNA, 25 bp, Saccharomyces pastorianus
aagaagaagaagtagccaaagccat

SEQ ID NO: 74554 - DNA, 25 bp, Saccharomyces pastorianus
gccaaagccataaaggcacgaaaga

SEQ ID NO: 74555 - DNA, 25 bp, Saccharomyces pastorianus
gttactaccaacgacacaggattct

SEQ ID NO: 74556 - DNA, 25 bp, Saccharomyces pastorianus
taccaacgacacaggattctaaagc

SEQ ID NO: 74557 - DNA, 25 bp, Saccharomyces pastorianus
aaatacgcatggatagtgacgaaga

SEQ ID NO: 74558 - DNA, 25 bp, Saccharomyces pastorianus
aagtagtgcacagaagttgtcttca

SEQ ID NO: 74559 - DNA, 25 bp, Saccharomyces pastorianus
gaacgatgagcaaatacgcatggat

SEQ ID NO: 74560 - DNA, 25 bp, Saccharomyces pastorianus
gaggccataaggtcggaacaatcac

SEQ ID NO: 74561 - DNA, 25 bp, Saccharomyces pastorianus
taaggtcggaacaatcacagttgaa

SEQ ID NO: 74562 - DNA, 25 bp, Saccharomyces pastorianus
gaaggactgcactctgggaaaaatg

SEQ ID NO: 74563 - DNA, 25 bp, Saccharomyces pastorianus
gaactccccgaagaactactagata

SEQ ID NO: 74564 - DNA, 25 bp, Saccharomyces pastorianus
agagacaattgctgaactccccgaa

SEQ ID NO: 74565 - DNA, 25 bp, Saccharomyces pastorianus
aaggatgacatgcaggtaatatcaa

SEQ ID NO: 74566 - DNA, 25 bp, Saccharomyces pastorianus
gcaaaatgaactttacgctaagcag

SEQ ID NO: 74567 - DNA, 25 bp, Saccharomyces pastorianus
tagaatcacgttttactgaaaggga

SEQ ID NO: 74568 - DNA, 25 bp, Saccharomyces pastorianus
agcaccggcccgtggcggcgatggg

SEQ ID NO: 74569 - DNA, 25 bp, Saccharomyces pastorianus
gatgggcgccgccacggaaacggaa

SEQ ID NO: 74570 - DNA, 25 bp, Saccharomyces pastorianus
cgtcgcccacgaagaagcagcagca

SEQ ID NO: 74571 - DNA, 25 bp, Saccharomyces pastorianus
gaagaagcagcagcaccggcccgtg

SEQ ID NO: 74572 - DNA, 25 bp, Saccharomyces pastorianus
tgtcgtcgcccacgaagaagcagca

SEQ ID NO: 74573 - DNA, 25 bp, Saccharomyces pastorianus
acgaagaagcagcagcaccggcccg

SEQ ID NO: 74574 - DNA, 25 bp, Saccharomyces pastorianus
gaaacggaagccgaagccgagaccg

SEQ ID NO: 74575 - DNA, 25 bp, Saccharomyces pastorianus
gtcgtcgcccacgaagaagcagcag

SEQ ID NO: 74576 - DNA, 25 bp, Saccharomyces pastorianus
tgctgctgtcgtcgcccacgaagaa

SEQ ID NO: 74577 - DNA, 25 bp, Saccharomyces pastorianus
agaagcagcagcaccggcccgtggc

SEQ ID NO: 74578 - DNA, 25 bp, Saccharomyces pastorianus
gctgtcgtcgcccacgaagaagcag

SEQ ID NO: 74579 - DNA, 25 bp, Saccharomyces pastorianus
cgaactgcactagcctcagggataa

SEQ ID NO: 74580 - DNA, 25 bp, Saccharomyces pastorianus
gcgaaccgaggccatacgacaagat

SEQ ID NO: 74581 - DNA, 25 bp, Saccharomyces pastorianus
atttgtactctttgaaacccgctgt

SEQ ID NO: 74582 - DNA, 25 bp, Saccharomyces pastorianus
gaaaatatctcgcacttgcacgata

SEQ ID NO: 74583 - DNA, 25 bp, Saccharomyces pastorianus
gctgggctcgctggtgaaagaacaa

SEQ ID NO: 74584 - DNA, 25 bp, Saccharomyces pastorianus
aaaaaccagtccttacagcaatcgt

SEQ ID NO: 74585 - DNA, 25 bp, Saccharomyces pastorianus
aaatagggcgcatccacacggcagt

SEQ ID NO: 74586 - DNA, 25 bp, Saccharomyces pastorianus
gtgaacgcgatttttcaccagctgg

SEQ ID NO: 74587 - DNA, 25 bp, Saccharomyces pastorianus
aaaactctcaggtgacttcaggaac

SEQ ID NO: 74588 - DNA, 25 bp, Saccharomyces pastorianus
acagactccgttgctgcacgaagaa

SEQ ID NO: 74589 - DNA, 25 bp, Saccharomyces pastorianus
agtccagctatatctccatcaaagt

SEQ ID NO: 74590 - DNA, 25 bp, Saccharomyces pastorianus
agtccactttgaccgattccttggt

SEQ ID NO: 74591 - DNA, 25 bp, Saccharomyces pastorianus
gctcgtttcaccgataccagaaagg

SEQ ID NO: 74592 - DNA, 25 bp, Saccharomyces pastorianus
cactttgaccgattccttggtccaa

SEQ ID NO: 74593 - DNA, 25 bp, Saccharomyces pastorianus
gtaagtccactttgaccgattcctt

SEQ ID NO: 74594 - DNA, 25 bp, Saccharomyces pastorianus
ccgataccagaaaggatgaacaaga

SEQ ID NO: 74595 - DNA, 25 bp, Saccharomyces pastorianus
gtgaagctcgtttcaccgataccag

SEQ ID NO: 74596 - DNA, 25 bp, Saccharomyces pastorianus
ctttgaccgattccttggtccaaag

SEQ ID NO: 74597 - DNA, 25 bp, Saccharomyces pastorianus
aagctcgtttcaccgataccagaaa

SEQ ID NO: 74598 - DNA, 25 bp, Saccharomyces pastorianus
gaagctcgtttcaccgataccagaa

SEQ ID NO: 74599 - DNA, 25 bp, Saccharomyces pastorianus
gtttcaccgataccagaaaggatga

SEQ ID NO: 74600 - DNA, 25 bp, Saccharomyces pastorianus
aagtccactttgaccgattccttgg

SEQ ID NO: 74601 - DNA, 25 bp, Saccharomyces pastorianus
gagtatgaagtctccagaacggtca

SEQ ID NO: 74602 - DNA, 25 bp, Saccharomyces pastorianus
aaacgccagccccaattcaggaatg

SEQ ID NO: 74603 - DNA, 25 bp, Saccharomyces pastorianus
atagataaccacatgctgccgaagt

SEQ ID NO: 74604 - DNA, 25 bp, Saccharomyces pastorianus
caatttagcggccattgttcagcca

SEQ ID NO: 74605 - DNA, 25 bp, Saccharomyces pastorianus
agaacggtcatcgagttcctcatca

SEQ ID NO: 74606 - DNA, 25 bp, Saccharomyces pastorianus
agacatctacatgctcttaccacaa

SEQ ID NO: 74607 - DNA, 25 bp, Saccharomyces pastorianus
gtagttgttcctgaaatggccattg

SEQ ID NO: 74608 - DNA, 25 bp, Saccharomyces pastorianus
gactcgaacaatttcatcctgcagc

SEQ ID NO: 74609 - DNA, 25 bp, Saccharomyces pastorianus
gaacctttagttccattagcattat

SEQ ID NO: 74610 - DNA, 25 bp, Saccharomyces pastorianus
gttcagccatcaatactttctcatc

SEQ ID NO: 74611 - DNA, 25 bp, Saccharomyces pastorianus
gcacgcttccgacataataccaaat

SEQ ID NO: 74612 - DNA, 25 bp, Saccharomyces pastorianus
tgagactgtgtatcttcccgtggaa

SEQ ID NO: 74613 - DNA, 25 bp, Saccharomyces pastorianus
tggcttaccagtgtatcttccgatg

SEQ ID NO: 74614 - DNA, 25 bp, Saccharomyces pastorianus
tagaaatttccggaccgataccatc

SEQ ID NO: 74615 - DNA, 25 bp, Saccharomyces pastorianus
atcaccttcgatgaatgagactgtg

SEQ ID NO: 74616 - DNA, 25 bp, Saccharomyces pastorianus
gacggtagacaaaaaccttctcgag

SEQ ID NO: 74617 - DNA, 25 bp, Saccharomyces pastorianus
cttctcgaggtgtttcttagaaaag

SEQ ID NO: 74618 - DNA, 25 bp, Saccharomyces pastorianus
ttattcgctcctgctaatgctgctg

SEQ ID NO: 74619 - DNA, 25 bp, Saccharomyces pastorianus
atggaaggttgcttgacggtagaca

SEQ ID NO: 74620 - DNA, 25 bp, Saccharomyces pastorianus
tcccgtggaaggatctggcttacca

SEQ ID NO: 74621 - DNA, 25 bp, Saccharomyces pastorianus
taatgctgctgtgcgtattctcacc

SEQ ID NO: 74622 - DNA, 25 bp, Saccharomyces pastorianus
gtaatatgttattcgctcctgctaa

SEQ ID NO: 74623 - DNA, 25 bp, Saccharomyces pastorianus
cggatggagaccaccatatcaagtc

SEQ ID NO: 74624 - DNA, 25 bp, Saccharomyces pastorianus
atcaagtcgtgcaacgagtcgtcct

SEQ ID NO: 74625 - DNA, 25 bp, Saccharomyces pastorianus
tactgaaccgctccacgggcttgat

SEQ ID NO: 74626 - DNA, 25 bp, Saccharomyces pastorianus
gtggccagggctttactgaaccgct

SEQ ID NO: 74627 - DNA, 25 bp, Saccharomyces pastorianus
ttcaactgcctcacaaaactcgtga

SEQ ID NO: 74628 - DNA, 25 bp, Saccharomyces pastorianus
acgggcttgatcatgaaggacagac

SEQ ID NO: 74629 - DNA, 25 bp, Saccharomyces pastorianus
tatgcttgaagtacgtggccagggc

SEQ ID NO: 74630 - DNA, 25 bp, Saccharomyces pastorianus
aagtacgtggccagggctttactga

SEQ ID NO: 74631 - DNA, 25 bp, Saccharomyces pastorianus
aggacagaccggatggagaccacca

SEQ ID NO: 74632 - DNA, 25 bp, Saccharomyces pastorianus
aaactcgtgatattggtatgcttga

SEQ ID NO: 74633 - DNA, 25 bp, Saccharomyces pastorianus
caacgagtcgtcctccaggatctgg

SEQ ID NO: 74634 - DNA, 25 bp, Saccharomyces pastorianus
aatgtttctctcacgtgccttatga

SEQ ID NO: 74635 - DNA, 25 bp, Saccharomyces pastorianus
aagagaagggcttcctcgcgcatca

SEQ ID NO: 74636 - DNA, 25 bp, Saccharomyces pastorianus
ttagaattcaataacccggatgcac

SEQ ID NO: 74637 - DNA, 25 bp, Saccharomyces pastorianus
ggaaaagagcaaccccaccaagatc

SEQ ID NO: 74638 - DNA, 25 bp, Saccharomyces pastorianus
tatgaaaacgcaaaccacggcccgt

SEQ ID NO: 74639 - DNA, 25 bp, Saccharomyces pastorianus
gcgatatcgagagcctcaagcacat

SEQ ID NO: 74640 - DNA, 25 bp, Saccharomyces pastorianus
cagaccgcttagtttccaggacgaa

SEQ ID NO: 74641 - DNA, 25 bp, Saccharomyces pastorianus
gacgaaactctcacccatttgaagg

SEQ ID NO: 74642 - DNA, 25 bp, Saccharomyces pastorianus
gcatagctccggtattttcaagaag

SEQ ID NO: 74643 - DNA, 25 bp, Saccharomyces pastorianus
gcagctctatccctgaatgtttctc

SEQ ID NO: 74644 - DNA, 25 bp, Saccharomyces pastorianus
gtgtcgcacgaccatactagcaacg

SEQ ID NO: 74645 - DNA, 25 bp, Saccharomyces pastorianus
gacgcttgtgtcacgaatttcaaga

SEQ ID NO: 74646 - DNA, 25 bp, Saccharomyces pastorianus
ttgaaagcagagaaaacccaatttt

SEQ ID NO: 74647 - DNA, 25 bp, Saccharomyces pastorianus
aaaagcctccagatggcaattgatc

SEQ ID NO: 74648 - DNA, 25 bp, Saccharomyces pastorianus
taaaacgttactcaacatgaacaat

SEQ ID NO: 74649 - DNA, 25 bp, Saccharomyces pastorianus
aaacgattatgcacaacaagtcaaa

SEQ ID NO: 74650 - DNA, 25 bp, Saccharomyces pastorianus
gaacgcctagaaagagcacttcaga

SEQ ID NO: 74651 - DNA, 25 bp, Saccharomyces pastorianus
acttcagatgccaattattactcca

SEQ ID NO: 74652 - DNA, 25 bp, Saccharomyces pastorianus
aacaatctagagcaacagttacttg

SEQ ID NO: 74653 - DNA, 25 bp, Saccharomyces pastorianus
agaacgtggtagacgcttgtgtcac

SEQ ID NO: 74654 - DNA, 25 bp, Saccharomyces pastorianus
ggcaattgatcatttgctgatagta

SEQ ID NO: 74655 - DNA, 25 bp, Saccharomyces pastorianus
gggattactataaacttcaagaacg

SEQ ID NO: 74656 - DNA, 25 bp, Saccharomyces pastorianus
aagatattcattatgttacggccaa

SEQ ID NO: 74657 - DNA, 25 bp, Saccharomyces pastorianus
attcattatgttacggccaactaca

SEQ ID NO: 74658 - DNA, 25 bp, Saccharomyces pastorianus
aaattatcaccatggaaaagaatac

SEQ ID NO: 74659 - DNA, 25 bp, Saccharomyces pastorianus
aactacaacaaaacggttaatgctg

SEQ ID NO: 74660 - DNA, 25 bp, Saccharomyces pastorianus
gctgatatcgatgaattcaaattta

SEQ ID NO: 74661 - DNA, 25 bp, Saccharomyces pastorianus
acaaaacggttaatgctgatatcga

SEQ ID NO: 74662 - DNA, 25 bp, Saccharomyces pastorianus
ttcattatgttacggccaactacaa

SEQ ID NO: 74663 - DNA, 25 bp, Saccharomyces pastorianus
atattcattatgttacggccaacta

SEQ ID NO: 74664 - DNA, 25 bp, Saccharomyces pastorianus
caactcgtggaaagatattcattat

SEQ ID NO: 74665 - DNA, 25 bp, Saccharomyces pastorianus
cattatgttacggccaactacaaca

SEQ ID NO: 74666 - DNA, 25 bp, Saccharomyces pastorianus
aaaacggttaatgctgatatcgatg

SEQ ID NO: 74667 - DNA, 25 bp, Saccharomyces pastorianus
gatacgacaagctgggttaagccca

SEQ ID NO: 74668 - DNA, 25 bp, Saccharomyces pastorianus
gaaagcaaggttcgtctcctcgaat

SEQ ID NO: 74669 - DNA, 25 bp, Saccharomyces pastorianus
ttatcaccttttcatgactaccttc

SEQ ID NO: 74670 - DNA, 25 bp, Saccharomyces pastorianus
aaagattccagttgtcgtcgagcct

SEQ ID NO: 74671 - DNA, 25 bp, Saccharomyces pastorianus
gtcgagcctgcttctcaaacagatg

SEQ ID NO: 74672 - DNA, 25 bp, Saccharomyces pastorianus
gcagctgtccactcaacattgaatt

SEQ ID NO: 74673 - DNA, 25 bp, Saccharomyces pastorianus
agatgcagccatgtcgccgaaggaa

SEQ ID NO: 74674 - DNA, 25 bp, Saccharomyces pastorianus
tgctttggctaacgacaccgccaga

SEQ ID NO: 74675 - DNA, 25 bp, Saccharomyces pastorianus
tcgaatcccactctttcaaggtttt

SEQ ID NO: 74676 - DNA, 25 bp, Saccharomyces pastorianus
gaatacaagcagctgtccactcaac

SEQ ID NO: 74677 - DNA, 25 bp, Saccharomyces pastorianus
gataaacttgaaaatgctacccctc

SEQ ID NO: 74678 - DNA, 25 bp, Saccharomyces pastorianus
tacgcagtgctgaagttacggaatt

SEQ ID NO: 74679 - DNA, 25 bp, Saccharomyces pastorianus
gcagtgtcgctgtaagcaacaatca

SEQ ID NO: 74680 - DNA, 25 bp, Saccharomyces pastorianus
gatgaagccaagatacgcagtgctg

SEQ ID NO: 74681 - DNA, 25 bp, Saccharomyces pastorianus
tagcagtactagtagcagtgtcgct

SEQ ID NO: 74682 - DNA, 25 bp, Saccharomyces pastorianus
gaatcttgtctctctacaaaatgaa

SEQ ID NO: 74683 - DNA, 25 bp, Saccharomyces pastorianus
gaagaattcaagacatggcataaca

SEQ ID NO: 74684 - DNA, 25 bp, Saccharomyces pastorianus
gtaacatccaagcagaacacattaa

SEQ ID NO: 74685 - DNA, 25 bp, Saccharomyces pastorianus
gatgatgagcatattaagtcgttag

SEQ ID NO: 74686 - DNA, 25 bp, Saccharomyces pastorianus
gagaatcttcatgagaatcttgtct

SEQ ID NO: 74687 - DNA, 25 bp, Saccharomyces pastorianus
atcgtcggacagaataacaatacta

SEQ ID NO: 74688 - DNA, 25 bp, Saccharomyces pastorianus
aatgaactgggcatatcgtcggaca

SEQ ID NO: 74689 - DNA, 25 bp, Saccharomyces pastorianus
gaattcatcaccctttcttataaag

SEQ ID NO: 74690 - DNA, 25 bp, Saccharomyces pastorianus
tataccatttgcatcctagttttaa

SEQ ID NO: 74691 - DNA, 25 bp, Saccharomyces pastorianus
gcttctttgtagacgatgccggaaa

SEQ ID NO: 74692 - DNA, 25 bp, Saccharomyces pastorianus
agacactacagtttccgatttggat

SEQ ID NO: 74693 - DNA, 25 bp, Saccharomyces pastorianus
atggtattgagcgaccctgcagtac

SEQ ID NO: 74694 - DNA, 25 bp, Saccharomyces pastorianus
aactacccgatgaactgctaatgaa

SEQ ID NO: 74695 - DNA, 25 bp, Saccharomyces pastorianus
aacgcagtcgaaaaccatcctagaa

SEQ ID NO: 74696 - DNA, 25 bp, Saccharomyces pastorianus
taaaaccctaactttcattgacgag

SEQ ID NO: 74697 - DNA, 25 bp, Saccharomyces pastorianus
tccgatttggatgcgactagttttc

SEQ ID NO: 74698 - DNA, 25 bp, Saccharomyces pastorianus
agaggaatcgctccgtatggctgat

SEQ ID NO: 74699 - DNA, 25 bp, Saccharomyces pastorianus
gatggagctgctgaactagacacta

SEQ ID NO: 74700 - DNA, 25 bp, Saccharomyces pastorianus
agaaagaggctactggacccatttt

SEQ ID NO: 74701 - DNA, 25 bp, Saccharomyces pastorianus
gagtctattgccattgcatgctgtc

SEQ ID NO: 74702 - DNA, 25 bp, Saccharomyces pastorianus
gccagcaatagtacccctgattttg

SEQ ID NO: 74703 - DNA, 25 bp, Saccharomyces pastorianus
ttcatctgtctatcctgcatcaaag

SEQ ID NO: 74704 - DNA, 25 bp, Saccharomyces pastorianus
tgacgtgaccgctgcagtcattaaa

SEQ ID NO: 74705 - DNA, 25 bp, Saccharomyces pastorianus
tggaattttttgtcggacctgacgt

SEQ ID NO: 74706 - DNA, 25 bp, Saccharomyces pastorianus
tgcatcaaaggttgctggccatatg

SEQ ID NO: 74707 - DNA, 25 bp, Saccharomyces pastorianus
agtggcggtgctactgccagcaata

SEQ ID NO: 74708 - DNA, 25 bp, Saccharomyces pastorianus
aagcaaggcccggatgcaatttcat

SEQ ID NO: 74709 - DNA, 25 bp, Saccharomyces pastorianus
ggccagacacacttacaagctgttg

SEQ ID NO: 74710 - DNA, 25 bp, Saccharomyces pastorianus
gaagcggctgattgcatttcattag

SEQ ID NO: 74711 - DNA, 25 bp, Saccharomyces pastorianus
gtatctttttaatgactgcagcggt

SEQ ID NO: 74712 - DNA, 25 bp, Saccharomyces pastorianus
gtaaatccacttttaactgccgctg

SEQ ID NO: 74713 - DNA, 25 bp, Saccharomyces pastorianus
gtcacgtcaggtccgacaaaaaatt

SEQ ID NO: 74714 - DNA, 25 bp, Saccharomyces pastorianus
actgccgctggtatctttttaatga

SEQ ID NO: 74715 - DNA, 25 bp, Saccharomyces pastorianus
gccgctggtatctttttaatgactg

SEQ ID NO: 74716 - DNA, 25 bp, Saccharomyces pastorianus
tttaactgccgctggtatcttttta

SEQ ID NO: 74717 - DNA, 25 bp, Saccharomyces pastorianus
aatccacttttaactgccgctggta

SEQ ID NO: 74718 - DNA, 25 bp, Saccharomyces pastorianus
atgactgcagcggtcacgtcaggtc

SEQ ID NO: 74719 - DNA, 25 bp, Saccharomyces pastorianus
ttaatgactgcagcggtcacgtcag

SEQ ID NO: 74720 - DNA, 25 bp, Saccharomyces pastorianus
gctattgtattttcgtgtaaatcca

SEQ ID NO: 74721 - DNA, 25 bp, Saccharomyces pastorianus
agcggtcacgtcaggtccgacaaaa

SEQ ID NO: 74722 - DNA, 25 bp, Saccharomyces pastorianus
atggaactccatcgtcagactgcag

SEQ ID NO: 74723 - DNA, 25 bp, Saccharomyces pastorianus
ggaacaccatcgtaactctgtctaa

SEQ ID NO: 74724 - DNA, 25 bp, Saccharomyces pastorianus
ggcaataacttccatcgacgtgttg

SEQ ID NO: 74725 - DNA, 25 bp, Saccharomyces pastorianus
gtttctgttagaacccgtggaccag

SEQ ID NO: 74726 - DNA, 25 bp, Saccharomyces pastorianus
gaggctcttgtatcccagattaacg

SEQ ID NO: 74727 - DNA, 25 bp, Saccharomyces pastorianus
tgccagcgctccaaacgttttgaaa

SEQ ID NO: 74728 - DNA, 25 bp, Saccharomyces pastorianus
gaactatcacaatcaatgcctctcg

SEQ ID NO: 74729 - DNA, 25 bp, Saccharomyces pastorianus
acttactggtggctactgcatccaa

SEQ ID NO: 74730 - DNA, 25 bp, Saccharomyces pastorianus
gttacatcccaatctaccgatagtg

SEQ ID NO: 74731 - DNA, 25 bp, Saccharomyces pastorianus
gcattcgatctactgaactactcca

SEQ ID NO: 74732 - DNA, 25 bp, Saccharomyces pastorianus
gatagtgttcgtagccacggaccat

SEQ ID NO: 74733 - DNA, 25 bp, Saccharomyces pastorianus
gatatcattccattcgctatcttca

SEQ ID NO: 74734 - DNA, 25 bp, Saccharomyces pastorianus
gagggtgcacgctcaggtatcacac

SEQ ID NO: 74735 - DNA, 25 bp, Saccharomyces pastorianus
acgctcaggtatcacacctttggct

SEQ ID NO: 74736 - DNA, 25 bp, Saccharomyces pastorianus
cacacctttggctcttaagatatca

SEQ ID NO: 74737 - DNA, 25 bp, Saccharomyces pastorianus
tatcattccattcgctatcttcaga

SEQ ID NO: 74738 - DNA, 25 bp, Saccharomyces pastorianus
gtgcacgctcaggtatcacaccttt

SEQ ID NO: 74739 - DNA, 25 bp, Saccharomyces pastorianus
aggtatcacacctttggctcttaag

SEQ ID NO: 74740 - DNA, 25 bp, Saccharomyces pastorianus
ggctcttaagatatcattccattcg

SEQ ID NO: 74741 - DNA, 25 bp, Saccharomyces pastorianus
gacctgaaacattggctcgttttgc

SEQ ID NO: 74742 - DNA, 25 bp, Saccharomyces pastorianus
gtatcacacctttggctcttaagat

SEQ ID NO: 74743 - DNA, 25 bp, Saccharomyces pastorianus
cgagttctgctgtgggtgagggtgc

SEQ ID NO: 74744 - DNA, 25 bp, Saccharomyces pastorianus
ttgaagagcctggagccaatcacga

SEQ ID NO: 74745 - DNA, 25 bp, Saccharomyces pastorianus
taatgtgaatgccactgcgacctca

SEQ ID NO: 74746 - DNA, 25 bp, Saccharomyces pastorianus
tggtctctcaagcaagtacacacag

SEQ ID NO: 74747 - DNA, 25 bp, Saccharomyces pastorianus
gaaacctatggtctctcaagcaagt

SEQ ID NO: 74748 - DNA, 25 bp, Saccharomyces pastorianus
taggtctaaggcctatcccggtcgg

SEQ ID NO: 74749 - DNA, 25 bp, Saccharomyces pastorianus
ccactactgttcatattgccactaa

SEQ ID NO: 74750 - DNA, 25 bp, Saccharomyces pastorianus
gccatacgggcaaaattaggtctaa

SEQ ID NO: 74751 - DNA, 25 bp, Saccharomyces pastorianus
atgccactgcgacctcaatattaaa

SEQ ID NO: 74752 - DNA, 25 bp, Saccharomyces pastorianus
acgactgctcgtggctgaataatgt

SEQ ID NO: 74753 - DNA, 25 bp, Saccharomyces pastorianus
agagaacgacgtgggcaatgaatca

SEQ ID NO: 74754 - DNA, 25 bp, Saccharomyces pastorianus
tgccactaaggcagatgcacttcga

SEQ ID NO: 74755 - DNA, 25 bp, Saccharomyces pastorianus
gaacatgccaacaactaaatctcca

SEQ ID NO: 74756 - DNA, 25 bp, Saccharomyces pastorianus
gagaaagactcgctcacagacattc

SEQ ID NO: 74757 - DNA, 25 bp, Saccharomyces pastorianus
aacgtttccagtttagatattgaag

SEQ ID NO: 74758 - DNA, 25 bp, Saccharomyces pastorianus
atatcgctcctaaaatggaagctgt

SEQ ID NO: 74759 - DNA, 25 bp, Saccharomyces pastorianus
actaaatctccaaaactgctaacag

SEQ ID NO: 74760 - DNA, 25 bp, Saccharomyces pastorianus
attcctctaacgattggagcagaac

SEQ ID NO: 74761 - DNA, 25 bp, Saccharomyces pastorianus
gaaaacgcaaaatcaaggactcaaa

SEQ ID NO: 74762 - DNA, 25 bp, Saccharomyces pastorianus
tggtggagactttaagccggtaaag

SEQ ID NO: 74763 - DNA, 25 bp, Saccharomyces pastorianus
ctcacagacattcctctaacgattg

SEQ ID NO: 74764 - DNA, 25 bp, Saccharomyces pastorianus
gaggatgaatttaaacgtttccagt

SEQ ID NO: 74765 - DNA, 25 bp, Saccharomyces pastorianus
agaacagggaatcatgaacatgcca

SEQ ID NO: 74766 - DNA, 25 bp, Saccharomyces pastorianus
tagaaccacgtgctgaagttaccca

SEQ ID NO: 74767 - DNA, 25 bp, Saccharomyces pastorianus
tggcctttaatatacgcattcgtca

SEQ ID NO: 74768 - DNA, 25 bp, Saccharomyces pastorianus
ggcactgccattttaaacactgggt

SEQ ID NO: 74769 - DNA, 25 bp, Saccharomyces pastorianus
atcacacgaatggtttggcgatttt

SEQ ID NO: 74770 - DNA, 25 bp, Saccharomyces pastorianus
aaacggcgtaactagtagcagcgat

SEQ ID NO: 74771 - DNA, 25 bp, Saccharomyces pastorianus
aagttacccagcgattgcctttcaa

SEQ ID NO: 74772 - DNA, 25 bp, Saccharomyces pastorianus
ttcgtccattggttttatcacattg

SEQ ID NO: 74773 - DNA, 25 bp, Saccharomyces pastorianus
agttccacgcaaagttttccattcg

SEQ ID NO: 74774 - DNA, 25 bp, Saccharomyces pastorianus
gaagctagtcctgcaaacggcgtaa

SEQ ID NO: 74775 - DNA, 25 bp, Saccharomyces pastorianus
aagacgcacatgtacctgttacgga

SEQ ID NO: 74776 - DNA, 25 bp, Saccharomyces pastorianus
agacggtggtgcttatgaggacaac

SEQ ID NO: 74777 - DNA, 25 bp, Saccharomyces pastorianus
agtttcttgacccaggattctccat

SEQ ID NO: 74778 - DNA, 25 bp, Saccharomyces pastorianus
atcaccttgtcaccaccggaatttc

SEQ ID NO: 74779 - DNA, 25 bp, Saccharomyces pastorianus
atggaggcaaaagggtacagtttct

SEQ ID NO: 74780 - DNA, 25 bp, Saccharomyces pastorianus
gatgagcaaatccattttccctcta

SEQ ID NO: 74781 - DNA, 25 bp, Saccharomyces pastorianus
gtacagtttcttgacccaggattct

SEQ ID NO: 74782 - DNA, 25 bp, Saccharomyces pastorianus
gtagactccttaatcatcaccttgt

SEQ ID NO: 74783 - DNA, 25 bp, Saccharomyces pastorianus
caaatccattttccctctaacgaat

SEQ ID NO: 74784 - DNA, 25 bp, Saccharomyces pastorianus
acaaaggctcctcgagaacgatgga

SEQ ID NO: 74785 - DNA, 25 bp, Saccharomyces pastorianus
ggattctccatcctattgatgagca

SEQ ID NO: 74786 - DNA, 25 bp, Saccharomyces pastorianus
ggaatttctccttcgcccacaaagg

SEQ ID NO: 74787 - DNA, 25 bp, Saccharomyces pastorianus
tgtgcctgtggcgtagactccttaa

SEQ ID NO: 74788 - DNA, 25 bp, Saccharomyces pastorianus
gtttctcacgatgttagtcttctca

SEQ ID NO: 74789 - DNA, 25 bp, Saccharomyces pastorianus
atcgatgttgttggtctcgtttctc

SEQ ID NO: 74790 - DNA, 25 bp, Saccharomyces pastorianus
tgttcacgggcggaaaggaccttca

SEQ ID NO: 74791 - DNA, 25 bp, Saccharomyces pastorianus
agagacctgacaatggccttgggct

SEQ ID NO: 74792 - DNA, 25 bp, Saccharomyces pastorianus
aggaccttcaaacgcatcttgttgg

SEQ ID NO: 74793 - DNA, 25 bp, Saccharomyces pastorianus
tcggccttcaactggatttccttag

SEQ ID NO: 74794 - DNA, 25 bp, Saccharomyces pastorianus
aactccttcttggtctcttcgaata

SEQ ID NO: 74795 - DNA, 25 bp, Saccharomyces pastorianus
aatatcccgtccagtgattgttcac

SEQ ID NO: 74796 - DNA, 25 bp, Saccharomyces pastorianus
aatcaaatcagcgtctctctcaaga

SEQ ID NO: 74797 - DNA, 25 bp, Saccharomyces pastorianus
aagatgggcttgtacttgtccctgt

SEQ ID NO: 74798 - DNA, 25 bp, Saccharomyces pastorianus
gatttgctgcgatagcgtggccttc

SEQ ID NO: 74799 - DNA, 25 bp, Saccharomyces pastorianus
gttaatcactataatgccttgggca

SEQ ID NO: 74800 - DNA, 25 bp, Saccharomyces pastorianus
atgccttgggcactagagttgtcct

SEQ ID NO: 74801 - DNA, 25 bp, Saccharomyces pastorianus
gctacagtggtcctgagcaactcaa

SEQ ID NO: 74802 - DNA, 25 bp, Saccharomyces pastorianus
ggttaatgctttgaaacgctatttg

SEQ ID NO: 74803 - DNA, 25 bp, Saccharomyces pastorianus
gagcaactcaatgcctgataaggat

SEQ ID NO: 74804 - DNA, 25 bp, Saccharomyces pastorianus
agagttgtcctctacagcggctaca

SEQ ID NO: 74805 - DNA, 25 bp, Saccharomyces pastorianus
aggatcaggatttagcagcttcttc

SEQ ID NO: 74806 - DNA, 25 bp, Saccharomyces pastorianus
agcttcttcaataaacactgtagta

SEQ ID NO: 74807 - DNA, 25 bp, Saccharomyces pastorianus
gttcttacggagtattgtagctgtt

SEQ ID NO: 74808 - DNA, 25 bp, Saccharomyces pastorianus
gtttaggaatctcaggtaccgttgt

SEQ ID NO: 74809 - DNA, 25 bp, Saccharomyces pastorianus
gtaccgttgtttcccaagtgactga

SEQ ID NO: 74810 - DNA, 25 bp, Saccharomyces pastorianus
tataaattgcttttcggtagccttt

SEQ ID NO: 74811 - DNA, 25 bp, Saccharomyces pastorianus
tacactgcagcgacataaatcccaa

SEQ ID NO: 74812 - DNA, 25 bp, Saccharomyces pastorianus
aatagttcactaccgtattgaccaa

SEQ ID NO: 74813 - DNA, 25 bp, Saccharomyces pastorianus
aacttgagactcaattgtacctgca

SEQ ID NO: 74814 - DNA, 25 bp, Saccharomyces pastorianus
gaacaacggtatcctttcagagcat

SEQ ID NO: 74815 - DNA, 25 bp, Saccharomyces pastorianus
ggatcctccgtcattaacttgagac

SEQ ID NO: 74816 - DNA, 25 bp, Saccharomyces pastorianus
tttcagagcattggatcctccgtca

SEQ ID NO: 74817 - DNA, 25 bp, Saccharomyces pastorianus
ggtagcctttttcttagacttcaca

SEQ ID NO: 74818 - DNA, 25 bp, Saccharomyces pastorianus
gatacccaagtaccaagaacaacgg

SEQ ID NO: 74819 - DNA, 25 bp, Saccharomyces pastorianus
ctgcaacacccagtccaatggatat

SEQ ID NO: 74820 - DNA, 25 bp, Saccharomyces pastorianus
aaatgtgctcgatgcatacactgca

SEQ ID NO: 74821 - DNA, 25 bp, Saccharomyces pastorianus
ggcattagtggccattacatctagt

SEQ ID NO: 74822 - DNA, 25 bp, Saccharomyces pastorianus
ggactcgtggtatctggtctgatta

SEQ ID NO: 74823 - DNA, 25 bp, Saccharomyces pastorianus
ttcgtgctaccgcaacgctggaagt

SEQ ID NO: 74824 - DNA, 25 bp, Saccharomyces pastorianus
aaagttgccatccaaacacactcta

SEQ ID NO: 74825 - DNA, 25 bp, Saccharomyces pastorianus
tggaagtgccaactctacattcggg

SEQ ID NO: 74826 - DNA, 25 bp, Saccharomyces pastorianus
atcaactgattctcgttatctggac

SEQ ID NO: 74827 - DNA, 25 bp, Saccharomyces pastorianus
tgcgaagtccgcctctaataaggat

SEQ ID NO: 74828 - DNA, 25 bp, Saccharomyces pastorianus
gggccactaagcgtcaaagacctca

SEQ ID NO: 74829 - DNA, 25 bp, Saccharomyces pastorianus
gaccggtgggcaaggcatattatct

SEQ ID NO: 74830 - DNA, 25 bp, Saccharomyces pastorianus
tcaccatattagcttcaggccctaa

SEQ ID NO: 74831 - DNA, 25 bp, Saccharomyces pastorianus
gcgtcgattctttaacttctttggt

SEQ ID NO: 74832 - DNA, 25 bp, Saccharomyces pastorianus
gttatgaaggcgacaacgacgatga

SEQ ID NO: 74833 - DNA, 25 bp, Saccharomyces pastorianus
gggatcaacgccaccaagtgcatca

SEQ ID NO: 74834 - DNA, 25 bp, Saccharomyces pastorianus
cagaaaccagggttccaaggcggat

SEQ ID NO: 74835 - DNA, 25 bp, Saccharomyces pastorianus
gcacggtaacgaccatgacgaacgt

SEQ ID NO: 74836 - DNA, 25 bp, Saccharomyces pastorianus
tgacgaacgttatgaaggcgacaac

SEQ ID NO: 74837 - DNA, 25 bp, Saccharomyces pastorianus
agagagttcagaaaccagggttcca

SEQ ID NO: 74838 - DNA, 25 bp, Saccharomyces pastorianus
cagcgatcaaaaccagggaactttc

SEQ ID NO: 74839 - DNA, 25 bp, Saccharomyces pastorianus
aaggcggatccctacagcgatcaaa

SEQ ID NO: 74840 - DNA, 25 bp, Saccharomyces pastorianus
caccaagtgcatcaacagagagagt

SEQ ID NO: 74841 - DNA, 25 bp, Saccharomyces pastorianus
aaactgcacggtaacgaccatgacg

SEQ ID NO: 74842 - DNA, 25 bp, Saccharomyces pastorianus
aacgacgatgagacccgggatcaac

SEQ ID NO: 74843 - DNA, 25 bp, Saccharomyces pastorianus
taagtcctgtggtgtcgacgccatg

SEQ ID NO: 74844 - DNA, 25 bp, Saccharomyces pastorianus
tgacagagctaagtcctgtggtgtc

SEQ ID NO: 74845 - DNA, 25 bp, Saccharomyces pastorianus
gagctaagtcctgtggtgtcgacgc

SEQ ID NO: 74846 - DNA, 25 bp, Saccharomyces pastorianus
cgttaacttcttggtctctttgttg

SEQ ID NO: 74847 - DNA, 25 bp, Saccharomyces pastorianus
agaagatgttttggctaaccaaatt

SEQ ID NO: 74848 - DNA, 25 bp, Saccharomyces pastorianus
catgtctctttgtatcttcggtgat

SEQ ID NO: 74849 - DNA, 25 bp, Saccharomyces pastorianus
aagaccaaacatgtctctttgtatc

SEQ ID NO: 74850 - DNA, 25 bp, Saccharomyces pastorianus
tggtgtcgacgccatgtccgttgat

SEQ ID NO: 74851 - DNA, 25 bp, Saccharomyces pastorianus
gtccgttaacttcttggtctctttg

SEQ ID NO: 74852 - DNA, 25 bp, Saccharomyces pastorianus
tgatgtccgttaacttcttggtctc

SEQ ID NO: 74853 - DNA, 25 bp, Saccharomyces pastorianus
ggctaaccaaattttgatgtccgtt

SEQ ID NO: 74854 - DNA, 25 bp, Saccharomyces pastorianus
attagccactttacaaccaacatgg

SEQ ID NO: 74855 - DNA, 25 bp, Saccharomyces pastorianus
gatagattagccactttacaaccaa

SEQ ID NO: 74856 - DNA, 25 bp, Saccharomyces pastorianus
cgacttgggcggtcacattcaagct

SEQ ID NO: 74857 - DNA, 25 bp, Saccharomyces pastorianus
aacgatagattagccactttacaac

SEQ ID NO: 74858 - DNA, 25 bp, Saccharomyces pastorianus
agaacgatagattagccactttaca

SEQ ID NO: 74859 - DNA, 25 bp, Saccharomyces pastorianus
agttcacaactttcgacttgggcgg

SEQ ID NO: 74860 - DNA, 25 bp, Saccharomyces pastorianus
tcgacttgggcggtcacattcaagc

SEQ ID NO: 74861 - DNA, 25 bp, Saccharomyces pastorianus
gattagccactttacaaccaacatg

SEQ ID NO: 74862 - DNA, 25 bp, Saccharomyces pastorianus
ggcaatcggtaatatcaagttcaca

SEQ ID NO: 74863 - DNA, 25 bp, Saccharomyces pastorianus
aatcggtaatatcaagttcacaact

SEQ ID NO: 74864 - DNA, 25 bp, Saccharomyces pastorianus
aacttctgaagaattggcaatcggt

SEQ ID NO: 74865 - DNA, 25 bp, Saccharomyces pastorianus
tttaggcttattgaacaccactggt

SEQ ID NO: 74866 - DNA, 25 bp, Saccharomyces pastorianus
cattgctgaattgaaagatgttcca

SEQ ID NO: 74867 - DNA, 25 bp, Saccharomyces pastorianus
gaagcccgtgttgagttagatgccc

SEQ ID NO: 74868 - DNA, 25 bp, Saccharomyces pastorianus
agatgttccatttgtcatccttggt

SEQ ID NO: 74869 - DNA, 25 bp, Saccharomyces pastorianus
gaacaccactggttcccaaagaatt

SEQ ID NO: 74870 - DNA, 25 bp, Saccharomyces pastorianus
ctggttcccaaagaattgagggtca

SEQ ID NO: 74871 - DNA, 25 bp, Saccharomyces pastorianus
gaagctgaattacgttctgctttag

SEQ ID NO: 74872 - DNA, 25 bp, Saccharomyces pastorianus
gagttagatgccctgttcaacattg

SEQ ID NO: 74873 - DNA, 25 bp, Saccharomyces pastorianus
tgctccaaatgctgtttctgaagct

SEQ ID NO: 74874 - DNA, 25 bp, Saccharomyces pastorianus
gctgtttctgaagctgaattacgtt

SEQ ID NO: 74875 - DNA, 25 bp, Saccharomyces pastorianus
gatgccctgttcaacattgctgaat

SEQ ID NO: 74876 - DNA, 25 bp, Saccharomyces pastorianus
tgcgcccatgcgacaaaggaggttt

SEQ ID NO: 74877 - DNA, 25 bp, Saccharomyces pastorianus
tttatttactggttggtcgggtcat

SEQ ID NO: 74878 - DNA, 25 bp, Saccharomyces pastorianus
attataactgctgtttcttgtgggt

SEQ ID NO: 74879 - DNA, 25 bp, Saccharomyces pastorianus
cgctccatcccatatacacaggaaa

SEQ ID NO: 74880 - DNA, 25 bp, Saccharomyces pastorianus
gaggagctcaatcagcttcatagta

SEQ ID NO: 74881 - DNA, 25 bp, Saccharomyces pastorianus
aatggaacattgctcctatctaccg

SEQ ID NO: 74882 - DNA, 25 bp, Saccharomyces pastorianus
aagggccctctgaagacgatgcgat

SEQ ID NO: 74883 - DNA, 25 bp, Saccharomyces pastorianus
ggtcgggtcattgtcattataactg

SEQ ID NO: 74884 - DNA, 25 bp, Saccharomyces pastorianus
aacgggtcttattttcacacaggtg

SEQ ID NO: 74885 - DNA, 25 bp, Saccharomyces pastorianus
gatggattcgaatggttcaccttta

SEQ ID NO: 74886 - DNA, 25 bp, Saccharomyces pastorianus
cttggatatcgacagagcctctttg

SEQ ID NO: 74887 - DNA, 25 bp, Saccharomyces pastorianus
gaggctgcatatcttaatgctcagg

SEQ ID NO: 74888 - DNA, 25 bp, Saccharomyces pastorianus
gaagctcttgaactaccgaaggcat

SEQ ID NO: 74889 - DNA, 25 bp, Saccharomyces pastorianus
aagcttgctaaaaacctattcagag

SEQ ID NO: 74890 - DNA, 25 bp, Saccharomyces pastorianus
tctcaaggcatgacagtatcgctgt

SEQ ID NO: 74891 - DNA, 25 bp, Saccharomyces pastorianus
ggcacactgcaggacaaaacttcaa

SEQ ID NO: 74892 - DNA, 25 bp, Saccharomyces pastorianus
gcggcatgaattactttatccttta

SEQ ID NO: 74893 - DNA, 25 bp, Saccharomyces pastorianus
gaggatatccttacgaagctcttga

SEQ ID NO: 74894 - DNA, 25 bp, Saccharomyces pastorianus
aaaccgtcatcttttctcaaggcat

SEQ ID NO: 74895 - DNA, 25 bp, Saccharomyces pastorianus
ggcatattgattacacggcacactg

SEQ ID NO: 74896 - DNA, 25 bp, Saccharomyces pastorianus
aagagcattttttgagaagcggcat

SEQ ID NO: 74897 - DNA, 25 bp, Saccharomyces pastorianus
gaaagacgcattttctcttggagaa

SEQ ID NO: 74898 - DNA, 25 bp, Saccharomyces pastorianus
ggtgaacctatactttatcctcata

SEQ ID NO: 74899 - DNA, 25 bp, Saccharomyces pastorianus
gaagtcgcttttcaatattgcgtct

SEQ ID NO: 74900 - DNA, 25 bp, Saccharomyces pastorianus
ggtacgaatcctgtgtccaaaaact

SEQ ID NO: 74901 - DNA, 25 bp, Saccharomyces pastorianus
gtgcctggtgtcattgcggaaagat

SEQ ID NO: 74902 - DNA, 25 bp, Saccharomyces pastorianus
tgaagttcgtcactgtgccttgtct

SEQ ID NO: 74903 - DNA, 25 bp, Saccharomyces pastorianus
catcggttctcattcaggtgtcaag

SEQ ID NO: 74904 - DNA, 25 bp, Saccharomyces pastorianus
aaggctataaagtcatcggttctca

SEQ ID NO: 74905 - DNA, 25 bp, Saccharomyces pastorianus
ttggcatgctcttctaagtgtgttt

SEQ ID NO: 74906 - DNA, 25 bp, Saccharomyces pastorianus
attcgccaaggcgtttgaagttcgt

SEQ ID NO: 74907 - DNA, 25 bp, Saccharomyces pastorianus
gaattaacgccttctttggcatgct

SEQ ID NO: 74908 - DNA, 25 bp, Saccharomyces pastorianus
gccttgtctcttgttggtgaaccta

SEQ ID NO: 74909 - DNA, 25 bp, Saccharomyces pastorianus
agacacctgaatgggctttatttgg

SEQ ID NO: 74910 - DNA, 25 bp, Saccharomyces pastorianus
tgggtttgcaccaggcaacgtaaga

SEQ ID NO: 74911 - DNA, 25 bp, Saccharomyces pastorianus
cgttcagtggttcatccgatgggaa

SEQ ID NO: 74912 - DNA, 25 bp, Saccharomyces pastorianus
cgcggatccccatgttttattgaag

SEQ ID NO: 74913 - DNA, 25 bp, Saccharomyces pastorianus
tatattacgacattgctgccgagca

SEQ ID NO: 74914 - DNA, 25 bp, Saccharomyces pastorianus
gtgacgtcagtgcatatgctgactt

SEQ ID NO: 74915 - DNA, 25 bp, Saccharomyces pastorianus
aaggcatttacagcggagttacaga

SEQ ID NO: 74916 - DNA, 25 bp, Saccharomyces pastorianus
gagcatgcacactccaactgtttac

SEQ ID NO: 74917 - DNA, 25 bp, Saccharomyces pastorianus
aaggagctacgttcagtggttcatc

SEQ ID NO: 74918 - DNA, 25 bp, Saccharomyces pastorianus
atgctgacttggttcaacgcggatc

SEQ ID NO: 74919 - DNA, 25 bp, Saccharomyces pastorianus
aactgtttactgattgctgatacta

SEQ ID NO: 74920 - DNA, 25 bp, Saccharomyces pastorianus
gagagatatcgccttccggcgtcag

SEQ ID NO: 74921 - DNA, 25 bp, Saccharomyces pastorianus
ttccggcgtcagctacttagttcat

SEQ ID NO: 74922 - DNA, 25 bp, Saccharomyces pastorianus
atacatcgagagatatcgccttccg

SEQ ID NO: 74923 - DNA, 25 bp, Saccharomyces pastorianus
gcgtcagctacttagttcatggact

SEQ ID NO: 74924 - DNA, 25 bp, Saccharomyces pastorianus
cgtcagctacttagttcatggactt

SEQ ID NO: 74925 - DNA, 25 bp, Saccharomyces pastorianus
agatatcgccttccggcgtcagcta

SEQ ID NO: 74926 - DNA, 25 bp, Saccharomyces pastorianus
cggcgtcagctacttagttcatgga

SEQ ID NO: 74927 - DNA, 25 bp, Saccharomyces pastorianus
gccttccggcgtcagctacttagtt

SEQ ID NO: 74928 - DNA, 25 bp, Saccharomyces pastorianus
acatcgagagatatcgccttccggc

SEQ ID NO: 74929 - DNA, 25 bp, Saccharomyces pastorianus
atcgagagatatcgccttccggcgt

SEQ ID NO: 74930 - DNA, 25 bp, Saccharomyces pastorianus
tccggcgtcagctacttagttcatg

SEQ ID NO: 74931 - DNA, 25 bp, Saccharomyces pastorianus
gaaggaagtttctcccaatccccat

SEQ ID NO: 74932 - DNA, 25 bp, Saccharomyces pastorianus
gaaacatctaccacatctactaaga

SEQ ID NO: 74933 - DNA, 25 bp, Saccharomyces pastorianus
aatccccatggcaatgaaacatcta

SEQ ID NO: 74934 - DNA, 25 bp, Saccharomyces pastorianus
gtcttatccgaccaacctgttgttg

SEQ ID NO: 74935 - DNA, 25 bp, Saccharomyces pastorianus
gacttttccaatttcggaacatcga

SEQ ID NO: 74936 - DNA, 25 bp, Saccharomyces pastorianus
actaagccggagactatcagattaa

SEQ ID NO: 74937 - DNA, 25 bp, Saccharomyces pastorianus
aaccgttcggaaggcaaactcaatg

SEQ ID NO: 74938 - DNA, 25 bp, Saccharomyces pastorianus
gaaaagagtccaggtcttatccgac

SEQ ID NO: 74939 - DNA, 25 bp, Saccharomyces pastorianus
gacttgaaatccttgagcctgttta

SEQ ID NO: 74940 - DNA, 25 bp, Saccharomyces pastorianus
aacctgttgttgaaatcacctcgaa

SEQ ID NO: 74941 - DNA, 25 bp, Saccharomyces pastorianus
gagcgcatgacaaatccttattacc

SEQ ID NO: 74942 - DNA, 25 bp, Saccharomyces pastorianus
gttaccgacctgaccctggatgaag

SEQ ID NO: 74943 - DNA, 25 bp, Saccharomyces pastorianus
taagcggttggcctttgtccatctg

SEQ ID NO: 74944 - DNA, 25 bp, Saccharomyces pastorianus
atctggtcgagcctcgtgttaccga

SEQ ID NO: 74945 - DNA, 25 bp, Saccharomyces pastorianus
gttgcacccagatgccgtcaaagaa

SEQ ID NO: 74946 - DNA, 25 bp, Saccharomyces pastorianus
atcgcttacggcagattcttcattg

SEQ ID NO: 74947 - DNA, 25 bp, Saccharomyces pastorianus
actccatttggaaaggccctattgt

SEQ ID NO: 74948 - DNA, 25 bp, Saccharomyces pastorianus
gacagaacgttgatcgcttacggca

SEQ ID NO: 74949 - DNA, 25 bp, Saccharomyces pastorianus
acgatttcgcttactccatttggaa

SEQ ID NO: 74950 - DNA, 25 bp, Saccharomyces pastorianus
taaagccggtaactttgcgttgcac

SEQ ID NO: 74951 - DNA, 25 bp, Saccharomyces pastorianus
tgctcaatacgcttatgtcttgggc

SEQ ID NO: 74952 - DNA, 25 bp, Saccharomyces pastorianus
gaaggtagcaacgatttcgcttact

SEQ ID NO: 74953 - DNA, 25 bp, Saccharomyces pastorianus
taagaatgccgttttcttggccggc

SEQ ID NO: 74954 - DNA, 25 bp, Saccharomyces pastorianus
tagagacgggctgcgctacgattct

SEQ ID NO: 74955 - DNA, 25 bp, Saccharomyces pastorianus
atctggtctgacgagcaggttgctc

SEQ ID NO: 74956 - DNA, 25 bp, Saccharomyces pastorianus
gtggaagaacatcctcttggccatc

SEQ ID NO: 74957 - DNA, 25 bp, Saccharomyces pastorianus
agtactaccgtcagcgtgcgcagag

SEQ ID NO: 74958 - DNA, 25 bp, Saccharomyces pastorianus
aaagtcctttgcctgggtgcaactg

SEQ ID NO: 74959 - DNA, 25 bp, Saccharomyces pastorianus
aaggagtacgtacacgccgctaaga

SEQ ID NO: 74960 - DNA, 25 bp, Saccharomyces pastorianus
gagtacggcgggtccattgaaaaca

SEQ ID NO: 74961 - DNA, 25 bp, Saccharomyces pastorianus
atggctacttgctgaaccagttctt

SEQ ID NO: 74962 - DNA, 25 bp, Saccharomyces pastorianus
ggttggcttgaggtttgtctcccta

SEQ ID NO: 74963 - DNA, 25 bp, Saccharomyces pastorianus
ggcaccatgatcatcaccgagggta

SEQ ID NO: 74964 - DNA, 25 bp, Saccharomyces pastorianus
agaatggtcctgttgcaacacgctc

SEQ ID NO: 74965 - DNA, 25 bp, Saccharomyces pastorianus
gtcaacaagctttctcagtgtcaaa

SEQ ID NO: 74966 - DNA, 25 bp, Saccharomyces pastorianus
gatttacttcacagtctactctcag

SEQ ID NO: 74967 - DNA, 25 bp, Saccharomyces pastorianus
gtacgcaagttgcatcccaacagtg

SEQ ID NO: 74968 - DNA, 25 bp, Saccharomyces pastorianus
aatcgctacctgaagtgctggcatc

SEQ ID NO: 74969 - DNA, 25 bp, Saccharomyces pastorianus
ggcacactagaaacgtctcttttga

SEQ ID NO: 74970 - DNA, 25 bp, Saccharomyces pastorianus
aagacctcaagaagcttcccatgaa

SEQ ID NO: 74971 - DNA, 25 bp, Saccharomyces pastorianus
taggaccttcgtcacacaagatttg

SEQ ID NO: 74972 - DNA, 25 bp, Saccharomyces pastorianus
gtgcagatctgctattatgttcgga

SEQ ID NO: 74973 - DNA, 25 bp, Saccharomyces pastorianus
gtcaaaatccattccaatgcgctca

SEQ ID NO: 74974 - DNA, 25 bp, Saccharomyces pastorianus
gatcgtaccgaagctgacttattca

SEQ ID NO: 74975 - DNA, 25 bp, Saccharomyces pastorianus
atatggacgaagacctcgcacgcgg

SEQ ID NO: 74976 - DNA, 25 bp, Saccharomyces pastorianus
gaagacggcctcgacggctttgtat

SEQ ID NO: 74977 - DNA, 25 bp, Saccharomyces pastorianus
ttacccttgtacagccagtccacgg

SEQ ID NO: 74978 - DNA, 25 bp, Saccharomyces pastorianus
gccaaactggtacggccactactgc

SEQ ID NO: 74979 - DNA, 25 bp, Saccharomyces pastorianus
gtcaagttcgacttctcgttatttg

SEQ ID NO: 74980 - DNA, 25 bp, Saccharomyces pastorianus
ttccatcgccgtcagtcaagttcga

SEQ ID NO: 74981 - DNA, 25 bp, Saccharomyces pastorianus
accacctttggtgcagaggcagatg

SEQ ID NO: 74982 - DNA, 25 bp, Saccharomyces pastorianus
tcgcacgcggcttgctgttgctgtt

SEQ ID NO: 74983 - DNA, 25 bp, Saccharomyces pastorianus
gaaagggccgcattcgatatggacg

SEQ ID NO: 74984 - DNA, 25 bp, Saccharomyces pastorianus
gcaagttctcagtgcctgatccaaa

SEQ ID NO: 74985 - DNA, 25 bp, Saccharomyces pastorianus
ttgctgttgttgctactgtccacca

SEQ ID NO: 74986 - DNA, 25 bp, Saccharomyces pastorianus
gatggcagactcaaagaaacaaaca

SEQ ID NO: 74987 - DNA, 25 bp, Saccharomyces pastorianus
cacgccgatggcagactcaaagaaa

SEQ ID NO: 74988 - DNA, 25 bp, Saccharomyces pastorianus
aagaaaaggaacacgccgatggcag

SEQ ID NO: 74989 - DNA, 25 bp, Saccharomyces pastorianus
ttccttcctatctttttcatcctct

SEQ ID NO: 74990 - DNA, 25 bp, Saccharomyces pastorianus
ggaacacgccgatggcagactcaaa

SEQ ID NO: 74991 - DNA, 25 bp, Saccharomyces pastorianus
gccgatggcagactcaaagaaacaa

SEQ ID NO: 74992 - DNA, 25 bp, Saccharomyces pastorianus
tcttcccttattacagcgaaaagaa

SEQ ID NO: 74993 - DNA, 25 bp, Saccharomyces pastorianus
ttcctcttcttcccttgcgtttcta

SEQ ID NO: 74994 - DNA, 25 bp, Saccharomyces pastorianus
aaggaacacgccgatggcagactca

SEQ ID NO: 74995 - DNA, 25 bp, Saccharomyces pastorianus
cctcttcccttattacagcgaaaag

SEQ ID NO: 74996 - DNA, 25 bp, Saccharomyces pastorianus
ttttccttcctatctttttcatcct

SEQ ID NO: 74997 - DNA, 25 bp, Saccharomyces pastorianus
cctgtcgcttttcaacgggttggag

SEQ ID NO: 74998 - DNA, 25 bp, Saccharomyces pastorianus
ttctacgcgcctgcacaagataaag

SEQ ID NO: 74999 - DNA, 25 bp, Saccharomyces pastorianus
gctccgggcccctgaggaaatacaa

SEQ ID NO: 75000 - DNA, 25 bp, Saccharomyces pastorianus
gtggtcttcaccaatgtcatggatt

SEQ ID NO: 75001 - DNA, 25 bp, Saccharomyces pastorianus
aaaagtgctcgcctttactctctag

SEQ ID NO: 75002 - DNA, 25 bp, Saccharomyces pastorianus
gaatacgccgtttgatgtggtgaaa

SEQ ID NO: 75003 - DNA, 25 bp, Saccharomyces pastorianus
gtggcactgtcggatgtctattgaa

SEQ ID NO: 75004 - DNA, 25 bp, Saccharomyces pastorianus
aaaagtaatggtctgtccggcctca

SEQ ID NO: 75005 - DNA, 25 bp, Saccharomyces pastorianus
gtccgaaagatcttgccggcggcta

SEQ ID NO: 75006 - DNA, 25 bp, Saccharomyces pastorianus
acgacatgattgctggtgccatcgg

SEQ ID NO: 75007 - DNA, 25 bp, Saccharomyces pastorianus
atcctcgtctactacgtctacatta

SEQ ID NO: 75008 - DNA, 25 bp, Saccharomyces pastorianus
atggcgatcaaatgcaaggcttttt

SEQ ID NO: 75009 - DNA, 25 bp, Saccharomyces pastorianus
ggaacaaatcgaatctgcgctaagt

SEQ ID NO: 75010 - DNA, 25 bp, Saccharomyces pastorianus
ggtatgtaccaccttttaggagaag

SEQ ID NO: 75011 - DNA, 25 bp, Saccharomyces pastorianus
aactggacacgttcgctattttgaa

SEQ ID NO: 75012 - DNA, 25 bp, Saccharomyces pastorianus
aaatgtttgtacctatggattcgct

SEQ ID NO: 75013 - DNA, 25 bp, Saccharomyces pastorianus
gaaagctacagaggcgtcattcgtt

SEQ ID NO: 75014 - DNA, 25 bp, Saccharomyces pastorianus
tgataaaacttactccctggaacaa

SEQ ID NO: 75015 - DNA, 25 bp, Saccharomyces pastorianus
acatggtacgtgcatcagcacaata

SEQ ID NO: 75016 - DNA, 25 bp, Saccharomyces pastorianus
aacgatatcgttcctagcgttgata

SEQ ID NO: 75017 - DNA, 25 bp, Saccharomyces pastorianus
gaggcgtcattcgtttatccaatat

SEQ ID NO: 75018 - DNA, 25 bp, Saccharomyces pastorianus
tatggattcgcttgccattcgaaca

SEQ ID NO: 75019 - DNA, 25 bp, Saccharomyces pastorianus
gaagggctttttggacagacacaac

SEQ ID NO: 75020 - DNA, 25 bp, Saccharomyces pastorianus
agacacaacacctctgttcgattta

SEQ ID NO: 75021 - DNA, 25 bp, Saccharomyces pastorianus
tgttcgatttatgacaacccctcgt

SEQ ID NO: 75022 - DNA, 25 bp, Saccharomyces pastorianus
ggccaacatgtttctaattaagtat

SEQ ID NO: 75023 - DNA, 25 bp, Saccharomyces pastorianus
actatagactttgacgcactggcca

SEQ ID NO: 75024 - DNA, 25 bp, Saccharomyces pastorianus
gacgcactggccaacatgtttctaa

SEQ ID NO: 75025 - DNA, 25 bp, Saccharomyces pastorianus
tttagttcgttcaaaccagttggca

SEQ ID NO: 75026 - DNA, 25 bp, Saccharomyces pastorianus
atggacgtgctacctgacggaaata

SEQ ID NO: 75027 - DNA, 25 bp, Saccharomyces pastorianus
gatttatgacaacccctcgtggcac

SEQ ID NO: 75028 - DNA, 25 bp, Saccharomyces pastorianus
tacctgacggaaatactatagactt

SEQ ID NO: 75029 - DNA, 25 bp, Saccharomyces pastorianus
caaaccagttggcagaagggctttt

SEQ ID NO: 75030 - DNA, 25 bp, Saccharomyces pastorianus
atctatgggcattcaagggcccaat

SEQ ID NO: 75031 - DNA, 25 bp, Saccharomyces pastorianus
gtgaacaagcgtttgatcagccgta

SEQ ID NO: 75032 - DNA, 25 bp, Saccharomyces pastorianus
aatgtggatctgttgaggtctatga

SEQ ID NO: 75033 - DNA, 25 bp, Saccharomyces pastorianus
ggtgtaacttattcactttgattct

SEQ ID NO: 75034 - DNA, 25 bp, Saccharomyces pastorianus
gatgggtccatgttgattcttgtga

SEQ ID NO: 75035 - DNA, 25 bp, Saccharomyces pastorianus
attttgcaaaacgagctgcccagag

SEQ ID NO: 75036 - DNA, 25 bp, Saccharomyces pastorianus
aatgtcacgaggttcccacgctata

SEQ ID NO: 75037 - DNA, 25 bp, Saccharomyces pastorianus
gatcagccgtatatctactcggtta

SEQ ID NO: 75038 - DNA, 25 bp, Saccharomyces pastorianus
gatggtgttgttgacgtcagtaaaa

SEQ ID NO: 75039 - DNA, 25 bp, Saccharomyces pastorianus
gaatgtaaccagtgtcgcaatgtca

SEQ ID NO: 75040 - DNA, 25 bp, Saccharomyces pastorianus
gatccaatcaagctgttacaaacca

SEQ ID NO: 75041 - DNA, 25 bp, Saccharomyces pastorianus
agatttggctgtcttggctttggtc

SEQ ID NO: 75042 - DNA, 25 bp, Saccharomyces pastorianus
gaaagtccgtcagaggtgccattgt

SEQ ID NO: 75043 - DNA, 25 bp, Saccharomyces pastorianus
aaagtccgtcagaggtgccattgtt

SEQ ID NO: 75044 - DNA, 25 bp, Saccharomyces pastorianus
tgaacaagaattggaaggtctaact

SEQ ID NO: 75045 - DNA, 25 bp, Saccharomyces pastorianus
ccagatttggctgtcttggctttgg

SEQ ID NO: 75046 - DNA, 25 bp, Saccharomyces pastorianus
aagagaaagtccgtcagaggtgcca

SEQ ID NO: 75047 - DNA, 25 bp, Saccharomyces pastorianus
aagaattggaaggtctaactgacac

SEQ ID NO: 75048 - DNA, 25 bp, Saccharomyces pastorianus
atttggctgtcttggctttggtcat

SEQ ID NO: 75049 - DNA, 25 bp, Saccharomyces pastorianus
agtccgtcagaggtgccattgttgg

SEQ ID NO: 75050 - DNA, 25 bp, Saccharomyces pastorianus
aagtccgtcagaggtgccattgttg

SEQ ID NO: 75051 - DNA, 25 bp, Saccharomyces pastorianus
gagaaagtccgtcagaggtgccatt

SEQ ID NO: 75052 - DNA, 25 bp, Saccharomyces pastorianus
ggcagcccacacattgtttattatc

SEQ ID NO: 75053 - DNA, 25 bp, Saccharomyces pastorianus
ggtaatggcaaattttctgttcctt

SEQ ID NO: 75054 - DNA, 25 bp, Saccharomyces pastorianus
aaagggttccatcgattttgccaca

SEQ ID NO: 75055 - DNA, 25 bp, Saccharomyces pastorianus
atcgttgctgctgtgctgatcaata

SEQ ID NO: 75056 - DNA, 25 bp, Saccharomyces pastorianus
ccacctgtcgttcttgaatttttga

SEQ ID NO: 75057 - DNA, 25 bp, Saccharomyces pastorianus
aaaaggaatgactctggcagcccac

SEQ ID NO: 75058 - DNA, 25 bp, Saccharomyces pastorianus
gaagaagcgacatctataccacctg

SEQ ID NO: 75059 - DNA, 25 bp, Saccharomyces pastorianus
gaaatcacgacgaggctcttcgttt

SEQ ID NO: 75060 - DNA, 25 bp, Saccharomyces pastorianus
aatgtaccactttcagagcaaccag

SEQ ID NO: 75061 - DNA, 25 bp, Saccharomyces pastorianus
ggcagattcagacgtagtattccat

SEQ ID NO: 75062 - DNA, 25 bp, Saccharomyces pastorianus
gctcttcgtttagccttgagcaaga

SEQ ID NO: 75063 - DNA, 25 bp, Saccharomyces pastorianus
ttgctaaaccaatcgctgcgtcgag

SEQ ID NO: 75064 - DNA, 25 bp, Saccharomyces pastorianus
tattcgacttcttgatgccagggtt

SEQ ID NO: 75065 - DNA, 25 bp, Saccharomyces pastorianus
ctggtgtactagctttagaggcatt

SEQ ID NO: 75066 - DNA, 25 bp, Saccharomyces pastorianus
ataatctgtcctccatcgttgactg

SEQ ID NO: 75067 - DNA, 25 bp, Saccharomyces pastorianus
gatgtcgctagaaatgacctcgcag

SEQ ID NO: 75068 - DNA, 25 bp, Saccharomyces pastorianus
gaattcgaccaatatgctccgtttt

SEQ ID NO: 75069 - DNA, 25 bp, Saccharomyces pastorianus
gagaccacagttgaaagatgccgac

SEQ ID NO: 75070 - DNA, 25 bp, Saccharomyces pastorianus
gcggtccaactgtcagatcaacttt

SEQ ID NO: 75071 - DNA, 25 bp, Saccharomyces pastorianus
tgattttaaccggtactcctattca

SEQ ID NO: 75072 - DNA, 25 bp, Saccharomyces pastorianus
gctccgtttttgaaggttgtcattt

SEQ ID NO: 75073 - DNA, 25 bp, Saccharomyces pastorianus
ttgtcatttatgctggcggtccaac

SEQ ID NO: 75074 - DNA, 25 bp, Saccharomyces pastorianus
gtctgcacgaactacccaggacaat

SEQ ID NO: 75075 - DNA, 25 bp, Saccharomyces pastorianus
gttgtacgaccagtttccacaaggt

SEQ ID NO: 75076 - DNA, 25 bp, Saccharomyces pastorianus
gcaagccgatattccaagatctgtg

SEQ ID NO: 75077 - DNA, 25 bp, Saccharomyces pastorianus
ggacctgcaacgagaagcttgttca

SEQ ID NO: 75078 - DNA, 25 bp, Saccharomyces pastorianus
tttacaaccgttcaagtgccaatac

SEQ ID NO: 75079 - DNA, 25 bp, Saccharomyces pastorianus
aatatggcggtaacagtctgcacga

SEQ ID NO: 75080 - DNA, 25 bp, Saccharomyces pastorianus
tagcgtagatatacccctgcaaact

SEQ ID NO: 75081 - DNA, 25 bp, Saccharomyces pastorianus
attgctagccgcgagttggaacaaa

SEQ ID NO: 75082 - DNA, 25 bp, Saccharomyces pastorianus
gtgaatccctataccagaagccgag

SEQ ID NO: 75083 - DNA, 25 bp, Saccharomyces pastorianus
gaagtacgacctatagttgacagac

SEQ ID NO: 75084 - DNA, 25 bp, Saccharomyces pastorianus
agaagccgagggtttcggccatctt

SEQ ID NO: 75085 - DNA, 25 bp, Saccharomyces pastorianus
accagatcgaaacggcgctcgcctc

SEQ ID NO: 75086 - DNA, 25 bp, Saccharomyces pastorianus
gctcgcctcatctccatgggaaaaa

SEQ ID NO: 75087 - DNA, 25 bp, Saccharomyces pastorianus
tccatgggaaaaaagctggcagcaa

SEQ ID NO: 75088 - DNA, 25 bp, Saccharomyces pastorianus
ctcgcctcatctccatgggaaaaaa

SEQ ID NO: 75089 - DNA, 25 bp, Saccharomyces pastorianus
cgcgccgcggagctgtgagaagata

SEQ ID NO: 75090 - DNA, 25 bp, Saccharomyces pastorianus
catctccatgggaaaaaagctggca

SEQ ID NO: 75091 - DNA, 25 bp, Saccharomyces pastorianus
aagctggcagcaaagagaagaacga

SEQ ID NO: 75092 - DNA, 25 bp, Saccharomyces pastorianus
gcctcatctccatgggaaaaaagct

SEQ ID NO: 75093 - DNA, 25 bp, Saccharomyces pastorianus
aaaagagggtggccgcgccgcggag

SEQ ID NO: 75094 - DNA, 25 bp, Saccharomyces pastorianus
tcgcctcatctccatgggaaaaaag

SEQ ID NO: 75095 - DNA, 25 bp, Saccharomyces pastorianus
gaagaacgagctcaaatcaaaagcc

SEQ ID NO: 75096 - DNA, 25 bp, Saccharomyces pastorianus
ggtagacggaagtttaactggccag

SEQ ID NO: 75097 - DNA, 25 bp, Saccharomyces pastorianus
tgaagaaccccaagaaagtcacgga

SEQ ID NO: 75098 - DNA, 25 bp, Saccharomyces pastorianus
gtttaactggccaggaggcagagtt

SEQ ID NO: 75099 - DNA, 25 bp, Saccharomyces pastorianus
cagagcgtttgagaacagcaggcga

SEQ ID NO: 75100 - DNA, 25 bp, Saccharomyces pastorianus
gacacgaagagtggcagcagctgca

SEQ ID NO: 75101 - DNA, 25 bp, Saccharomyces pastorianus
gcagctgcagcattaggagtccggt

SEQ ID NO: 75102 - DNA, 25 bp, Saccharomyces pastorianus
gcaggcgagagtacgtctgtagcta

SEQ ID NO: 75103 - DNA, 25 bp, Saccharomyces pastorianus
tctgtagctagagcgtcgtacccga

SEQ ID NO: 75104 - DNA, 25 bp, Saccharomyces pastorianus
agaggaagttccagccgttgaagaa

SEQ ID NO: 75105 - DNA, 25 bp, Saccharomyces pastorianus
ggctgtgtcagagcgtttgagaaca

SEQ ID NO: 75106 - DNA, 25 bp, Saccharomyces pastorianus
gtcgtacccgactggagatgtggaa

SEQ ID NO: 75107 - DNA, 25 bp, Saccharomyces pastorianus
agttccaggcagtccatacaggtga

SEQ ID NO: 75108 - DNA, 25 bp, Saccharomyces pastorianus
tccagtgtgggctcgagtgcaaatg

SEQ ID NO: 75109 - DNA, 25 bp, Saccharomyces pastorianus
aacgcacagatttgggccctgcaga

SEQ ID NO: 75110 - DNA, 25 bp, Saccharomyces pastorianus
ggtgccaccggctacagaaataaaa

SEQ ID NO: 75111 - DNA, 25 bp, Saccharomyces pastorianus
aagcccatgatgacgccctacggtt

SEQ ID NO: 75112 - DNA, 25 bp, Saccharomyces pastorianus
gagtggcacagcttccgccgggaaa

SEQ ID NO: 75113 - DNA, 25 bp, Saccharomyces pastorianus
taacactggcgccaactacgggaag

SEQ ID NO: 75114 - DNA, 25 bp, Saccharomyces pastorianus
gtgaacgacttttcggactcgccat

SEQ ID NO: 75115 - DNA, 25 bp, Saccharomyces pastorianus
gaaccgctacataatgtctccgtat

SEQ ID NO: 75116 - DNA, 25 bp, Saccharomyces pastorianus
gtatgatgaccgcaatgaaccctta

SEQ ID NO: 75117 - DNA, 25 bp, Saccharomyces pastorianus
gaaggctcaggcaactccagtgtgg

SEQ ID NO: 75118 - DNA, 25 bp, Saccharomyces pastorianus
atagtagcttcaacaacagtaccgt

SEQ ID NO: 75119 - DNA, 25 bp, Saccharomyces pastorianus
ttttcaatttggtgggatcacggca

SEQ ID NO: 75120 - DNA, 25 bp, Saccharomyces pastorianus
agcttcaacaacagtaccgtatcta

SEQ ID NO: 75121 - DNA, 25 bp, Saccharomyces pastorianus
aacttaggcttaccctttagcatag

SEQ ID NO: 75122 - DNA, 25 bp, Saccharomyces pastorianus
gcagctccatggcatattcctaatg

SEQ ID NO: 75123 - DNA, 25 bp, Saccharomyces pastorianus
taatgattaacttaggcttaccctt

SEQ ID NO: 75124 - DNA, 25 bp, Saccharomyces pastorianus
cttaccctttagcatagagtcttca

SEQ ID NO: 75125 - DNA, 25 bp, Saccharomyces pastorianus
tgggatcacggcagctccatggcat

SEQ ID NO: 75126 - DNA, 25 bp, Saccharomyces pastorianus
cagtaccgtatctaccaaaaatctt

SEQ ID NO: 75127 - DNA, 25 bp, Saccharomyces pastorianus
gctccatggcatattcctaatgatt

SEQ ID NO: 75128 - DNA, 25 bp, Saccharomyces pastorianus
aatttggtgggatcacggcagctcc

SEQ ID NO: 75129 - DNA, 25 bp, Saccharomyces pastorianus
gggctccattgttcgtcttgaaaac

SEQ ID NO: 75130 - DNA, 25 bp, Saccharomyces pastorianus
tggtggcgacatgccaggctcacaa

SEQ ID NO: 75131 - DNA, 25 bp, Saccharomyces pastorianus
aaactgtcgaggaagaccacccaat

SEQ ID NO: 75132 - DNA, 25 bp, Saccharomyces pastorianus
tacaatgctgaaaggctgggtctag

SEQ ID NO: 75133 - DNA, 25 bp, Saccharomyces pastorianus
gtatccaaaggccaaagatgctctt

SEQ ID NO: 75134 - DNA, 25 bp, Saccharomyces pastorianus
taacgaggctaggaacctgggtttg

SEQ ID NO: 75135 - DNA, 25 bp, Saccharomyces pastorianus
gatgctcttaccaagtacaaggtct

SEQ ID NO: 75136 - DNA, 25 bp, Saccharomyces pastorianus
caggctcacaactggctgattttgt

SEQ ID NO: 75137 - DNA, 25 bp, Saccharomyces pastorianus
taccgctatcgtcgagtctccagaa

SEQ ID NO: 75138 - DNA, 25 bp, Saccharomyces pastorianus
ctgtctctaagaaggttaccgctat

SEQ ID NO: 75139 - DNA, 25 bp, Saccharomyces pastorianus
tgacgccgttggtatcgccaaggaa

SEQ ID NO: 75140 - DNA, 25 bp, Saccharomyces pastorianus
attagcttccctggcacaacaggca

SEQ ID NO: 75141 - DNA, 25 bp, Saccharomyces pastorianus
gaggcaccactgcagagaagactct

SEQ ID NO: 75142 - DNA, 25 bp, Saccharomyces pastorianus
gcatcgtatgactgccctagatccg

SEQ ID NO: 75143 - DNA, 25 bp, Saccharomyces pastorianus
ttcgaggcgatccacctattggaga

SEQ ID NO: 75144 - DNA, 25 bp, Saccharomyces pastorianus
ctataccatgagaggacttccccat

SEQ ID NO: 75145 - DNA, 25 bp, Saccharomyces pastorianus
ggacttccccatttatatcactgga

SEQ ID NO: 75146 - DNA, 25 bp, Saccharomyces pastorianus
tagatccgctgtttatcaccgtcac

SEQ ID NO: 75147 - DNA, 25 bp, Saccharomyces pastorianus
aaaacattttggcacttcgaggcga

SEQ ID NO: 75148 - DNA, 25 bp, Saccharomyces pastorianus
tacgcagtcgatttagtccgctaca

SEQ ID NO: 75149 - DNA, 25 bp, Saccharomyces pastorianus
gtcgccgcctatcctgaaggacatt

SEQ ID NO: 75150 - DNA, 25 bp, Saccharomyces pastorianus
gaagactggctagattcacaatcaa

SEQ ID NO: 75151 - DNA, 25 bp, Saccharomyces pastorianus
tctgcacaaaagaacatgggtttaa

SEQ ID NO: 75152 - DNA, 25 bp, Saccharomyces pastorianus
cacaaaagaacatgggtttaaatct

SEQ ID NO: 75153 - DNA, 25 bp, Saccharomyces pastorianus
aatctgcacaaaagaacatgggttt

SEQ ID NO: 75154 - DNA, 25 bp, Saccharomyces pastorianus
aaatctgcacaaaagaacatgggtt

SEQ ID NO: 75155 - DNA, 25 bp, Saccharomyces pastorianus
gcacaaaagaacatgggtttaaatc

SEQ ID NO: 75156 - DNA, 25 bp, Saccharomyces pastorianus
catgggtttaaatctttaattaatg

SEQ ID NO: 75157 - DNA, 25 bp, Saccharomyces pastorianus
aaaatctgcacaaaagaacatgggt

SEQ ID NO: 75158 - DNA, 25 bp, Saccharomyces pastorianus
tgcacaaaagaacatgggtttaaat

SEQ ID NO: 75159 - DNA, 25 bp, Saccharomyces pastorianus
atctgcacaaaagaacatgggttta

SEQ ID NO: 75160 - DNA, 25 bp, Saccharomyces pastorianus
ctgcacaaaagaacatgggtttaaa

SEQ ID NO: 75161 - DNA, 25 bp, Saccharomyces pastorianus
gaaggacttgcttcgactttttgat

SEQ ID NO: 75162 - DNA, 25 bp, Saccharomyces pastorianus
gatattttcaatcactcaaagcgga

SEQ ID NO: 75163 - DNA, 25 bp, Saccharomyces pastorianus
gtccaaacgaagcaatcccgagcta

SEQ ID NO: 75164 - DNA, 25 bp, Saccharomyces pastorianus
acaaccgtaccaatagatcctttca

SEQ ID NO: 75165 - DNA, 25 bp, Saccharomyces pastorianus
gcacgttctcgctaggtacagtaac

SEQ ID NO: 75166 - DNA, 25 bp, Saccharomyces pastorianus
gagaaaattcgtaggcccactcata

SEQ ID NO: 75167 - DNA, 25 bp, Saccharomyces pastorianus
atagatcctttcaaagaccccaggc

SEQ ID NO: 75168 - DNA, 25 bp, Saccharomyces pastorianus
ttgatggtctatccggcgccaagag

SEQ ID NO: 75169 - DNA, 25 bp, Saccharomyces pastorianus
caaacaccgaactctagtcaatctc

SEQ ID NO: 75170 - DNA, 25 bp, Saccharomyces pastorianus
ggcccactcataccaacaatttgtt

SEQ ID NO: 75171 - DNA, 25 bp, Saccharomyces pastorianus
tggcattcaagatagcacgttctcg

SEQ ID NO: 75172 - DNA, 25 bp, Saccharomyces pastorianus
ttctcgtctcccatcagcggcatga

SEQ ID NO: 75173 - DNA, 25 bp, Saccharomyces pastorianus
agcggcatgatcgtctgctgctcaa

SEQ ID NO: 75174 - DNA, 25 bp, Saccharomyces pastorianus
agtttctctctttcctccgcgctag

SEQ ID NO: 75175 - DNA, 25 bp, Saccharomyces pastorianus
gcgctaggctcatcagggaacctcg

SEQ ID NO: 75176 - DNA, 25 bp, Saccharomyces pastorianus
atcagggaacctcgccagcagcgtg

SEQ ID NO: 75177 - DNA, 25 bp, Saccharomyces pastorianus
aacctcgccagcagcgtgtggaagt

SEQ ID NO: 75178 - DNA, 25 bp, Saccharomyces pastorianus
atgatcgtctgctgctcaatctcct

SEQ ID NO: 75179 - DNA, 25 bp, Saccharomyces pastorianus
ctccgcgctaggctcatcagggaac

SEQ ID NO: 75180 - DNA, 25 bp, Saccharomyces pastorianus
ctcgccagcagcgtgtggaagtact

SEQ ID NO: 75181 - DNA, 25 bp, Saccharomyces pastorianus
tgctgctcaatctccttcagccggg

SEQ ID NO: 75182 - DNA, 25 bp, Saccharomyces pastorianus
aacgtggccagtttctctctttcct

SEQ ID NO: 75183 - DNA, 25 bp, Saccharomyces pastorianus
tattcattcagtggcaacctatagg

SEQ ID NO: 75184 - DNA, 25 bp, Saccharomyces pastorianus
attttgcttgcagtttttcttgtta

SEQ ID NO: 75185 - DNA, 25 bp, Saccharomyces pastorianus
gaaacatcccaagtggtctaagtat

SEQ ID NO: 75186 - DNA, 25 bp, Saccharomyces pastorianus
gagaattaggtgctctcgttgtgat

SEQ ID NO: 75187 - DNA, 25 bp, Saccharomyces pastorianus
agaagagcttggacgggtcccacta

SEQ ID NO: 75188 - DNA, 25 bp, Saccharomyces pastorianus
tacaaccgtcaagatgcacgagaat

SEQ ID NO: 75189 - DNA, 25 bp, Saccharomyces pastorianus
aagaagaacatacaaccgtcaagat

SEQ ID NO: 75190 - DNA, 25 bp, Saccharomyces pastorianus
agcctcatttaatatattcattcag

SEQ ID NO: 75191 - DNA, 25 bp, Saccharomyces pastorianus
ccactatacccatttctctttggtg

SEQ ID NO: 75192 - DNA, 25 bp, Saccharomyces pastorianus
tcttgttatatgtttctttagcctc

SEQ ID NO: 75193 - DNA, 25 bp, Saccharomyces pastorianus
catttctctttggtgccgcactgat

SEQ ID NO: 75194 - DNA, 25 bp, Saccharomyces pastorianus
ccaccactagcgatcagacttacta

SEQ ID NO: 75195 - DNA, 25 bp, Saccharomyces pastorianus
gaacactcaattgtaccagatgcaa

SEQ ID NO: 75196 - DNA, 25 bp, Saccharomyces pastorianus
taccagatgcaatattttttacttt

SEQ ID NO: 75197 - DNA, 25 bp, Saccharomyces pastorianus
acttttgtatttgaacatcctgaga

SEQ ID NO: 75198 - DNA, 25 bp, Saccharomyces pastorianus
gacttactaccaaagcaatgagatg

SEQ ID NO: 75199 - DNA, 25 bp, Saccharomyces pastorianus
aaggatgaagctcctccaccactag

SEQ ID NO: 75200 - DNA, 25 bp, Saccharomyces pastorianus
agagaaggatgaagctcctccacca

SEQ ID NO: 75201 - DNA, 25 bp, Saccharomyces pastorianus
gctaaagtcactatcacagagaagg

SEQ ID NO: 75202 - DNA, 25 bp, Saccharomyces pastorianus
tagcgatcagacttactaccaaagc

SEQ ID NO: 75203 - DNA, 25 bp, Saccharomyces pastorianus
ggtgaaaatgctcgaacactcaatt

SEQ ID NO: 75204 - DNA, 25 bp, Saccharomyces pastorianus
atgctcgaacactcaattgtaccag

SEQ ID NO: 75205 - DNA, 25 bp, Saccharomyces pastorianus
gaaatcccagcgggtacccggcgcg

SEQ ID NO: 75206 - DNA, 25 bp, Saccharomyces pastorianus
atatagtgcacgtgcttttaggccc

SEQ ID NO: 75207 - DNA, 25 bp, Saccharomyces pastorianus
gtgcacgtgcttttaggcccgctgg

SEQ ID NO: 75208 - DNA, 25 bp, Saccharomyces pastorianus
tatagtgcacgtgcttttaggcccg

SEQ ID NO: 75209 - DNA, 25 bp, Saccharomyces pastorianus
agtgcacgtgcttttaggcccgctg

SEQ ID NO: 75210 - DNA, 25 bp, Saccharomyces pastorianus
cacgtgcttttaggcccgctggcag

SEQ ID NO: 75211 - DNA, 25 bp, Saccharomyces pastorianus
tagtgcacgtgcttttaggcccgct

SEQ ID NO: 75212 - DNA, 25 bp, Saccharomyces pastorianus
agagagataatagcggtgggaaaac

SEQ ID NO: 75213 - DNA, 25 bp, Saccharomyces pastorianus
atagtgcacgtgcttttaggcccgc

SEQ ID NO: 75214 - DNA, 25 bp, Saccharomyces pastorianus
tgcacgtgcttttaggcccgctggc

SEQ ID NO: 75215 - DNA, 25 bp, Saccharomyces pastorianus
gatatagtgcacgtgcttttaggcc

SEQ ID NO: 75216 - DNA, 25 bp, Saccharomyces pastorianus
atcattggagtcacactgggcgtta

SEQ ID NO: 75217 - DNA, 25 bp, Saccharomyces pastorianus
gcagcccagctcacaactaaatggt

SEQ ID NO: 75218 - DNA, 25 bp, Saccharomyces pastorianus
ttacatccccggtgtgacaagcgca

SEQ ID NO: 75219 - DNA, 25 bp, Saccharomyces pastorianus
gatcacatatcacgttgggctcatc

SEQ ID NO: 75220 - DNA, 25 bp, Saccharomyces pastorianus
gcagccggcgacattagatcacata

SEQ ID NO: 75221 - DNA, 25 bp, Saccharomyces pastorianus
taatatcctgcccattgcttacatc

SEQ ID NO: 75222 - DNA, 25 bp, Saccharomyces pastorianus
gcgcacaagggcctctaatatcctg

SEQ ID NO: 75223 - DNA, 25 bp, Saccharomyces pastorianus
agttgcagtcaaagctacgttcgag

SEQ ID NO: 75224 - DNA, 25 bp, Saccharomyces pastorianus
attacaccaagttcaatgcgccatt

SEQ ID NO: 75225 - DNA, 25 bp, Saccharomyces pastorianus
atagaagttctacatccactacgcg

SEQ ID NO: 75226 - DNA, 25 bp, Saccharomyces pastorianus
aagcgcactgactgctgagaagttg

SEQ ID NO: 75227 - DNA, 25 bp, Saccharomyces pastorianus
tgattactggtacttctcaagctga

SEQ ID NO: 75228 - DNA, 25 bp, Saccharomyces pastorianus
tggtaagtctaccactaccggtcat

SEQ ID NO: 75229 - DNA, 25 bp, Saccharomyces pastorianus
gtattgacaagagaaccatcgaaaa

SEQ ID NO: 75230 - DNA, 25 bp, Saccharomyces pastorianus
aagttaccgttattgatgctccagg

SEQ ID NO: 75231 - DNA, 25 bp, Saccharomyces pastorianus
accactaccggtcatttgatttaca

SEQ ID NO: 75232 - DNA, 25 bp, Saccharomyces pastorianus
gtcgttatcggtcatgtcgattctg

SEQ ID NO: 75233 - DNA, 25 bp, Saccharomyces pastorianus
cggtcatgtcgattctggtaagtct

SEQ ID NO: 75234 - DNA, 25 bp, Saccharomyces pastorianus
gtgtcggtgaattcgaagccggtat

SEQ ID NO: 75235 - DNA, 25 bp, Saccharomyces pastorianus
gtaagggttctttcaagtacgcttg

SEQ ID NO: 75236 - DNA, 25 bp, Saccharomyces pastorianus
gatgctccaggtcacagagatttca

SEQ ID NO: 75237 - DNA, 25 bp, Saccharomyces pastorianus
gctttgtggaagttcgaaactccaa

SEQ ID NO: 75238 - DNA, 25 bp, Saccharomyces pastorianus
ccagttcgacttaataatgtgtttg

SEQ ID NO: 75239 - DNA, 25 bp, Saccharomyces pastorianus
gtttgaaacagcctggcacacagat

SEQ ID NO: 75240 - DNA, 25 bp, Saccharomyces pastorianus
acagcctggcacacagataggcctt

SEQ ID NO: 75241 - DNA, 25 bp, Saccharomyces pastorianus
gataggccttctttgcgaaaaatgt

SEQ ID NO: 75242 - DNA, 25 bp, Saccharomyces pastorianus
acacagataggccttctttgcgaaa

SEQ ID NO: 75243 - DNA, 25 bp, Saccharomyces pastorianus
cctggcacacagataggccttcttt

SEQ ID NO: 75244 - DNA, 25 bp, Saccharomyces pastorianus
aatgtgtttgaaacagcctggcaca

SEQ ID NO: 75245 - DNA, 25 bp, Saccharomyces pastorianus
ggcacacagataggccttctttgcg

SEQ ID NO: 75246 - DNA, 25 bp, Saccharomyces pastorianus
acagataggccttctttgcgaaaaa

SEQ ID NO: 75247 - DNA, 25 bp, Saccharomyces pastorianus
cgccaccagttcgacttaataatgt

SEQ ID NO: 75248 - DNA, 25 bp, Saccharomyces pastorianus
taggccttctttgcgaaaaatgtga

SEQ ID NO: 75249 - DNA, 25 bp, Saccharomyces pastorianus
tataattgtcaagggcaagggtccc

SEQ ID NO: 75250 - DNA, 25 bp, Saccharomyces pastorianus
gggactgctgacgtcaacttattag

SEQ ID NO: 75251 - DNA, 25 bp, Saccharomyces pastorianus
gtatcaagggacttccagaggaatt

SEQ ID NO: 75252 - DNA, 25 bp, Saccharomyces pastorianus
gatacttctagatacgtaccgcacg

SEQ ID NO: 75253 - DNA, 25 bp, Saccharomyces pastorianus
gagtgtgttcatcccgaagtacgag

SEQ ID NO: 75254 - DNA, 25 bp, Saccharomyces pastorianus
taacggactcctacttaaaacatca

SEQ ID NO: 75255 - DNA, 25 bp, Saccharomyces pastorianus
tacaaacgccaatatcccaggatag

SEQ ID NO: 75256 - DNA, 25 bp, Saccharomyces pastorianus
gaagtacctgttagttttagcgaga

SEQ ID NO: 75257 - DNA, 25 bp, Saccharomyces pastorianus
tgccgcggactgtgtcgaaccagtg

SEQ ID NO: 75258 - DNA, 25 bp, Saccharomyces pastorianus
gatacgtaccgcacgggactgctga

SEQ ID NO: 75259 - DNA, 25 bp, Saccharomyces pastorianus
ttaactttaagcacgcttctgccgc

SEQ ID NO: 75260 - DNA, 25 bp, Saccharomyces pastorianus
acagaagatgactcccatgtacagg

SEQ ID NO: 75261 - DNA, 25 bp, Saccharomyces pastorianus
gacgagtattctgctttcaacaaca

SEQ ID NO: 75262 - DNA, 25 bp, Saccharomyces pastorianus
caggtctctgattttgactggttca

SEQ ID NO: 75263 - DNA, 25 bp, Saccharomyces pastorianus
gaagccaagttcacaagtaacatcg

SEQ ID NO: 75264 - DNA, 25 bp, Saccharomyces pastorianus
caagagataagttggccgcagccgc

SEQ ID NO: 75265 - DNA, 25 bp, Saccharomyces pastorianus
attggcacatgctttggctttgaaa

SEQ ID NO: 75266 - DNA, 25 bp, Saccharomyces pastorianus
gaagcctcgcccaaaatgagcaggt

SEQ ID NO: 75267 - DNA, 25 bp, Saccharomyces pastorianus
aataagcacaccaacatcgatgaag

SEQ ID NO: 75268 - DNA, 25 bp, Saccharomyces pastorianus
tggagaacgccaacgcaaccatggg

SEQ ID NO: 75269 - DNA, 25 bp, Saccharomyces pastorianus
gactggttcaaacaacgtcgtatca

SEQ ID NO: 75270 - DNA, 25 bp, Saccharomyces pastorianus
gggaactctttattggcacatgctt

SEQ ID NO: 75271 - DNA, 25 bp, Saccharomyces pastorianus
caacatcttctttcaatctcgatgc

SEQ ID NO: 75272 - DNA, 25 bp, Saccharomyces pastorianus
aaagactcgtccttgttgttcagca

SEQ ID NO: 75273 - DNA, 25 bp, Saccharomyces pastorianus
tttcaatctcgatgcaatgatatcc

SEQ ID NO: 75274 - DNA, 25 bp, Saccharomyces pastorianus
atgcaggtaggatttttttctccta

SEQ ID NO: 75275 - DNA, 25 bp, Saccharomyces pastorianus
tctggtaaaggttttctttgcttcg

SEQ ID NO: 75276 - DNA, 25 bp, Saccharomyces pastorianus
agaagtttatcagcaaaatgtctaa

SEQ ID NO: 75277 - DNA, 25 bp, Saccharomyces pastorianus
gactcgtccttgttgttcagcaaca

SEQ ID NO: 75278 - DNA, 25 bp, Saccharomyces pastorianus
aatgtctaaagactcgtccttgttg

SEQ ID NO: 75279 - DNA, 25 bp, Saccharomyces pastorianus
gtccttgttgttcagcaacatcttc

SEQ ID NO: 75280 - DNA, 25 bp, Saccharomyces pastorianus
atcttctttcaatctcgatgcaatg

SEQ ID NO: 75281 - DNA, 25 bp, Saccharomyces pastorianus
tctcctactctggtaaaggttttct

SEQ ID NO: 75282 - DNA, 25 bp, Saccharomyces pastorianus
gaattcattgatccttcactggcca

SEQ ID NO: 75283 - DNA, 25 bp, Saccharomyces pastorianus
gaattctttgatttcatcctagcag

SEQ ID NO: 75284 - DNA, 25 bp, Saccharomyces pastorianus
gaatgtgctgctcggtctaatattg

SEQ ID NO: 75285 - DNA, 25 bp, Saccharomyces pastorianus
actgtaaatttcatgttcgccgagg

SEQ ID NO: 75286 - DNA, 25 bp, Saccharomyces pastorianus
aatgacccttgcgatggccaaagat

SEQ ID NO: 75287 - DNA, 25 bp, Saccharomyces pastorianus
gatatcaagctttacggccacgaag

SEQ ID NO: 75288 - DNA, 25 bp, Saccharomyces pastorianus
gttgttgcgctaccattgattctaa

SEQ ID NO: 75289 - DNA, 25 bp, Saccharomyces pastorianus
aagtcgccggactagaccaattgag

SEQ ID NO: 75290 - DNA, 25 bp, Saccharomyces pastorianus
aacacagtcaggaagcccagttcga

SEQ ID NO: 75291 - DNA, 25 bp, Saccharomyces pastorianus
gttcgatggcgacagcgtgttcaat

SEQ ID NO: 75292 - DNA, 25 bp, Saccharomyces pastorianus
ttggaagccctgtcagcagtgctgt

SEQ ID NO: 75293 - DNA, 25 bp, Saccharomyces pastorianus
gagaagtcagcagaaccatcgtcat

SEQ ID NO: 75294 - DNA, 25 bp, Saccharomyces pastorianus
tgatagggtcctttctgtcatatgc

SEQ ID NO: 75295 - DNA, 25 bp, Saccharomyces pastorianus
gtattctagcttttctgtttcagtt

SEQ ID NO: 75296 - DNA, 25 bp, Saccharomyces pastorianus
ttttcggctagcatttcctttttgg

SEQ ID NO: 75297 - DNA, 25 bp, Saccharomyces pastorianus
ctgtcatatgccttcaagtgcgatg

SEQ ID NO: 75298 - DNA, 25 bp, Saccharomyces pastorianus
gtcatgcttacttttcttcgatttc

SEQ ID NO: 75299 - DNA, 25 bp, Saccharomyces pastorianus
gaataatatcccgttttctagcttt

SEQ ID NO: 75300 - DNA, 25 bp, Saccharomyces pastorianus
agcacttttttatttctggccatga

SEQ ID NO: 75301 - DNA, 25 bp, Saccharomyces pastorianus
tgacatttccagattttccttctcc

SEQ ID NO: 75302 - DNA, 25 bp, Saccharomyces pastorianus
gtttcagtttgtttcagcacttttt

SEQ ID NO: 75303 - DNA, 25 bp, Saccharomyces pastorianus
ttcctttttggccttgtattctagc

SEQ ID NO: 75304 - DNA, 25 bp, Saccharomyces pastorianus
tcctatcggcgtttggtgtggtgat

SEQ ID NO: 75305 - DNA, 25 bp, Saccharomyces pastorianus
ctttccgtgattgctcatatgttta

SEQ ID NO: 75306 - DNA, 25 bp, Saccharomyces pastorianus
gattctttccgtgattgctcatatg

SEQ ID NO: 75307 - DNA, 25 bp, Saccharomyces pastorianus
gtggtgattctttccgtgattgctc

SEQ ID NO: 75308 - DNA, 25 bp, Saccharomyces pastorianus
gtgattgctcatatgtttaacacaa

SEQ ID NO: 75309 - DNA, 25 bp, Saccharomyces pastorianus
gctcatatgtttaacacaaaccatg

SEQ ID NO: 75310 - DNA, 25 bp, Saccharomyces pastorianus
cggcgtttggtgtggtgattctttc

SEQ ID NO: 75311 - DNA, 25 bp, Saccharomyces pastorianus
atgaaacctgttgtatccactggca

SEQ ID NO: 75312 - DNA, 25 bp, Saccharomyces pastorianus
ttggtgtggtgattctttccgtgat

SEQ ID NO: 75313 - DNA, 25 bp, Saccharomyces pastorianus
aacctgttgtatccactggcaaggc

SEQ ID NO: 75314 - DNA, 25 bp, Saccharomyces pastorianus
gaaacctgttgtatccactggcaag

SEQ ID NO: 75315 - DNA, 25 bp, Saccharomyces pastorianus
ttatatcctttcttataccctttct

SEQ ID NO: 75316 - DNA, 25 bp, Saccharomyces pastorianus
ctgttttcgttaccttccacgatct

SEQ ID NO: 75317 - DNA, 25 bp, Saccharomyces pastorianus
tgttttcgttaccttccacgatctc

SEQ ID NO: 75318 - DNA, 25 bp, Saccharomyces pastorianus
ttctgttttcgttaccttccacgat

SEQ ID NO: 75319 - DNA, 25 bp, Saccharomyces pastorianus
atatcctttcttataccctttctgt

SEQ ID NO: 75320 - DNA, 25 bp, Saccharomyces pastorianus
tctgttttcgttaccttccacgatc

SEQ ID NO: 75321 - DNA, 25 bp, Saccharomyces pastorianus
tatcctttcttataccctttctgtt

SEQ ID NO: 75322 - DNA, 25 bp, Saccharomyces pastorianus
tatatcctttcttataccctttctg

SEQ ID NO: 75323 - DNA, 25 bp, Saccharomyces pastorianus
tgttatatcctttcttatacccttt

SEQ ID NO: 75324 - DNA, 25 bp, Saccharomyces pastorianus
atgttatatcctttcttataccctt

SEQ ID NO: 75325 - DNA, 25 bp, Saccharomyces pastorianus
gttttcgttaccttccacgatctct

SEQ ID NO: 75326 - DNA, 25 bp, Saccharomyces pastorianus
aactagaagttggaagcagctctaa

SEQ ID NO: 75327 - DNA, 25 bp, Saccharomyces pastorianus
gatgatcatttacaattcttcttga

SEQ ID NO: 75328 - DNA, 25 bp, Saccharomyces pastorianus
gaagaaaaatttagcggctcaaggt

SEQ ID NO: 75329 - DNA, 25 bp, Saccharomyces pastorianus
gaaacttggagacgctgagactatc

SEQ ID NO: 75330 - DNA, 25 bp, Saccharomyces pastorianus
ttatcaatatcaagagtacgtactc

SEQ ID NO: 75331 - DNA, 25 bp, Saccharomyces pastorianus
aatggcgaagagacaagcaagcttg

SEQ ID NO: 75332 - DNA, 25 bp, Saccharomyces pastorianus
gaagcagctctaagttatcccaaat

SEQ ID NO: 75333 - DNA, 25 bp, Saccharomyces pastorianus
gttagtagaacaattgtccaagaca

SEQ ID NO: 75334 - DNA, 25 bp, Saccharomyces pastorianus
gctcaaggtgaaagattcgccaaat

SEQ ID NO: 75335 - DNA, 25 bp, Saccharomyces pastorianus
agactatcaaggaagaactgcggga

SEQ ID NO: 75336 - DNA, 25 bp, Saccharomyces pastorianus
gagtacgtactcagaatggtaatat

SEQ ID NO: 75337 - DNA, 402 bp, Saccharomyces pastorianus
atggcaggtgaagtagtttcggaacacacaccagattcgcaggaagtaacagtaactagcgtagtttgttgcttcgattctgtggtggaaataggacaccatgttgtgtattctgtggtaacgtcgttaatagtagcagtgcttgtagacacaatggctggagaagcagtcttagagcatatgtcagattcacaagaagaaattgtaactactgtggtttgttttgttgtttctgtggtttgctctgttgtccccttggtttgctttgttgtctccgtagtttgctttgttatctctgtggtagaaatagggcaccatgtggtatactctgttgtgacgccgctaacagtaacggtggccgtggaaacaatcgcagaggagatggattcagtacacacatga

SEQ ID NO: 75338 - DNA, 1254 bp, Saccharomyces pastorianus
atgagagccttagagtatttcggtaaaggtaacatcagattcaccaaccatttaaaggagccacgtattgtggcgcccgatgagcttgtgattgatatcgcatggtgtggtatttgcggtacggacctgcatgagtacacagatggtcctatctttttcccagaggatggacacacacatgagattagtcataacccattgccacaggcgatgggccacgaaatggctggtaccgttttggaagtgggccctggtgtgaaaaacttgaaagtgggagacaaggtagttgtcgagcccacaggtacatgcagagaccggtatcgctggcccctgtcgccaaacgttgacaaggaatggtgcgctgcttgcaaaaagggctactataacatttgttcatatttggggctttgtggtgcgggtgtgcagagcggtggatttgcagaaggtgttgtgatgaacgaatctcactgctacaaagtaccggacttcgtgctcttagacgttgcagctttgattcaaccgttggctgtgtgctggcatgcaattagagtctgcgagttcaaagcaggctctacggctttgatcattggtgctggccccatcggactgggcacgatactggcgttgaacgctgcaggttgcaaggacatcgtcgtttcagagcctgccaaggtaagaagagaactggctgaaaaaatgggtgccagggtttacgacccaacagcgcacgctgccaaggagagcattgattatctgaggtcgattgctgatggtggagacggcttcgattacacatttgattgctccgggttggaagtcacattgaatgctgctattcagtgtctcactttcagaggcactgcagtgaacttggccatgtggggccatcacaagatacagttttctccgatggacatcacattgcatgaaagaaagtacacagggtccatgtgctacacacaccacgattttgaggcagtaatagaagctttggaagaaggcaggattgacattgatagagcaagacatatgataacgggcagagtcaacattgaggacggccttgacggcgccatcatgaagctgataaacgagaaggagtctacgatcaagattattctgactccaaacaatcacggagagttgaacagggaagccgataatgagaagaaagaaatttccgagctgagcagtcggaaagatcaagaaagactacgagaatcaataaacgaggctaaactgcgtcacacatga

SEQ ID NO: 75339 - DNA, 1149 bp, Saccharomyces pastorianus
atgagagctttggcatatttcaagaagggtgatattcacttcactaatgatatccctaggccagaaatccaaaccgacgatgaggttattatcgacgtctcttggtgtgggatttgtggctcggatcttcacgagtacttggatggtccaatcttcatgcctaaagatggagagtgccataaattatccaacgctgctttacctctggcaatgggccatgagatgtcacgaattgtttccaaggttggtcctaaagtgacaaaggtgaaggttggcgaccacgtggtcgttgatgctgccagcagttgtgcagacctgcattgctggccacactccaaattttacaattccaagccatgcgatgcttgtcagaggggcagtgaaaatctatgtacccacgccggttttgtggggctaggtgtgatcagtggtggctttgctgaacaagtcgtagtctctcaacatcacattatccccgttccaaaggaaattcctctagatgtggctgctttaattgagcctctttctgtcacctggcatgctgttaagatttctggtttcaaaaaaggcagttcagtcttagttcttggtgcaggccccattgggttgtgtaccattttggtacttaagggaatgggggccagtaaaattgtagtgtctgaagttgcagagagaagaatagaaatggccaagaaactgggcgttgaggtgttcaatccctccaagcacggtcataaatctatagagatactacgtggtttgaccaagagccatgatgggtttgattacagttatgattgttctggtattcaagtcactttcgaaacctctttgaaggcattaacattcagggggacagccaccaacattgcagtttggggtccaaaacctgtgccattccaaccaatggatgtgactctccaagagaaagttatgactggttcgatcggctatgttgtcgaagactttgaagaagttgttcgtgccatccacaacggagacatcgccatggaagattgtaagcaactaatcactggtaagcaaaggattgaggacggttgggaaaagggattccaagagttgatggatcacaaggaatccaacgttaagattctattgacgcctaacaatcacggtgaaatgaagtaa

SEQ ID NO: 75340 - DNA, 423 bp, Saccharomyces pastorianus
atgtacttggcacgagaaatagacttggcaattttaccgtccagacgattggtaaaattcaaggccttcactaaacgatccctgtccatggatgaaatagagttggccagtttgtcttccagagcctttttatttaacttcttgcccctcttacttttattggctttcttagatatctttgcttccagcaatgcctcattcttggctgctgttctaatcaaaatattagtcaaatcggttttttcagctctaggtagttcacttaaatcctttacttctggctcaagagcatccgattgtctagcagctcttgaattctttgatattttcttggccatgctttgctttagacgatatcttaccagtatagtcaaggaaaaaactaccttttgtcatctttgttcccacattcaatacttctaa

SEQ ID NO: 75341 - DNA, 351 bp, Saccharomyces pastorianus
atgttaaccatctataaaagagaagccgttgtggtgcgattattgagaccatgttataaactaacacttgtccactatgtaaatactacacaacaaagaaccgacgtcgtcaagagcacgacggccgcagtaagcacaaatttcagaggttgctctaagatgcgatctataatgcggtcaaatggattaggggattctctttcgttatggaaagttgtttgtagatttcctagtctgctattcatgaatttgcgttctgtggggccatcggagcctctaaacgcacggtctctcatcagccaagtcttattcccaataatttgcgcctctgttacatttttaccaacataa

SEQ ID NO: 75342 - DNA, 543 bp, Saccharomyces pastorianus
atgccaccaccatcaagaagtagaataaacaaaacaagaacattaggaatagtgggtacagctatagcagtgttggtcacatcctactatatatatcaaaaggtgacaagtgcaaaggaagataatggggcacgacctccagagggtgattcagtaaaagaggacaaaaaggcaaggaagagcaaatgtattataatgagcaagtcgatacaaggactgcccataaagtgggaggagtacgccgctgatgaagtggttttgctggtacctacgagccacactgatggatcaatgaaacaagccattgaggatgcctttcgcaagacgaaaaacgaacacaaaatcatatactgcgatagcatggatggattatggtcttgtgtaaaacggctaggtaaatttcagtgcatattaaactccagggacttcacaagtagtggtggtagcgatgcggcagttgttcctgaagatataggcaggtttgtcaaatttgttgttgatagcgatatagaggatgtgctgattgacactttatgcaattaa

SEQ ID NO: 75343 - DNA, 2142 bp, Saccharomyces pastorianus
atgtcgccctctgccgtacaatcatcaaaactagaagaacagtcaagtgaaattgacaagttgaaagcaaaaatgtcccagtctgcctccactgcgcagcagaagaaggaacatgagtatgaacatttgacctcggtcaagatcgtgccacaacggcccatctcagatagactgcagcccgcaattgctacccactattctccacacttggacgggttgcaggactatcagcgcttgcacaaggagtctattgaagaccctgctaagttcttcggttctaaagctacccaatttttaaactggtctaagccattcgataaggtgttcatcccagaccctaaaacgggtaggccctccttccagaacaatgcatggttcctcaacggccaattaaacgcctgttacaactgtgttgacagacatgccttgaagacccctaacaagaaagccattattttcgaaggtgacgagcctggccaaggctattccattacctacaaggaactacttgaagaagtttgtcaagtggcacaagtgctgacttactctatgggcgttcgcaagggcgatactgttgccgtgtacatgcctatggtcccagaagcaatcataaccttgttggccatttcccgtatcggcgccattcactccgtagtctttgccgggttttcttccaactccttgagagatcgtatcaacgatggggactctaaagttgtcatcactacagatgaatccaacagaggtggtaaagtcattgagactaaaagaattgttgatgacgcgctaagagagaccccaggcgtgagacacgtcttggtttatagaaagaccaacaatccatctgttgctttccatgcccccagagatttggattgggcaacagaaaagaagaaatacaagacctactatccatgcacacccgttgattctgaggatccattattcttgttgtatacgtctggttctactggtgcccccaagggtgttcaacattctaccgcaggttacttgctgggagctttgttgaccatgcgctacacttttgacactcaccaagaagacgttttcttcacagctggagacattggctggattacaggccacacttatgtggtttatggtcccttactatatggttgtgccactttggtctttgaagggactcctgcatacccaaattactcccgttattgggatattattgatgaacacaaagtcacccaattttatgttgccccaactgctttgcgtttgttgaaaagagctggtgattcctacatcgaaaatcattccttaaaatctttgcgttgcttgggttcggtcggtgaaccaattgctgctgaagtttgggagtggtactctgaaaaaataggtaaaaatgaaatccccattgtagacacctactggcaaacagaatctggttcgcatctggtcaccccgctggctggtggtgtcacaccaatgaaaccgggttctgcctcattccccttcttcggtattgatgcagttgttcttgaccctaacactggtgaagaacttaataccagccacgcagagggtgtccttgccgtcaaagctgcatggccatcatttgcaagaactatttggaaaaatcatgataggtatctagacacttatttgaacccttaccctggctactatttcactggtgatggtgctgcaaaggataaggatggttatatctggattttgggtcgtgtagacgatgtggtgaacgtctctggtcaccgtctgtctaccgctgaaattgaggctgctattatcgaagatccaattgtggccgagtgtgctgttgtcggattcaacgatgacttgactggtcaagcagttgctgcatttgtggtgttgaaaaacaaatctagttggtccaccgcaacagatgatgaattacaagatatcaagaagcatttggtctttactgttagaaaagacatcgggccatttgccgcaccaaaattgatcattttagtggatgacttgcccaagacaagatctggcaaaattatgagacgtattttaagaaaaatcctagcaggagaaagtgaccaactaggcgacgtttctacattgtcaaaccctggcattgttagacatctaattgattcggtcaagttgtaa

SEQ ID NO: 75344 - DNA, 741 bp, Saccharomyces pastorianus
atggcatctaatcaacctggcaagtgttgctttgaaggagtttgtcacgatggaacacccaagggtcgtcgtgaagaaatcttcggtttagatacttatgcagcaggctctacatctcccaaggaaaaagttatagttatcttgacagatgtgtatggcaataaattcaacaatgttttattaacggccgacaaatttgctagtgctgggtacatggtctttgttcccgatattttattcggcgatgctatctcatcggacaaaccaattgatcgtgatgcctggtttcaaagacattctcctgaagtcaccaagaaaattgttgatggattcatgaagttgttaaaacttgaatatgacccaaagtttattggcgttgtgggttactgttttggtgcaaagtttgccgtccaacacattagtggcgacggaggtcttgccaatgctgcagccattgcacatccatctttcgtcagcatcgaggaaattgaagcaattgatagcaagaaaccaatattgatttcagcagcggaagaggatcacatctttccggcaaacttaagacacttaacggaggaaaaattaaaggataatcacgctacttaccagttagacctcttcagtggtgtggctcacgggtttgccgcaagaggcgatatatccatatctgccgtaaaatatgcgaaggagaaagtcttgctcgaccaaatatactggttcaatcatttttcgaatgtttaa

SEQ ID NO: 75345 - DNA, 1989 bp, Saccharomyces pastorianus
atgaccaaagaaacgattcgggtagttatttgcggtgatgaaggggtgggtaaatccagtctgattgtatcattaacaaaagctgaattcataccgaccatacaggacgtactgccacccatcagtataccaagagatttctcatcatcacctacatattctcctaagaatacagtacttatagacacttcagattcggacctcatagctttagaccatgagttgaagtccgccgacgtaatttggcttgtgtattgcgatcacgaatcgtatgaccatgtctctctcttttggttgcctcatttcaggtctctggggttgaatattcctgtcattctctgcaaaaataaatgtgattccatatcgaatgttaatgccaatgcaatggtcgtgtcagagaacagtgatgatgatatcgataccaaagtggaggatgaagaatttatcccaatattaatggagtttaaagagatcgacacttgcattaagacaagtgccaagacacagtttgatcttaaccaagcgttttatctttgccaaagggccataacacacccaatatcacctttatttgatgccatggtaggtgaattaaagccattggctgtcatggccttaaaaagaatttttcttttaagcgatttaaaccaggactcatatttagatgacaacgaaatcttgggcttacaaaaaaagtgcttcaataagagtatcgatgtaaacgaactgaattttattaaagatttgcttttggatatttccaagcacgatcaagagtacattaaccgcaagctatacgtaccgggaaaaggcatcaccaaagatggtttccttgtactgaacaaaatatacgcagaaagggggagacacgaaactacatgggctatcctaagaactttccattacacagattccttgtgtattaatgacaaaattcttcatccgaagttggtcgtccctgacacttccagtgtggaattgagccccaagggctacagatttcttgtagatatttttttgaagtttgatatcgacaatgatggtggtttgaataatcaagaattacatcgtctatttaagtgcacaccagggctgcctaaactatggacctcaacgaatttccccttctccactgtcgtaaacaacaagggttgcatcaccttacaaggctggctagcacaatggagtatgacgactttcttgaactatagcacaactaccgcttacttggtgtattttggctttcaagaagatgcaagactagccctacaagtaaccaagccaaggaaaatgagacgccgttccgggaaactttacagatccaatatcaatgacagaaaagtgttcaattgctttgtcattggaaagccatgttgcggcaaaagctctttgctagaggccttcttgggcagatctttctcggaggagtattctccgacaatcaaaccaagaattgcagtcaatagtttagaactcaaaggtgggaaacagtactatttgattttgcaagaacttggagaacaagaatacgccatactagagaataaggataagttaaaagaatgtgacgtaatctgtctaacatacgattccagcgacccagaatcattctcctacttagtctcgcttctagacaaattcacccatttacaagatctaccgttggtatttgtagcttctaaggcagatttggataagcagcaacaaaggtgtcaaatccaaccagatgaactggcagacgagctatttgtgaaccacccactgcacatatcatccagatggctaagttccctcaatgaattgttcattaaaatcacagaagctgctcttgatcctggaaaaaacactccaggattgccagaagaaacagcagcaaaagatgtcgactacagacaaacggctctcatttttgggtccactgttggattcgtggcactatgctcttttacgttaatgaaattattcaaatcatccaaattctcaaaataa

SEQ ID NO: 75346 - DNA, 330 bp, Saccharomyces pastorianus
atgaggtccgaatctgaagtgtctataagtactgtattcttaggagaatatgtaggtgatgatgagaaatctcttggtatactgatgggtggcagtacgtcctgtatggtcggtatgaattcagcttttgttaatgatacaatcagactggatttacccaccccttcatcaccgcaaataactacccgaatcgtttctttggtcattgtgttgttcaacacactagtatttagaagtccgctatttttgttttcaatttttatttgtttaatatacaaatttcattcttgttttgagggtaaaccactataccaaatgttgaagatctaa

SEQ ID NO: 75347 - DNA, 1869 bp, Saccharomyces pastorianus
atggtacgtcgatggattcctagtggcaggcatcttcgcaataatgacaacactggtgatgatgacgacagtgagttcacaaactcgatggattctgggatgtccataccatcactcagggactccatgaccacgaggtcatctcataacgatcccatcaagcctgctctgatgaacgattccaacaaagtcaaaaatttggagaaggagttgactaatgccaaaatcaagattcaagtactctatgaatacattcgcagaatccctaataaagacggcaatgcaccatcgctgggcaatgacactgattttagaaattcgattatcgagggtctaaatcttgaaataaacaaattgaaacaggatttaaaggcgaaggaagtcgagtaccaagatacgctacaattcgttcaagagaatttagaaaattcggaaagtatcgtgaatacgatcaatcacctattgtcctttatattgacgcattttaatgagcaagatgaaaatgctcatcttcttgataaagaagagagggagaccctggaggaaactttagagctgagctcggattatgttcttgaaaaaatggatactttgtccaagttcatcatccaattcttgcaggactttttgcattccaaaagtcgagcggaatcaaagcaggacaaggaagaatttctttcactggcccagtcctcaccagcaggatcacagttcgaaagtagggactcaccatcaagtaaagaggagaatgctgatggtggataccagaatgacgaaattcatgacagtaacaaccacattgatacagaaaatgtaatggcaaacagtacttccttaccaatttcagccgccgagtctcgttttgagaaaaccttagacactcaattagagattgtcatagaaaatttgcacaaagaatatgatcaatttataaattccattagattgaaattcgagaaatcgcaaaaattagaaaaaataatagcgtccaaactaagtgagcagtctcatctactagatttcttagaattggaagaaaattctagttccgttatagaaaaacaggatcatttgatttcccaactgaaggaaaagatcgaatcgcaatctgtcttgataaacaatttggaaaaattgaaggaagacatcattaaaatgaaacaaaatgagaaagttttaaccaaagaactggaaactcagaccaaaatcaataaactaaaggaaaataattgggacagctacatcaatgacttggaaaaacaaatcaatgaccttcaaatcgatagatcagaggaattccacgtaatacaaaatcagttagacaaattagacttggagaattaccaattgaaaaatcagttaaatactttggacaaccaaaagttaatactatcccaatatgaaagcaattttatcaaatttaatcagaaccttttactacaccttgacagtattttcaatattctgcagaaaatcttacaagaaagttctattgcccaatttgacaggaaaatgaaatccataaaatctttaccaaatgcgttgaaaaacttgaatttgattcagcccaaactagaatcgctctacacttttatagagaccgcattagagtccataataaactcatatatctcttcactgattgccatggaaaccccagagcagccacatcaacagggcaatgaactaacggcaactccaaataaagaactaaccttacgaatagaggagttacaaagaagatggatatccgaaagagaaagacggaagctcgatgctaacgcttcagaagctcgaatcaaggctttagaacaggaaaatgagtcattgagatcgaaacttttcaacctatcaatcaacaatccctaa

SEQ ID NO: 75348 - DNA, 357 bp, Saccharomyces pastorianus
atgaagctcccacagaccatgctacgttctatatctgtgaagcatgtccggtggccaaggattctgacgggctcaaagctttggtactcaacgcagatggcaatgactccggaggagaagatgatcaccgataaactacaacaggaactggaacctgaagtatgtaaagtgcaagacgtttccggtggctgcggatccatgtttgctatcaacataacaagcaagaagtttaacggactgagtctcatcaagcagcaccagctggtgaacagaattttgagggacgatatttccagatggcatggcctacaattgatcactaagaagtcaactgggaagggtccagcatcatcatga

SEQ ID NO: 75349 - DNA, 309 bp, Saccharomyces pastorianus
atggataccgttcgcctgagccatctcgtcttgcaagagggaataaaccatacgatggcgttgtggaagtttcaggccttcgaactttttactgaccatctcaatccggaaatgtgtctcagcagaggcatttccctgtacaccagcatggcccttatgcttgtgagaatcgttgtagaggccaaacgcaaagttcttgtaatctggaaagccgcattccagtctcttcaggatggtacgtgccacgggaccatctgtgctcattgctctcttgaacattattctctttccactttcgtttgctgctaa

SEQ ID NO: 75350 - DNA, 333 bp, Saccharomyces pastorianus
atgttcaagagagcaatgagcacagatggtcccgtggcacgtaccatcctgaagagactggaatgcggctttccagattacaagaactttgcgtttggcctctacaacgattctcacaagcataagggccatgctggtgtacagggaaatgcctctgctgagacacatttccggattgagatggtcagtaaaaagttcgaaggcctgaaacttccacaacgccatcgtatggtttattccctcttgcaagacgagatggctcaggcgaacggtatccatgctttacaattgtcactaaagaccccacaggagtatgaatccaaagcgaaatag

SEQ ID NO: 75351 - DNA, 534 bp, Saccharomyces pastorianus
atgaagcataccacatcgacaatgttacgcactactagactatggaccacccgcatgcccactgtgagcaaattgtttttgagaaacagctccggcaatgccctaaacaagaataaactaccatttttgtactcatcccaaggacctcaagccgtgaggtacacttcccaacatgagtggatagctgtgcatcaggacaagactgcctttgtcggaattacaaaatacgccactgatgccttaggggacgctacctatgttgagttgccagaagtgggcactgagattgcccaaggtgagtcgctagggtccattgagtccgtcaagtcagcctccgagatctaccagcctgccgatggtaccgtagaggaaattaacactaatcttgaggaaaatccaggtgtggtgaacgaagatcctatgggtgacggctggctagtcaaaatgaagcttggtgagggcgttaatgtggaacaggtcgagggtctaatgtccttagaacagtacgaaaagacactggttcatgatgactga

SEQ ID NO: 75352 - DNA, 2358 bp, Saccharomyces pastorianus
atgtcatctgcagagatggaacaattgttacaggccaagacactggccatgcacaacaatccaacggagatgctgcccaaggtgctcgaaactacggcatccatgtaccacaacggtaatctcagcaagctgaagttgcccttggccaagttttttacacagttagttctagacgtggtgtcgatggactctccaattgcgaatactgagagaccgtttattgctgctcaatatctgccactacttcttgctatggcgcaatccaccgcggacgtactggtgtacaagaatatcgtgcttattatgtgcgcttcatacccgctggtgttggatctggttgctaagacatcaaaccaggaaatgtttgatcagttgtgtatgctgaagaagttcgtgctctcgcactggagaactgcatatcctttgcgtgccaccgttgacgatgaaacggatgtcgaacaatggctggcgcagattgaccaaaatatcggcgtgaaattagcgaccatcaagttcatatctgaggccgtgctgtcgcaaactaaatcacccagcggcaacgagattaattcatctaccatcccggataaccaccctgtgttgaacaaaccggctttggagagcgaggctaagagacttcttgatatgttgctaaactacctaattgaagaacagtacatggtctcgtccgttttcattggtatcatcaattctttatccttcgtcatcaaaagaaggccgcagacaacaataagaattctttccgggctgttgcgtttcaacgtcgacgccaagtttcccctagaaggcaagtctgacttgaactacaaactatccaagagatttgttgaaagagcgtacaagaactttgtgcaatttgggctaaaaaatcaaatcattacaaaatccctctcatccggatcagggtcatcgatctactccaagctgaccaagatttctcaaactttacacgttattggcgaagagaccaagagcaagggaattttgaacttcgacccttccaagggcaatagcaagaaaacgttgtccaggcaggacaaactaaagtacatctcgctatggaaaaggcaattatccgcgttattgtctactctaggggtgtccacaaagacccccacgcctgtgtccgcacctgcaacgggctcttcaaccgaaaacatgcttgatcaactgaagatattgcaaaaatacaccctcaacaaggcttcacaccagggcaatacttttttcaacaactcacccaaaccaatcagcaacacctactcatctgtgtactcattgatgaacagttcgaactccaaccaggatgtgacccagctacccaatgacatacttatcaagctgtccacagaggccatcttgcaaatggacaccacgaaactgatcaccggattgtctatcgttgcttcgaggtacacggatttaatgaatacgtacatcaattctgtaccgtcctcgtcatcatcaaagaggaaatccgacgatgatgacgacggcaacgacaatgaagaagttggaaacgatggcccaacggccaatagcaagaaaatcaaaatagaaacagaaccactagcggaggaaccagaggagcccgaagacgatgaccgaatgcagaagatgcttcaagaagaggaaagtgcccaagaaatctcaggagatgccaacaaatcaacttctgccatgaaggagatcgcacccccctttgaacctgactcattgacgcaggatgaaaaactaaagtacctctcaaagctgaccaagaaactgtttgaattatccggtcgccaggatactacccgggcaaaatcttcgtcttcctcctccatattactggacgatgacgactcctcgtcatggttacacgtcttaatcagattggttacgagaggaatcgaagcacaagaggccagtgacctgattcgtgaagaactgcttggcttcttcatccaggatttcgaacaacgtgtcagtctgatcattgaatggctcaatgaagaatggttcttccaaacctcgctgcatcaagatccctctaactacaaaaaatggtccttaagagttctcgagtctctgggtccattccttgaaaacaaacacagacgattcttcatcagacttatgagcgaactgcccagtcttcaaagcgatcatcttgaggcactgaagcctatctgcctggatccggcaagaagttcccttggttttcaaacgctaaagtttctcattatgtttagacctccagtgcaggacactgttcgcgacctgctgcatcagctaaagcaagaagatgaaggcttacacaagcagtgcgattcactgcttgacaggctaaaatga

SEQ ID NO: 75353 - DNA, 378 bp, Saccharomyces pastorianus
atgtctagttgcatctctccagagtcgtccataatatcgagattcaccaggtcacatggcatcgatggaaatgtcacatccatattaagctccagctttgcgtgtcggtcacggtccaccaccaattgtggccttgttaccacagaattgaactgtccccactcgttcaccagcagaaataacgtggtcaagatgcacgataaagtgatcagcccgccggccctggtgcggactcgtacgtcctcttcggtcttagcgaatgcgtccagcgacagcaacgtggaccttttcatgatgtctattgtgtctagctatgtgtgttatatcactgtcctactccgcatgtatacgagacataaaactagctttcctttataa

SEQ ID NO: 75354 - DNA, 1248 bp, Saccharomyces pastorianus
atgaaaaggtccacgttgctgtcgctggacgcattcgctaagaccgaagaggacgtacgagtccgcaccagggccggcgggctgatcactttatcgtgcatcttgaccacgttatttctgctggtgaacgagtggggacagttcaattctgtggtaacaaggccacaattggtggtggaccgtgaccgacacgcaaagctggagcttaatatggatgtgacatttccatcgatgccatgtgacctggtgaatctcgatattatggacgactctggagagatgcaactagacattcttgacgcagggttcacgatgtctaggttgaatagcgagggtcgccccgtgggagatgctactgagttgcatgtgggtgggaacggcgacggaaccgctccggttaataacgatcctaactattgtgggccatgttacggtgccaaagatcagtcgcagaatgagaatctagcacaggaagagaaggtttgctgccaagactgtgatgcagtgagatcagcatacttggaggcaggctgggcttttttcgacgggaagaatatcgagcagtgtgaaagagagggctatgtcagcaagattaacgagcacttgaatgaaggctgcaggatcaaaggttctgcacaaattaacagaattcaggggaatcttcactttgcccctggaaaaccctaccagaatgcatatggacattttcatgatacttctttgtacgacaagacttcgaatttgaacttcaaccacatcatcaatcatttgagctttgggaagccgatccagtcccacagtaagttgttaggaaacgataagcgccacggcggcgccgtagttgccacttctcccttggacggacgccaggtgttcccggacaggaacacacactttcaccagttctcgtattttgccaagattgtccccaccagatatgagtacttggataatgttgtcattgagaccgcgcagttcagcgccacttttcactcccgacctcttgccggtggaagggacaaggatcatccaaacacacttcacgctaggggtggtatccctggtatgttcgtctttttcgaaatgtctccattgaaagtcatcaataaggaacagcacgggcagacttggtcgggcttcatcttgaattgtatcaccagcattggtggtgtcctagctgtgggcactgtcatggacaagctattctacaaagcacagagatcgatctggggcaagaagagccagtag

SEQ ID NO: 75355 - DNA, 1743 bp, Saccharomyces pastorianus
atggccatattgaaggataccataattagatacgctaatgcaagctatgctaccgctagtggcacttccaccgccactgccgcctctgtcagcgctgcctcatgtcctaatttgcccttgctcttgcaaaagaggcgggccattgctagtgcaaagtctaaaaaccctaatctcgttaaaagagaattgcaagcacatcactcagcgatcagcgaatacaataatgatcaattggaccactattttcgtctctcccacacagaaaggccgctgtacaacctgactaacttcaactctcagccacaagttaatccgaagatgcgtttcttgatctttgacttcatcatgtactgtcacacaagactcaatctatcaacctcgactttgttccttactttcactatcttggacaagtattcctcgcggttcattatcaagagttacaactaccagctcttgtccttgaccgcgctttggatttcgtccaaattttgggactccaagaatagaatggccactttgaaagtcttgcaaaacttgtgttgcaatcaatattctataaagcaattcacgactatggaaatgcatcttttcaaatcactcgattggtccatctgtcagtcggcaacattcgactcctacatcgacatcttcttgttccaatctacgtccccgttatcgcctggcgttgtcctttctgcccctttggaagctttcattcaacagaaactggccttattaaataacgctgctggtactgctattaataaatcgtcctcttctcaaggcccctctttgaacatcaacgagatcaaattgggtgccattatgttgtgcgagttagcttccttcaatctcgaattatcatttaaatatgatcgttcactaattgcgctgggtgcaattaacctcatcaaattatctttgaactactataattcaaacctttgggaaaatatcaatctggctttggaggaaaactgccaagacctagatattaaattgtcagaaatctctaatactttattggatatagcaatggaccaaaattctttcccctccagtttcaaatcaaaatatttgaatagcaataagacatctttagcaaaatctctcttagacgcattacaaaactattgtattcaattgaaactggaagaattctaccgttcacaagaattggaaaccatgtacaatactatctttgctcagtcctttgacagcgattcattgacttgtgtttactcaaatgctactactccaaagagcgctacggtttcatctgcggccacagactatttctcggatcacactcatttaagaaggttgaccaaagatagcacttctccaccatttgccttcactccaacctcatcttcatcctctccatctccattcaattccccttacaagacttcaagttcaatgacgaccccagactctgcatcacaccattcacattcaggttcgttctcttctacccaaaactcttttaaaaggtcactgagcatcccacagaattcaagcattttttggccaagcccactaactcccaccaccccatctctaatgtcaaatagaaaattattacaaaatttatctgtgcgttcgaaaagattatttcctgtgagacccatggccactgctcatccatgctctgcccccacccaactgaaaaagagatcaacttcctctgtggattgtgattttaatgatagtagtaacctcaagaaaactcgctga

SEQ ID NO: 75356 - DNA, 354 bp, Saccharomyces pastorianus
atggcagcagtgcacttgtacataatttcatttacagcattaatgatatcatcaacaagcgagatgggcggatatcccaaatgctctgtcaatattgaggtggatctcatagtgggagcagacatggttgttttgatcgtcttaacccagtttcaacgtgttattactcaacttcctaataaatgccaacttatattcaatgcctcttatttaccttttttgtttacgcgtactataaaaatttccaaggttgaaagacagcaaggtgaaagaagtaaaatggcaatgaaaagtaagatagaattgaaactaatacacaaaggttcacatttttatatacaattacctatttaa

SEQ ID NO: 75357 - DNA, 870 bp, Saccharomyces pastorianus
atgtctgctcccactatgagatccacctcaatattgacagagcatttgggatatccgcccatctcgcttgttgatgatatcattaatgctgtaaatgaaattatgtacaagtgcactgctgccatggaaaaatatctgctatccaagagcaaaatcggcgaggaagattatggagaagagatcaaaagtggagttgctaagttggagtcacttttggaaaactccgtggataagaattttgacaaactagaactatatgttttgaggaacgtccttcgaatccctgaagagtatttggacgccaatgtttttagattggagaaccaaaaggacctggtcattgtagatgagaatgagttaaagaaaagtgaggagaaacttcgagagaaagtgaacgacgtggagttagcgttcaaaaagaatgaaatgctattgaaaagagttacaaaagtgaaaagactgttgtttacgataagaggattcaaacaaaagctaaacgagttactgaaatgcaaagacgatgtacaattgcagaaaattttggagtcgttaaaacctatagatgacacaatgactctactgactgattcattacgtaaactatatgttgatagtgaaagtaccagttcaacagaggaggtagaggcactactgcagagattgaagaccaacgggaagcaaaataataaggatttcagaacacgatatatcgatataaggacgaataatgtcctacgaaaattggggctactaggtgataaagaggacgaaaaacagtctgccaagccggatgcgaggacgcaagcaggggatatagttagtatagatattgaagagcctcaattggatttacttgatgatgtgttataa

SEQ ID NO: 75358 - DNA, 522 bp, Saccharomyces pastorianus
atggtacgtttaaaaagtagatatatcctttttgaaattatattcccacctacagacaccaacgttgaggaatctgtgtcgaaaacagacatcttgctttcgcatcacagagcatcgcctgcggatgtgtccataaagtcgatactccaagagatacgacgctcgctgtcgttgaatctgggcgactatgggtctgcaaaatgtaactctctcttgcagttgaaatacttttcaaataagacgtctacggggataatccgatgccatcgagaggattgcgaccttgttatcatggcattgatgttgatgtcgaaaattggcgacgtcgatggactgatcgtgaaccccgtcaaggtaagtgggaccatcaagaaaatagagcagtttgctatgagaaggaattctaaaattctgaacataatcaagtgtagtcaatcatcacacctcagcgataatgactttattatcaatgatttcaagaaaattggaagggaaaacgaaaacgaaaacgaggacgattag

SEQ ID NO: 75359 - DNA, 1140 bp, Saccharomyces pastorianus
atgtttagtaacagactaccacctccaaaacattctcaaggacgagtttcgacggctttgagctcagatcgcgttgagccggcaatattgactgaccaaatcgctaaaaacgttaagctcgatgattttattccaaagagacagtctaatttcgaactatcggttcctttgccaacgaaagcagaaatccaagaatgtacagcaagaaccaagtcatacattcagcggcttgtgaatgcgaaactagccaactcaaataacagggcatcatcaaggtacgtcaccgaaacacatcaggcacccgcgaatctattattgaacaacagccaccatattgaggtagtgtccaagcaaatggatccattgttgccaaggttcgttgggaagaaggcgagaaaggttgtagcacccacagaaaacgacgaagtcgtgcctgttctccatatggatggcagcaatgataggggagaagctgatccaaatgagtggaagatacctgcagctgtgtcaaactggaaaaatccaaatggttataccgtggccttggaaagacgtgtaggtaaagctcttgacaacgaaaataataccatcaacgatgggtttatgaagctctccgaagcgttagaaaacgctgacaagaaggcaagacaagagatcaggtccaaaatggaattgaagcggcttgctatggaacaggaaatgcttgctaaagaatctaaattgaaagaattgagccaacgagccagataccacaacgggactccgcagacgggagcaatagttaagcccaaaaagcaaacgagcacagtggccagactaaaagagctggcgtactctcaaggaagagacgtatccgaaaagataattctgggcgcagcaaagcgttcagaacaaccggatctgcagtacgattcaagatttttcacaagaggggcaaatgcctccgccaaaaggcatgaagaccaggtttatgacaacccactgttcgtccaacaagatattgaaagcatatacaagaccaactacgaaaagctggacgaagcggtcaatgttaagagtgaaggtgccagtggttctcacggccccattcagtttactaaagctgaatccgatgataaatcggataactatggcgcctag

SEQ ID NO: 75360 - DNA, 2283 bp, Saccharomyces pastorianus
atggtagatgtgcaaaagagaaaaaagttgctagccaaagctgctgccagcgcttctattccggcaatcaaaggttctgttccgttggactcgtatgatataaaaatcattcaatataagaacgctctttacaagctgaatgaactgaataggctactaaacgttctggtaccgcatttgaagaagaaaagagacaatgacgagtcctacaaaattattcccctcgttaatttcatcttattactttgtgagggtcctatatttaatgtaagccccgtattggctaagaggtaccatttgctctgtcgattccagctgataaagctaagcgaagtgcagcagagattatcaactaattttattgatgtagagggctggatgtttcccgaggaggtacccctagatcactataaatcgtgcatatacaataattctctacaatggaagattttaaattcgctgtcttgcattgctcaaaatgctataaaaatttataatgccaagttgagacagattttattggaaagggatgcgtacaaagctcggtcacttccatttgacacttcaataattgaagacttgttaaatccagttgaaatgacattgattctagatttagccgttttgattaatgatccagtaagggataagtccacccattccttttacaaattgcaatggcaagtgatggagaaactgaactcctgtgttcattcgaaaatcttccccattctaaggacatattacaaccaattgcagaaattttcggaaacaagacctacttcactgtcaaatttacagaaggatctaccacattgggaatggactctacacaggatatacactttccacttgcgggttttttctgtcttgtgtgttattatcagtttctctaggcaaattttcctaccgaataaacaacatttcttggacatcaagacaagattatccagcgaaaacgtgtaccattacgatttgataatttgtgagctgatggctttgctctctccagaatgtgatgatgtcacagctttattcgaactgcaggagaatttaaaattttggactcaaacggcgcgtaccgataacaattcctcaagaactcccattttccaccttcaacctggtttagttgtggaattgtttaataatcatatctgcaagattataccgaaattgaggtccattatgggattattatccaattggatggattgctggaaatatattgagaaaaattataaaaccttcgatgaaaccaatgacttgcgggagaatttgaaagaaaagctagaaagagataaggctctgtatttagaggttaaaaacgcgaagagtaagctaaagaagaagccgtcaataacaaagctgccagcctcttcttctccacccccctcacccacatcttcagcaagcccatcaagacaggcctctttagagagcataagaacaagggcaagggcgcatttagcctcaaattcttctaggtctccctcagtatcgcctgtaaggaccactttcaacaataaaaacgcagaaacgaagaaaagcatggtgtctccggagaaaagaaaactgatcaacggcagaaggcctagatcctcatctttgcaatcctatacaaacaaacaacaaacctcatatttgaattctacaagacatccgtcaatagctccaccttcaaagctcaacaatcaaaggtccaattctttgcagtcctcaaccatgacgttaaatcaaaaaatcgtccaagatacagtgcggcatttgatgaacaaaagtgcatctacacccaatccttctgcatcttcatcgttagcgccttcaccaaaagtatccagtataaacaacacctcctcaggaaaatcatcaagtaccctgattgccaatagtagtgatactttggctatagagacattaactctagatccggagtcaaactccagtgaattgtccatcaaaagggtgagatttgctggtgtaccgccaatgacagaggcagaaaatcctaaaccaacaaaggtgggttggtacaagaagccggctgtgctacattatacgccaatacctgcttcggcaatgatcaagccgctacagcataagtccaaatataacacgctgagacaagaagaagggtttacctttcgaaaaagtcttcgagatggattagagttggaaaatggcgaatctggctccgaaactaccatgatgccgtttgggatcgaaatcaaagagtcgaccgggcatagaatagcttctaaaatcagaagcaaattgagataa

SEQ ID NO: 75361 - DNA, 2280 bp, Saccharomyces pastorianus
atgtcctcgtcttcgtctaccgggtacagcaaaaacaatgccgcccacattaagcaagagaatacactgagacaaagagaatcgtcttccatcagcgtcagtgaggaactttcgagcgctgatgagagagacgcggaagatttctcgaaggaaaagcccgctgcacaaagctcactgttacgcctggaatccgttgtaatgccggtgatctttactgcattggcgttgtttaccaggatgtacaaaatcggcatcaacaaccatgttgtttgggatgaggcgcactttggtaaatttggttcttattacttgagacacgaattttaccacgatgtccatcctcccctaggaaaaatgctggtcgggttgtctggttatttggcaggctacaacggttcttgggacttcccttctggggaaatttacccagactatttggattatgttaaaatgagactgttcaacgcgtcattttccgcgctctgtgtgccattggcctacttcactgccaaagctattggattttctttaccaacagtttggctgatgaccgtgttggttttgtttgaaaactcgtatagcactttgggcaggttcattcttttggactccatgctacttttcttcactgtcgcatcgttctttagttttgttatgttccacaaccagaggtccaagccgttctctagaaagtggtggaaatggctgttgatcactggtatttctttgggttgcactatttccgtcaaaatggtgggtctatttatcatcactatggtcggtatctatactgtgattgacttatggacctttttggcagataaatccatgtcatggaaaacctatattaaccactggttggcaagaatatttggtcttattatcgtccccttctgcattttcctattgtgcttcaaaatacattttgacctattatcgcattctggtacaggtgatgctaacatgccatctcttttccaagcaagattagtgggttctgacgtcggacaaggtccccgtgacattgctctaggttcctccgttgtttccatcaaaaaccaagctcttggaggatctctattgcactcacatatacaaacttatccagatgggtccaaccaacaacaagtaacctgttatggttacaaagatgctaacaacgaatggtttttcaacagagaaagaggcttaccatcatggtcagaaaacgaaactgacatcgagtatttgaagccaggtacctcctatagattggtacacaaaagcacgggcagaaacttgcacacccacccagttgctgcaccagtgtcaaagacacaatgggaggtttctggttacggtgacaatgttgttggtgacaacaaagacaattgggttattgagatcatggaccaaagaggagatgaagaccctgagaagttgcacacattgaccacctctttccgtatcaagaacttggagatgagctgttacttggctcaaaccggtaacagtttgcccgaatggggtttcagacaacaagaggttgtctgcatgaaaaacccattcaagagggacaagaggacctggtggaacatcgagacccacgaaaatgaaaggttgccaccaagacccgaagattttcaatacccaaagaccaacttcttaaaagacttcattcatttaaatctagccatgatggccactaataacgctttggtgccagatccagacaaatttgattacttagcttcctcagcatggcaatggccaactttgaatgtgggtttgagactatgtggctggggtgatgataatccaaaatacttcctattgggtaccccagcttccacgtgggcttctagtgttgccgtcctcgcattcatggccacggtcgttatcttactgatcagatggcaaagacaatatgtggacctaagaaatccatctaactggaacgttttcttaatgggcgggttctacccactactagcttggggcctacactacatgccattcgttatcatgtctagagtcacctacgttcatcattacttgcctgccttgtattttgcactgatcattttggcgtactgtttcgacgccggtttgcaaaaatggtccagatctaagtgcggccgtatcatgcggttcgtcctatacgccggattcatggcacttgtaattggttgcttctggtacttctccccaatatcatttggtatggagggaccaagtagtaacttccgctacttaaactggttttccacttgggacattgccgacaagcaagaagcatga

SEQ ID NO: 75362 - DNA, 1554 bp, Saccharomyces pastorianus
atgagtactagtgcggacactgataccatcaagaagccaatccttgcggtgccagagcctgcactggccgatacgcattcagaggagatatcacgctctggagaagaacatgaatcagagaacaacgagcactcagatgaagaaggcgataattattctgaaagagagcaatctgtgtcaaccgaaccactggatacattgccgttaagaaaaaagttgaaaaatctttcctatattacatttttcgccataggaataggtcttttatggccgtggaactgtattctcagtgcctcgcagtattttaagcacgatattttcaaagacacttccatttgggcaaagatcttcacaagctctatgatgtccttttctaccatatcgtcaatgctgttcaacatctacttggccaaaaggcagtacaaatactcgagaagggtcataaacgggcttgtgtgggagattattgtctttactgtcatgtgcttctttacaattttgcatttccttttacctaaatggttcaatttcatgtttataatggtgcttgtagtgatcagttccatggggacagccatgacacagaatggtatcatggccatagccaacgtcttcggttccgagtacagtcaaggcgtcatggtggggcaagccgttgctggtgtcctgccctccctagtgctttttgccctagccttcatcgagaactcgtctgtgtctactacgggcgggattcttctatacttttttaccacaacactcatggtcaccatttgtgtggtcatgttcagcgtgagcaaaatcagtcggaaagtgaacgagaattggaatgtggaagacggacatatcactgatgtgttgttagggtctctgcgctccaatgaggaggaaatccgtattgttggccgcattgaccaaatggaggatgaagaccaccgccgcaccaacggcactcgcgacgacaacgacgaaggtgaggaactccaactaaaagtgcctttcgaggtcttatttgccaaactaaagtacctggttctttccatattcaccacgtttgtcgtaactcttgtttttcctgtatttgcgtctgccacctacgtgacagggcttcctttaagcaacgcacagtacatacctctcatattcatgctgtggaacctaggcgacctttacggaagagtcattgccgactggcccatgttccgtgaccagaaatttacgccacgcaaaaccttcatctactcattgttgcgggtggccgcaataccactgttcttgatgttcacagccatcacctcctcttcaagcggcgatgaagagcacaatggctccgtaatcgttgacttgtgttacatgctactgcagttccttttcggcgtaaccaacgggcacgtcatctctatgagtttcatgaaggtgccagagcaactggacaacgacgacgagaaggaagcggccggtggattcactaatattttcgtttctacaggactagctctgggcagcatcataagctacgtattcgtcttcataattgactttattatcaggtag

SEQ ID NO: 75363 - DNA, 2523 bp, Saccharomyces pastorianus
atgaacgacccttctttactaggctaccctaatctgggcccgcagcagcaacagcaacagcagcaacagcagcatgccgggctactaggaaagggtacaccaaacgctctacagcagcagctacacatgaaccagctcaccgggatacctccgccgggactcatgaacaacagcgatgtacacacttccagcaacaacaactcgcgccagttgctcgacaaattggccaatgggaacgcgaacatgctcaatatgaacatggataacaacaataacaacaataacaacaataacaacaacaacaacaacaacaacaacggcggtggaagcggggtgatgatgaatgcctccacagccgcagtaaattctatagggatggttcctaccgttggtacgcctgtgaacatcaatgtgaacgccagcaaccctttattacacccgcacttggatgacccttctttactaaacaatccgatctggaagcttcaattgcatctggctgcagtgtccgcacaatctctggggcaacccaacatttatgctagacaaaacgctatgaagaagtatttggctacacaacaggctcagcaagctcagcaacaagcgcagcaacaggcacagcagcaggtcccgggcccatttggccccggacctcaggctgcaccaccagctttgcagcccaccgatttccagcaatctcacattgcagaagcctccaaatcactggtagactgcacaaagcaagccttgatggaaatggccgacactctcaccgacagcaagacagcaaagaaacaacaacctacgggagatagcactccctcaggcacggcaactaacagtgcagtttctacaccattgactcccaagatagagctgtttgctaatggcaaggacgaagccaaccaggcgctcttacaacacaagaaactgtctcagtacagcatcgacgaagatgacgacattgaaaacagaatggtcatgcccaaggactccaaatacgacgaccaattatggcacgcgctagatttgtccaacttgcaaatcttcaatatcagcgccaacatcttcaagtacgattttctaacgagactatatttgaatggcaatagcctcacggaactgccagcggagatcaagaacctaagcaacctacgcgttttggacctgtcgcataataggttaacatctctaccagcggaactaggctcatgtttccaattgaaatacttatacttttttgataacatgatcaccacattaccatgggagtttgggaacctgtgtaaccttcagtttcttggtgtagaaggaaaccccttagaaaaacagtttttaaagatccttacagaaaaatctgtcacgggattgattttctacctaagagacaacagaccagagattcccttaccgcatgaacgtaggttcatcgaaatcaataccgatggggaaccacagagggagtacgattctttgcagcaatccaccgagcatctggccaccgatttagccaagaggacgttcaccgtcttatcctacaacaccttatgtcaacactatgccaccccaaaaatgtaccgttacacaccgtcgtgggcgttaagttgggattacaggcgcaataaattaaaggagcaaattctctcgtacgacagtgatctgttgtgtttacaagaagtggagtctaagacttttgaagagtattgggtgcccttattggacaagcacggttatacaggcatcttccatgcaaaggcaagagccaagaccatgcattccaaggactctaagaaagtggacgggtgttgcatttttttcaaaagggaccaattcaagttgatcaccaaagacgccatggatttcagcggtgcttggatgaaacacaagaagttccaaagaactgaagattatttaaaccgtgcaatgaacaaagacaacgttgcactgttcttaaagctacaacacatccctagtggcgacaccatatgggcggtcaccacgcatttgcactgggatccaaaattcaatgatgtcaagacattccaagtaggtgtcctgttagatcatctggaaacgctgctaaaggaggagacatcgcacaattttagacaggacattaagaagtttcctgtgctcatttgtggtgacttcaattcatacatcaactccgccgtatacgaattgataagtacaggccgtgtccaaatacatcaagagggaaatggtagagatttcggttacatgtcggagaaaaatttctcacataacttggctctcaaatcaagttataattgtatcggagaactaccattcaccaatttcacaccgtcattcacagatgttatcgactatatatggttttctacacatgctctaagggtgcgtggcctattgggtgaagtggaccctgaatacgtgagtaagtttatcgggttccccaacgacaaattccccagtgaccatataccattgttagcaagatttgaatttatgaagacaaacacaggcagtaggaaagtataa

SEQ ID NO: 75364 - DNA, 1002 bp, Saccharomyces pastorianus
atgagttgtgtgtatgcgtttgggtccaatgggcaaaggcaactgggactggggcacgatgaggatatggataccccacagaggtctgtgccaggagatgatggagcaatagtcaggaagatagcgtgcggtgggaaccacagcgtgatgctgacaaatgacgggaatctggtaggatgtggagataacagacggggagaactggatagtgcgcaagcactgcggcaggtgcatgactggaggcccgtggaagtaccgtcacccgtggtggatgtggcgtgcggctgggacacgacagttattgtggatgctgatggccgtgtatggcagagaggaggcggttgctacgagttcactgagcaacatgtgccattgaattccaacgatgggcgcatcgcagtatacggatgtttccagaactttgtggtggtgcaaggcacccgagtatacggctggggcagcaacacaaagtgtcaattgcaagagcccaaatcccgatcactgaaagagcccgtattggtgtacgataccgggtctgtggccgtagactacgtggccatgggcaaggacttcatggtcatagtggacgagggcggccgcatagtgcacgcatccggtcgcctgcccactgggttcgagctcaaacaacagcaaaaaagacacaatctagtggtactgtgcatgtggacctcgatccacctgtggaatacgcgcctcaatacggtggagtcgtttggtaggggcacacattcccaactgttcccgcaagagcgcctagacttccctattgtcggtgttgcaaccgggagtgagcacggtattctaactactgctaatcaagaaggcaagtctcactgttacaatgtatactgctggggctggggagagcatggcaactgcggcccgcaaaagggctcccagcctggactgcagctcgtgggccaatactctggaaaacctcgcgtgtttggcggatgtgccaccacgtggatcgtgctctag

SEQ ID NO: 75365 - DNA, 3396 bp, Saccharomyces pastorianus
atgagtggtccgcattcaaatgatgaggatgacgtagtgcaagtgcccgagacgtcctctcccaccaaggtagcatcgtcgtctcccttaaagcctacttcgccaacagttccggatgcaagtgtggcgtctttgagaagcaggtttactttcaagccttcagatcccagcgaaggagctcatacttcgaagccgctcccatctgggagtcctgaggtagcactggttaaccttgcgagagagttccctgatttctctcaaactctggtgcaggctgttttcaaatctaactcttttaacttacagtctgccagggaacgtcttacaagattgaggcagcaaagacaaaattggacatggaacaagaacgcatctcccaagaagtcagaaaccccgccacctgtcaagaagtcattaccactggcaaacacaggccgtttatcatctatccatggcaatatcaacaacaaatcctccaagattaccgtggccaaacagaaaacgtccatttttgaccgttactcaaacgtcatcaaccagaaacaatacacttttgagctgccaactaacttgaacatagactcggaggcactcagcaagttgcccgtgaactacaacaaaaagagaaggctggtaagggcagatcagcatccaattggcaagtcttatgagtcatccgctacacaactaggttctgcaagagagaaactactggcgaaccgcaaatacggtcgtcatgcaaacgacaacgatgaagaggaggaagagagtatgatgacggacgatgacgatgcaagtggcgacgactacacagaatccacgccgcagataaatctggatgaacaagttttacagtttattaatgattctgatattgtcgatctctcggacctctcagataccacgatgcataaggctcaactcatagcctcacataggccatattcttctttaaatgcctttgtaaacacaaatttcaatgataaggacactgaggagaacgcatcgaacaagagaaaaagacgtgcggctgcatccgccaatgagagtgagaggctactcgataaaatcacccaaagcataagaggttacaatgcaattgagtctgtgatcaagaagtgttcttcctacggtgatttggtcacttcgcaaatgaagaaatggggtgtgcaagtggaaggcgataactctgagttggacctgatgaaccttggggaagacgatgacgacgacaatgatgatggcaataacgataataataatagcaacaataacaataccgctggcgcagacgccactagcaaggaaaaagaagatacaaaggccgtagtggaaggttttgatgaaactagcgcagaacctactccagcaccagcaccagcaccagtggaaagagaaacaaaacgaactagaaatacaaccaagccaaaagtggtcgaagatgaagatgacgatgtagatttggaggcaatcgatgacgaattgccgcagtctgagcatgaagatgatgactatgaagaggaggacgaagactataacgatgaggaagaagatgtggaatatgatgatggtgacgatgatgacgatgatgatgatgaatttgtcgccaccagaaaaaacacacacgtggtctccaccacgagcagaaatggccgtaaacctattgtcaagttcttcaagggcaaacccagactgttaagcccggaaatttcactaaaagactaccaacaaacgggtataaactggttgaatctgctataccaaaacaagatgtcatgtatccttgcagacgacatgggtctaggtaaaacatgtcaagtcatttcatttttcgcatatttgaaacaaataaacgaaccgggtcctcacttggttgttgtgccatcatcgacgctagaaaattggttaagggagttccagaaattcgcaccagctttgaagattgaaccctactatggctctttacaagaaagggaagaattgcgtgatatcctggaaaggaacgctgggaaatatgatgttatcgtgaccacgtataacttggctgcaggtaataaatacgacgtttcgtttttgaaaaatagaaacttcaatgttgtggtttatgatgaaggtcatatgttgaaaaattccacttcagagagatttgccaaactgatgaaaattcgtgccaatttccgccttttattaactggtacgccattacaaaataacttgaaggaactaatgtcgctgttggaatttatcatgccaaatcttttcatttccaaaaaggaatcatttgacgcaatcttcaaacaacgtgccaagaccacagacgataacaaaaatcacaacccgctattagcgcaagaagccattacaagagctaaaacgatgatgaagccatttattttgagaagacgtaaggatcaagtgttgaaacatttgccaccaaagcacacgcatattcagtattgtgaattgaacgcaatacaaaaaaaaatatatgataaggaaatacaaatcgtgttagaacataagagaatgattaaagatggtgaattgccaaaagatgcaaaagaaaagtctaaattacaatcttccagttctaaaaatttaataatggcattgcgaaaggcctctctgcatccacttttgttcagaaatatctataatgataaaatcatcactaaaatgagtgatgccatattggatgaacctgcttatgctgaaaacggtaacaaagagtatattaaggaagatatgagttatatgacagattttgagttgcacaaactatgctgcaatttcccgaacacgttatccaaataccaacttcataatgacgagtggatgcaatctgggaagatagacgctttgaaaaaattgctgaaaacaatcattgttgacaaacaggaaaaggtgctgatattttccttattcactcaagtcctggatattctagagatggttttgtccaccttagattataaatttttaagattagatggttccacgcaagtgaatgatagacaactattaatagataagttttatgaagataaggatattcccattttcatcttatcaacaaaggcaggtggattcggtattaatttggtgtgcgcaaataatgttattatattcgatcaaagttttaacccacatgatgacagacaagctgctgatagggcacatcgtgtgggacaaacaaaggaagttaatataaccactttaattaccaaggattccatagaggaaaagattcatcaactggccaaaaataaactagctttagattcgtatatcagtgaagataaaaaatctcaagatgtgttggaaagtaaagttagtgatatgttggaggatataatttatgatgaaaactcgaaaccgaagggaaccaaagaataa

SEQ ID NO: 75366 - DNA, 978 bp, Saccharomyces pastorianus
atgagttttacaggttcattagcgctggcaggtattggtggtttggtgtacaagtttggcggaggccaatcgtatgaaaaattgccatatgtcaacatccccttcaatcagtacttggataaagtttacaagaagcacttcagcaaagttatgagccgtaccagatacgtgctaatgaactttttcaaagacgcatttacaggaggtgcattcatgtacccgttcaaagggtttttagagttcaacaccaataagagcagttactcaacgactatgttaggtatattatcgagttacttgataatgtttgccctggtaagctttgtgtattgggctacaattacgccaatgtacacagcttttttgattgtgctgggccctattgggcttttcattgccatttttcattcctttttgcaagcaaatgttttcactttattgtttatgagactcagtcattttaataatcatttagtggaggtgtgcttagagaagaatggtttagaggagaatttgagtgaagtcaaaccaatcaagtactatgtacctattaactcgatatatttctgggcttactatttcccattcaagttggtcaagtacatgttaggcctgtcggttctttttgtgctgttggttatatcttttttcccacttattggaccaatcctttttcatattttaatttctcctttcatcactcaaatttacttcacgaaggttttacgtttacaaaatttcgacaacatacaaagacgtgaaaatatttatctccacgctggccaatatgcctcatttggtttcttggccggtttgatcgagtccgtgcccattttagcgggctttgccatttctacaaatactattggtagcgttttatttaaccttgatcatccaatggtccctgaaaatttagtagaaactcaagctgaaattgaagcagcaccacaagatatcaatcaacaaccgaatcaataa

SEQ ID NO: 75367 - DNA, 768 bp, Saccharomyces pastorianus
atggatgtgttgaagctgggttatgaactggaccagctctctgatctggtcgaagaaagaacaaggctagtgtcggtgttgaagctcgccccgacctcaaacgataacgttactttgaaacggcaattgggctcaatattggagttattgcagaaatgtgcgcccaatgatgaactgatatcccgatacaataccatactggacaaaattcctgatacggcggttgacaaggagttgtataggttccaacagcaggtggcaagcaatactgatgaggtgtccaaagagtctttgaaaaaagtgcggttcaagaatgatgacgagcttacggtcatgtataaggatgacgatgaacaagacgaggagtcgccgctgccttcgacgcatactccatacaaggatgaaccattgcaatcgcagttacagtcacagtcacagccacagccaccacaacccatggtttccaaccaagaactatttattaaccagcaacagcagttgttagagcaagattcccacttgggcgcactgtctcagtctattgggaggactcatgacatttcgctggaccttaataatgagatcgtttctcagaacgactcgctgctggttgatttagaaaacctgattgataataatggtaggaatttgaacagggcctctcggtccatgcatggctttaacaattctaggttcaaggataacggcaactgcgtgattattcttgtgctgatagtggtgctcctgttgcttctattagtattataa

SEQ ID NO: 75368 - DNA, 780 bp, Saccharomyces pastorianus
atggagccagagagcataggcgatgtggggaaccatgcccaggatgatagtgccagtatagtgtccgggcctcgcaggcgttctactagcaagacatctagtgcgaagaatatacggaactccagtaatatctctccagcatcgatgattttcaggaatttgttgatactggaggatgatttaagacgccaagctcacgaacaaaagatactgaagtggcaattcactttgttcttagcgtctatggccggtgtaggcgcatttaccttctacgaactttatttcacttcagattatgtcaagggcttccatagggttattttgcaattcactctttctttcatttccattactgtagttctttttcatatcagtggacaatatagaagaactatcgtcattccaagaagattttttacctctactaataaagggattaggcagtttaatgtgaagctagttaaagtacaatctacgtgggacgagaaatacacagattcagtaagatttgtgagtcgaacaattgcttattgtaatatttattgtttgaaaaaatttctgtggcttaaagacgataatgccattgtgaaattttggaaaagtgtcacgatacaatcccaaccgaggatcggagctgtggatgtgaaattagtcctcaaccccagagcatttagtgcagagattagagaaggatgggagatttatagagacgagttttgggccagggaaggtgctagaagacgcaaacaagcgcacgaactccgacctaaatcagaatga

SEQ ID NO: 75369 - DNA, 597 bp, Saccharomyces pastorianus
atgactttggcttttaatatgcaacggttggtgtttcgtaatttgaatgttgggaagcgcatgttcaagaacgtccccttatggaggtttaatgtcgccaataaattaggaaagcccttaactcgctctgtagggttaggcggtgctggcatagttgctggtggcttttacttgatgaatcgccagccttctaagttgatattcaatgattctttaggggcagctgtcaaacaagagggtcccttggaaccaaatgtgggcaacagtacggcaattaccgaggaaaggaggaacaaaataagtagtcacaagcagatgtttttgggatcattattcggtgttgttttaggagttacggtggctaagatatcaattttgtttatgtatgtcggtattacaagcatgcttctttgtgaatggttgcggtacaagggatggattcgcattaatttgaaaaatatcaaatctgtaattgttttgaaagatgtagacttgaagaaactgcttattgatgggttattgggtacagaatacatgggttttaaagtattctttacattgagtttcgtattagcaagtttaaatgctaacaaatga

SEQ ID NO: 75370 - DNA, 648 bp, Saccharomyces pastorianus
atgatcaaatctacaattgctctaccctctttcttcattgttttaattttggcgttggtcaattcagtggctgcatcttccagttatgcaccagttgctatcagtttaccagcattcagcaaagaatgcctgtactacgatatggttactgaggatgattccctggctgtgggttaccaagttctaaccggtggtaattttgagattgattttgatattactgctcctgatggatctgtgattactagtgagaaacaaaagaagtactcagactttttattaaaatcgtttggagtggggaagtataccttttgtttttccaataactatggtacagcgttgaaaaaggtagaaattacactagaaaaggaaaaaactttgactgacgagcatgaagctgatgtcaataacgatgacattattgccaataacgccgtggaggaaatagatagaaacttgaacaaaatcacgaagactttgaactatttgagagccagagaatggagaaacatgtctaccgtcaattccaccgaatcaaggttgacttggttatctatattgattatcattatcattgccgttataagtattgcccaagttctacttattcaattcctcttcactggtcgtcaaaaaaattacgtttaa

SEQ ID NO: 75371 - DNA, 1929 bp, Saccharomyces pastorianus
atgtcaaaagctgtcggtattgatttaggtacaacatactcgtgtgttgctcactttgctaatgatcgtgtggacattattgccaacgatcaaggtaacagaaccactccatcttttgtcgctttcactgacactgaaagattgattggtgatgctgctaagaatcaagctgctatgaatccttcgaataccgttttcgacgctaagcgtttgatcggtagaaacttcaacgacccagaagtgcagggtgatatgaagcacttcccattcaagttgatcgatgttgacggtaagccacaaattcaagttgaatttaagggtgaaaccaagaactttaccccagaacaaatctcctccatggtcttgggtaagatgaaggaaactgccgaatcttacttgggtgccaaggtcaatgacgctgtcgtcactgtcccagcttacttcaacgattctcaaagacaagctaccaaggatgctggtaccattgctggtttgaatgtcttgcgtattattaacgaacctaccgccgctgccattgcttacggtttggacaagaagggtaaggaagaacacgtcttgattttcgacttgggtggtggtactttcgatgtctctttgttgtccattgaagacggtatctttgaagttaaggccaccgctggtgacacccatttgggtggtgaagattttgacaacagattggtcaaccacttcatccaagaattcaagagaaagaacaagaaggacttgtctaccaaccaaagagctttgagaagattaagaactgcttgtgaaagagccaagagaactttgtcttcctccgctcaaacttccgttgaaattgactctttgttcgaaggtatcgatttctacacttccatcaccagagccagattcgaagaattgtgtgctgacttgttcagatctactttggacccagttgaaaaggtcttgagagatgctaaattggacaaatctcaggtcgatgaaattgtcttggtcggtggttctaccagaattccaaaggtccaaaaattggtcactgactacttcaacggtaaggaaccaaacagatctatcaacccagatgaagctgttgcttacggtgctgctgttcaagctgctattttgactggtgacgaatcttccaagactcaagatctattgttgttggatgtcgctccattatccttgggtattgaaactgctggtggtgtcatgaccaagttgattccaagaaactctaccattccaacaaagaagtccgagatcttttccacttatgctgataaccaaccaggtgtcttgattcaagtctttgaaggtgaaagagccaagactaaggacaacaacttgttgggtaagttcgaattgagtggtattccaccagctccaagaggtgtcccacaaattgaagtcactttcgatgtcgactctaacggtattttgaatgtttccgccgtcgaaaagggtactggtaagtctaacaagatcactattaccaacgacaagggtagattgtccaaggaagatatcgaaaagatggttgctgaagccgaaaaattcaaggaagaagatgaaaaggaatctcaaagaattgcttccaagaaccaattggaatccattgcttactctttgaagaacaccatttctgaagctggtgacaaattggaacaatctgacaaggacaccgtcaccaagaaggctgaagagactatttcttggttagacagcaacactactgccagcaaggaagaattcgatgacaagttgaaggagttgcaagacattgccaacccaatcatgtctaagttgtaccaagctggtggtgctccaggtggcgctgcaggtggtgctccaggcggtttcccaggtggtgctcctccagctccagaggctgaaggtccaaccgttgaagaagttgattaa

SEQ ID NO: 75372 - DNA, 648 bp, Saccharomyces pastorianus
atgggtgtcaccagcggtggccttaacttcaaagataccgtcttcaatggacaacaaagagacatcgaaagtaccaccacccaagtcgaaaatcaagacgtgttcttccttacccttcttgtccaaaccgtaagcaatggcagcggcggtaggttcgttaataatacgcaagacattcaaaccagcaatggtaccagcatccttggtagcttgtctttgagaatcgttgaagtaagctgggacagtgacgacagcgtcattgaccttggcacccaagtaagattcggcagtttccttcatcttacccaagaccatggaggagatttgttctggggtaaagttcttggtttcacccttaaattcaacttgaatttgtggcttaccgtcaacatcgatcaacttgaatgggaagtgcttcatatcaccctgcacttctgggtcgttgaagtttctaccgatcaaacgcttagcgtcgaaaacggtattcgaaggattcatagcagcttgattcttagcagcatcaccaatcaatctttcagtgtcagtgaaagcgacaaaagatggagtggttctgttaccttgatcgttggcaataatgtccacacgatcattagcaaagtgagcaacacacgagtatgttgtacctaa

SEQ ID NO: 75373 - DNA, 1620 bp, Saccharomyces pastorianus
atgcatcgtaaatcattaaggagggctagcgctattgtgccttccgctccctatcgaaagcagattattagcaatgcacgcaataaaccaagccttttctctaaaattaaaactttctttacccaaaaagattcagccagagtgagtccaaggaataatgttgctaataaacaaccacgcaatgagtcttttaacagaagaatctcaagtatgcctggaggttatttccattctgagatatccccagattctactgtaaaccgttccgtagttgtttctgcagtgggtgaagccagaaacgacattgagaataaagaagaggagtatgatgaaacacatgaaactaacatctccaatgcaaagcttgcaaacttttttagtaaaaaaggtaatgagcctttatcagaaattgaaatagagggtgtgatgtcattgttacaaaaatcaagcaagtccatgataacttcggaaagagaacaaaaatcagccgaaggtaataatatcgaccagtcgcttatcttgaaggagtcaggaagtacaccaatcagcatatctaatgcgccgaccttcaacccaaaatatgatacttcaaatgcgtcaatgaatacgactttgggaagcattggttcaagaaaatacagtttcaattattctagcctgccctcaccatacaaagcaaccgtttatagatatagtgcagcgaaaaagatccctgatacatacacagccaacacatctgctcaaagtatagcatctgctaaatcggtaagaagtggtgtttcaaagtcagctcctagtaagaaaataagtaatacagctgcggcattggtctcactattagatgaaaatgacagtaagaagaataatgcagcttcagaacttgctaatccatactcctcttctgtaagccaaatacgcaaacataagagagtttctccaaatgctgcaccaaggcaagagatcagtgaagaagaaactactgttaagccattatttcaaaacgttcctgaacaaggcgaagaaccaatgaaacaactgaacgccaccaaaatttcaccatctgcgccaagcaaagattcttttactaaatacaaacctgcaaggtcctcatccttacgctcaaatgtcgtcgtagctgaaacctcacctgaaaagaaggatggtggagataaacctccatcctctgcttttaacttctcgtttaatacttcaagaaacgttgaacctactgagaatgcttataagagcgagaacgcaccatctgcatcatcaaaggaattcaattttaccaacctacaggcgaagccgttagttggaaagccaaaaaccgaacttacaaagggcgattctactcccgtccaaccagatctttcggttactcctcaaaaaagttcatcgaaaggctttgtttttaatagtgttcaaaagaaatcacggtccaatctttcacaagaaaacgataatgaaggtaaacatatcagcgccccaattgataacgacttttcggaggaaaaggcggaagagtttgatttcaatgttcccgtggtgtctaagcagctaggaaatggcttggttgatgaaaataaagttgaggctttcaagtccctatataccttttga

SEQ ID NO: 75374 - DNA, 660 bp, Saccharomyces pastorianus
atgcttttaacctctcttttacaggtttttgcctgctgtctagttttaccagctcaagttactgcgttctattattatacttctggtgctgaacgtaagtgcttccacaaggaattgtctaaaggtactttgttccaagcaacttacaaggcacaaatttacgatgaccaattacaaaattacagagacgctggtgcgcaagattttggtgtcttgattgatattgaggaaacttttgatgataaccacctggttgttcatcagaaaggttcagcaagtggtgatttaactttccttgcgtctgattcgggtgaacataaaatctgtattcagcccgaagctggtggctggttgattaaggctaaaacgaagattgacgttgaattccaagtaggctctgatgaaaagttagattctaagggtaaagccactattgacattctacatgccaaggttaacgtcctaaactccaagatcggcgaaattagaagagagcaaaaattgatgagagatcgtgaagctacctttagagacgcctctgaagctgttaattctcgtgctatgtggtggattgtcattcaattaattgttctcgctgttacttgtggctggcaaatgaaacacctgggcaaatttttcgttaagcaaaaaattttatga

SEQ ID NO: 75375 - DNA, 1281 bp, Saccharomyces pastorianus
atgaacatccttttacaggatccattcgctgttcttaaggaacatcctgagaagctcacacatacgattgagaaccctttacgcactgaatgtctccagttcagtccttgcggtgattacctggctcttgggtgtgccaatggagcacttgttatttacgatatggatacgttcaggcctatttgtgtcccaggaaatatgttgggagcacatgttcgacccattacatctatcgcatggtctccagatggtagattgttgcttacaagctctagagactggtcaataaaactgtgggatctttcaaagccaagtaagcctttgaaagaaatacgattcgattctccaatttggggttgccaatggctggatgctaaaaggcggctttgtgtagctacgatatttgaggaaagtgacgcatatgttattgacttcagcaatgatccggtcgcaagccttctcagtaaatcagacgaaaaacaattgagttcgacacctgatcatggatatgttcttgtttgtacagtacataccaaacatccaaatattattattgtgggaacttcaaaaggttggctagacttctataaattccattctctatatcaaacagaatgtattcattcccttaaaatcacgagttctaatatcaaacatttaattgtctcgcaaaatggtgaaagattagctattaactgctccgatagaacaataagacaatacgaaataagtattgatgatgaaaactctgcggttgagttgaccttagagcataagtaccaggatgtgattaataaattacagtggaactgtatcctctttagtaataatactgccgaatacttagtcgcttctacacatggttcttctgcacatgaactatacatctgggaaacgactagtggaacgttggtgagagtcctggaaggggctgaagaggagttgatagatataaattgggacttctatagtatgagtatagtgagtaatggttttgaatctgggaacgtgtatgtgtggtctgttgttattccgccaaagtggagtgctttggcgccagattttgaagaagtagaagagaatgtcgactatttggagaaggaagatgaatttgatgaggtcgatgaggcagaacagcagcaaggactagaacaagaggaagaaatagcgatcgatcttcggacgagagagcaatatgatgttagaggtaataacttgcttgtagaacggttcacaatccctacagattatacgaggataattaagatgcagtcatcatag

SEQ ID NO: 75376 - DNA, 1866 bp, Saccharomyces pastorianus
atgagcagtgttcaactttcgaagggcgattttcatagcatcttcaccaataagcaaaggtacgataatcccaccggtggcgtttatcaagtttataacaccaggaaatctgatggagctaacagcaacagaaagaatttgatcatgatttccgatggtatttaccatatgaaggctctgttgagaaaccaagctgcatccaagttccagtcaatggaactacaaaggggtgatatcattcgcgtgataattgcagaacctgctattgtcagggaaaggaagaaatacgttcttttagtagatgactttgagttggtccagtcgcgtgctgatatggtcaaccaaactagtacttttttggataactatttctcagagcatccaaatgaaaccttaaaagacgaagatataactgacagtggtaatgttgccaatcaaacaaacgccagcaatgctggtgtccctgatatgctgcattcaaactcaaacttgaatgcaaatgagagaaaattcgccaatgaaaaccctaactcgcaaaaaaccagaccaatttttgccatcgaacaactgtctccataccaaaacgtttggactatcaaagcaagagtttcctacaagggagaaattaaaacgtggcacaatcaaagaggtgatggtaaactattcaatgtcaacttcttggatacctctggagaaatccgagccaccgcgtttaatgattttgctacaaaatttaacgaaattttacaagaaggcaaagtatactatgtatcaaaggcaaaactccaaccagctaagccccaatttactaatctaacacacccttatgaactgaatttggatagagacactgttatagaagaatgtttcgatgaaagtaatgttccgaaaacccatttcaatttcatcaaactagatgctattcagaaccaggaagtaaattccaacgtagacgtcctcggtattatccaaactataaacccacattttgagctaacttcaagggctgggaagaaattcgatcgtcgtgacatcacaattgttgacgactctgggttttctatctctgttggcctatggaatcagcaagcccttgatttcaaccttcctgaaggttctgttgctgccattaaaggtgttcgtgtgacggattttggtggcaaatctttgtctatgggattttctagtaccttgattccgaatccagaaattcctgaggcatatgccttaaagggttggtatgattccaagggccgcaacgcaaacttcatcactctaaaacaagaacccggtatgggtggtcaatcggctgctagcttaacaaaattcattgctcagcgtattactattgctagagctcaagctgaaaatctaggaagaagcgagaaaggtgacttttttagtgttaaagctgctataagtttcttaaaagttgataattttgcatatcctgcctgttctaatgagaattgtaataagaaagttttggaacagcctgatggtacctggagatgtgagaagtgcgacaccaataatgcaaggccaaattggagatacatcttgacaatatcaattattgacgaaaccaatcaactatggctcactttatttgacgaccaagctaaacaattattgggtgttgatgctaatacattaatgtctttgaaggaggaagaccccaacgaattcacaaaaattactcaaagtatccaaatgaacgaatatgactttaggattagagcgcgtgaggatacatacaatgatcaaagcagaattagatatactgttgctaacctacacagcttgaattacagggctgaagccgactatcttgccgatgagttatccaaggctttgttagcttaa

SEQ ID NO: 75377 - DNA, 921 bp, Saccharomyces pastorianus
atgtcaattacgaagactgaactggacggtatattgccattggtggccagaggtaaagttagagacatatatgaggtagacgctggtacgttgctgtttgtcgctacggatcgtatctctgcatatgacgttattatggaaaacagcattcctgaaaaggggatcctattgaccaaactgtcagagttctggttcaagttcctgtccaacgatgttcgtaatcatttggtcgacatcgccccaggtaagactattttcgattacctacctgcaaaattgagcgaatcaaagtacaaaacgcaactagaagaccgctctctattggttcacaaacataaactaattccattggaagtaattgtcagaggctatatcaccggatctgcttggaaagagtacgtaaaaacaggtactgtgcatggtttgaaacaacctcaaggacttaaagaatctcaggagttcccagaaccaatcttcaccccatcgaccaaggctgaacaaggtgaacatgatgaaaacatctctcctgcccaggccgctgagctggtgggtgaagatttgtcacgtagagtggcagaactggctgtaaaactgtactccaagtgcaaagattatgccaaggagaagggcatcatcatcgcagacaccaaattcgaattcggtattgacgaaaagaccaatgaaattattctagtggacgaggtgctaacgccagactcctctagattctggaacggtgcctcttataaggtaggagaatcccaagattcttacgataagcaatttttaagagactggcttactgctaataagttgaacggtgttaacggcgtcgaaatgccccaagacattgtcgacaggacaagggccaaatatatagaggcttatgaaacattgacagggtctaaatggtctcattaa

SEQ ID NO: 75378 - DNA, 1308 bp, Saccharomyces pastorianus
atgcatagacgacagtttttccaagaataccgtagtcctcagcagcagcagggacacccaccaaggtcagaataccaagttctcgaagaaattgggagaggttcatttgggtctgtacgaaaagtcatccatatacctaccaagaaacttttggttagaaaggatatcaaatatggccatatgaatagcaaagagagacaacagctgatcgctgaatgtagcattctatcgcagttgaagcatgaaaatattgtagaattttataactgggacttcgatgaacaaaaagaagtgttatacctttatatggaatactgttccaggggtgatttatcccagatgattaagcactacaaacaggagcataaatatataccagaaaaaattgtgtggggtatcctggcccaattattgactgcgctctataaatgtcattatggtgttgaattgccaactttgaccacaatatatgaccggatgaaaccaccggtaaaaggcaaaaacatcgttatccatcgtgatctgaaaccaggaaatatattcttaagctatgatgatagcgattacaatattaatgaacaagtagacggtcacgaggaagtgaatagtaattattacagagaccatagagtgaattcagggaaaagggggagccctatggactatagtcaagttgtggtaaagttaggtgattttgggttagccaaatctctggaaactagtattcaatttgccacaacatacgtcggtacaccatattacatgtcgcctgaagtgttgatggaccaaccatactccccactatccgacatctggtcactaggttgtgttatttttgagatgtgttcgttgcaccccccatttcaggcaaaaaattatctcgagctacaaactaagattaaaaacaggaaatgtgacaccgtccctgagtattactctagagggcttaatgccataatacattcaatgatagatgtgaacttaagaaccaggccttccacttttgaattactgcaagatattcagatacgaactgcaagaaagtcgttgcaattagagagatttgaaaggaagttactggactatgaaaatgagctgacaaacattgaaaaaatcctcgagaagcaagctattgaatatgaaagagaactgagtcagttgaaggaacaatttacccaggcagtggaggagcgagccagggaagtaattagcggtaagaaagttggtaaggttccagaatctataaacggatattatggtaaaaaatttgccaaacctgcataccactggcaaacaagatatcgataa

SEQ ID NO: 75379 - DNA, 708 bp, Saccharomyces pastorianus
atgcaaaccccttcagaaaataccgacgtcaagttggatactctcgacgaacccagtgcacatttaatcgaggaaaatgtggctcttccagaggatacattcaattcgtaccggagttatatacttaatgaaatcgctcgttgtaaaccgctaatgattatgttcctaatacctgtgtgtttggttttattgattacgttttttcatgatatcaaaggtatccttgtgtttttagtgatttctcttatcctctctattatcattttattgatcggtataactgccttcgtgtctgagaccttgaataagggttccataattaagcttttagtagaagtcattacacgtaaaccagcagtaggggggaaggaatggagaataatcgcatataatatgaaccagtatctgtttgaccatgggatatggcatactccgtattactttttttgtgaacataggtgccatgaatttttcaaaagccttatcgaacagacaaggtcgaatgcacatttgaattcaccaacgaacggtgcagagaatacgcagtcaaacacaccagcaaaagaggtttcaaatgagatggtaaaaccttatatctttagttctgatccagttttagaagcttaccttattaaagctgcggaaattgacaaagaagctgaatttgagtattggagaaagcaatacccagaggttgatttgccttag

SEQ ID NO: 75380 - DNA, 705 bp, Saccharomyces pastorianus
atgcaaaccccttcagaaaataccgacgttaagatggatactctcgacgaacccagtgcacatttaatcgaagagaatgtagctcttcccgaagacacattcagttcacatctgagttatgtactttatgaaattgctcattgtaaaccgatcatgtttatgatcatcataatcgtgagtttgatctcattgattgtgctttttcatgataacgacgggtgcactgtgatcttagtgatgtcccttatagtagcctccatggctttagtggtggttgcagcattcacattcgggaaagcgatcactgaacaggagttcatgataaagcttttagtggaggtgatcgcacgcaagcctgcggggaaggaatggggtactgtcgcatataatatgaaccaatatctattcatgaagagactatggtataccccgtactatttctatagcggcaagaagtgccatgagttcttcaccactcttatcaaggaagtgaattctggttcgcactcggattcctcatcgaatagtgccgaggatacacaatcacctgtctcagcagggaagacttcaaatggtctaaacaactttgatagtattagatcagaccctattttgatggcatatgttttgaaggcaacacaaatagaaaaggaggctcaaagtgaatactggagaaagcaatatcctgacgctgatttaccttga

SEQ ID NO: 75381 - DNA, 225 bp, Saccharomyces pastorianus
atgaataaatatctatttgaccataaaatatggagtactccttactacttttattgcgaagaagattgccaccgtctttttctaagttttattgagggaagaactttcgagaagccaacaagcaacgctgaggaaaatgtacaggagactgaagctggcgaatctttcacattaaatcccggagaagattttcaaaattgctttccaagacagcggatattgtag

SEQ ID NO: 75382 - DNA, 2064 bp, Saccharomyces pastorianus
atgccaaacttaaagagactacccctcccgccactgcaggacacgctcaaccgctacctggcacgcgtggaacccctgcaggacgagcgccaaaaccgccgtacgcgccgcactgtgctctccgcagaaaacctggacgcattgaacacgctgcacgagcggctgctagaatacgacgcacggctcgccgaaagcaacccagagtcctcatacatcgagcagttctggtatgacgcatacttgctatatgatgcaactgtcgttctcaacgtcaacccgtacttccaactgcaggacgacccaaccatcaaagacacaccagagacggcggcacagggcccctatggcgcacacacggtgcaggtacgtcgtgccgcacgactcaccacctctattctcaagttcatccgccagattcgccacggcacgctccgcacagacaccgtgcgcggcaaaacgccgctgtcgatggaccagtatgagcggctattcggctccagtagaatccctccgggtcccggcgagccctcttgccacttgcaaacagacgccacgtcgcatcacgtggtggcgatgtatcgtggccagttctactggttcgacgtgctggacacacgcaacgagcccatcttcgccaccccagaacaactggagtggaacctctactcgatcatcatggacgcggaatccgccggaagcggatccgcgccctttggcgtgttcaccacagagtcgcgccgggtgtggtccaacatcagggactatctgttccatgcggacgactgcaccaactggcgcaatctcaagctgatcgactccgcgctgttcgtggtctgtctcgacgacgtggcgtttgccgccgatcagcaggacgagctcacgcgttcgatgctgtgcgggacttctaccatcaatctcgacccccaccaacaccagccgccattgaacgtgcagacaggcacctgtctcaaccgctggtacgacaagttacaactgatcgtgaccaagaacggtaaggcgggcatcaacttcgaacacaccggtgtggacggccacactgtgctgcggctcgccacagacatctacacagactcgatcctgagcttcgcacgcggtgtcaccaagaacgtcgtcgacatctttagcgacgacgatggaaaaccatcgtcgtcgtcgttggcctcggcggctcactccgccaacttgatcaccatccctcgtaaactggaatggcgcactgacaatttcctgcaatcgtcgctgcactttgccgagacgcgcatctcggacttgatctcgcaatacgagtttgttaatcttgacttctccaactacggcgcgtcccatatcaagacagtgttcaagtgctcgccagacgccttcgtgcagcaggtgttccaggtcgcatacttcgcgttgtacggccgcttcgagaccgtgtacgagcctgccatgaccaaggcgttccaaaacggccgcacagaggccatccgctccgtcacggcccaatccaagctctttgtcaagtcactactggaccaggatgcctcggacgccaccaagattcagctcttgcacgacgcctgtacggcgcactcgcaaatcacaagggaatgctcccagggtctcggccaggaccgtcacttgtatgcgctctactgcctctggaaccaatggtacaaggacaagttggagctcccacccatcttccgcgacaagtcctggactaccatgcagaacaacgtcttgagcacctccaactgcggtaacccctgcctcaagagcttcgggttcgggcctgtcaccgccaacggcttcggcatcggctacatcatcagagaccactccgtctctgtggtggtgtcctcaaggcatcgccagactgctcggtttgcgtcgctcatggaaaagtcgctgctggagatcgaccgcatcttcaaacggcaacaagctcgcgcagcaaaacccgctgccagagccactgctagcgccaacaccaaatcggaagacatgaaatacctgttgtccggctacgattacttcgacgtgagcgtgtccggttga

SEQ ID NO: 75383 - DNA, 81 bp, Saccharomyces pastorianus
atgagattaaattacagtcgctgctattatagtagccagcggcggcgccagtcacttccaaagcgttttcctcttatttag

SEQ ID NO: 75384 - DNA, 306 bp, Saccharomyces pastorianus
atggagatgctcttgtttctgaacgaatcatacatctttcataggtttcgtatgtggagtattgttttatggcactcatgtgtattcgtatgcgcagaatgtgggaatgcctattataggggtgccggggggtgccttgaaaaacccttttgcgcgcctgttaagtttccgttttcagtcaaaaagaatatccgaattttagatttggaccctcgttcagaagcttactgtctaagccatcatttggtgtgtcctaaacggtttccatgcaaagcaacatctttgttactcattcctgaaggttga

SEQ ID NO: 75385 - DNA, 591 bp, Saccharomyces pastorianus
atggttgataataggcgtacgtttacggcaccccaaagcttacttgaaacaaatcttacttttccgaatgatgaaccgtcacttactacaatcacagttacgcgagaaagatgtgttgatccaagcttgatagattcatttttgaggtttctaaggcatggaagtgatgatataataagacaaaaattaaacaactataggaaaggctctattaatggaaaaaataagtgtaaggaatttttgaagcaagaactatatccgaactggcaaatacggaataatataatttcattttgcgaaaaagaggcagcagagatgaagaacgagaccgatcagcagtgcggtaataataaaaagattactgcggaaccacttatagacgcaagaattgatccttacgctgcaagagaaagagcagagaaacaggaagctcaatataaggattggacgaaggtgacagagtgggtggcaaataatagaaaaatagaacaaattttaacttctacaacagagggcattttaaggcaaaactgcgagcaaaataatgactacttgaaggagtttacgcaattctgcaaggacaacagttga

SEQ ID NO: 75386 - DNA, 3033 bp, Saccharomyces pastorianus
atgtttaagaaaagcaggcatttgaagaatgtgtcaaatgctatcaaatccgcgagagttcatgacgtctcaaatggtattaactccaaatttttcgatactaagaaaatatgcacatacggcataaatggacgaatcactgttaccacattcgactatactcaaagccttttggcagttgcaactactgctggggagatacatgtttatgggcaaaagcaaatagaggtcgtatttacgttaaaaaatcgacctcaaattaaacacatgcggtttattaaaggaatttatctgatagctgtagatgagaagagcaacataatagttctttcagtacactcgaaacagattctaactactgttttctgtccaaacagcatcacttgtattgagactgatccgtccttggattggatgctgattggcctcgagagtggatccatattgatctatgatgtggatagaaatcaaatgtccaaattgaaaattgaaaacttccagaaaagcgtgtttttgccaaaagagaggctatcaccggttatttctatccaatggaatcctagagacataggaacgatacttatatcatatgagcatattacagtcatatattctttcattgactacaaagtcaagcaacattttttttaccaattagaaccgtatgctccgggcggtgatctatccacaaacatagaaaagaaacgcactccaaaggtcattcagtcactttatcacccaaattccttacatatattaactgtccatgaagataattccttggtattttgggatgtcaatagcggtaaactgattcaagctagaagtatatttgaaacacatgtgaattttccaaatcctgccttgaaagactgttcctttacagaaacacccgctatctttaaagtaagctggctttgccagcgtaatcctgagtatacatcgttgttgattgcaacaaaagctacagaaaatccctgtttacctcaggaaataaccatgattgacttaggcggcacaccaatgtattctgtgacatcatttgacgcaatgagcaagtactatgctaaaccggttcaacaaaaactattttcgttgattggcaaagctccactaataaattttctacccttgccgaaggcttctccatattttggtggatgccatgacacaaacctcattttattacttttagaagatggcgaacttgaaacattgatatacccagcaggctcttttagttccaaggcctccattttccctcggagcttagcatgggttcgaccaacggttactacttgtatagcgcaatcagttcaaaaaaatctttggctggggatgatgacaatcgctcaaagtgaatcgtttttaaaaggtggtattcctgccaccagaaatattagaaggcatgagaccagatctgctttactaactgggcatagtaatggttcagtcagaatatgggatgcttcacacagtgaagtaactgacaacgctgtatttgaagtgaatactgctaaagtacttaacagagctactaacctggccataaaaaatatctcctttgcatcggaaacattggaattggcggtatcatctgaggttggggatgttattcttttcaaattcgaaacaaacaagttttacggacaacttcccaaaagcgatgcattgcaattgaagtttagcagattttcattggatgattcaaaaactattttagttgatgtttcggatagagggcctacgaacgttaaacaaggctttataccaagtacggtaatacatgctaaaaaaggtgcggtgtccgcaatcatgaatagtaatatcgggttcgttgccgttggtttcattgaaggaaccttaataatattggacagaagaggcccggctataatcttcaatgaaaatattagggtcatttctaaaactggtagctcttacgtttcaaccgttcacttttgcgtcatggaatatggagatgatgggttctctagtattttgatgctatgtggaacggatatcggggaattgatgactttcaaaatactgcctgcaactaatggaagatttgaggttaaattcactgatgcaacaaagaccaacaatcaaggaacaattctaggaataaattcttttgccaaagatactggctacagttgttctgctactatatcaaagatgcagggtttaagcaagggtatcgcaatacctggatttgttactatcagtggcgcaaatgacattcgtttagtatcaccaggtaaatctaaggacactcatgcgcttttcaagtatccaattgccactagtggattatcatttattcccattattgacggtaaaggagaaagaaagctttcaactattatgatcgttttgctaattaatggagatattaaagttttgacagtacctgagcttaaggaagtcaaaaatctacgctgcccggtccctctaagcgctcaatacgttgaaaattcatctatattagaaaatggtgacattgtcattcgcacagggaaattccaagcctctttgatttcagtacttaatgaaagtgccaccggaacgaatcatactgctgacatatcacaacatactcctattgataccttgtacaatcctgatttaaagattggttataggcctcaagtgaattccttacaatgggctagaggaactatttattgcacaccatatcaacttgatgagctactgggcggtatagaaaggcccgaatcgaagtatgaggaaagcgcaattgctcgaggatgcatatcttccagtagtagtaatgcagccagaaagttacctcccggtacggaagatcacaggtatgccagacctgtaagaagctctggaagaagtaatggatatggtgtccttaaaagtgtttctagggcaattgaaactcgtttagacacggtagaaaccactattaatgactatgcaaccacaatgggacaaaccatgaatgacgcaatggaagaaacgggaagggatatgatgaagagcgctgtaggtttttag

SEQ ID NO: 75387 - DNA, 3456 bp, Saccharomyces pastorianus
atgagtttttcacaattggagcagaacattaaaaaaaagatagccgtcgaagaaaatattattcggggagcttctgccctcaagaaaaagactagcaatgttatggtcattcagaaatgtaatacgaatattagagaggcacgtcaaaatcttgagtacttggaggatagcttaaaaaaattacggttgaagaccgctcaacaaagtcagggtgaaaatggcagcgaagataatgagcgatgcaattcgaaggaatacgggtttctttctaccaaatcgccaaatgaacacatattttctcgtttggatttagtaaaatatgattgcccttctttggcgcaaagaatccaatacatgttgcaacaattagaattcaaattacaggtggaaaagcaataccaagaagccaatactaaattgactaaattgtatcaaattgacggtgatcaacgtagtagttctgcggcagaagggggtgctatggaatccaaatacaggattcaaatgcttaacaaagctttgaagaaatatcaagctattaacgttgactttgatcaatttaaacaccaacccaatgacataatggataatcaacaaccgaaattccgaagaaaacaactgactggcgttctaacaattggaataactgctgctagagatgttgaccatatacaatcaccgatgtttgccaggaagccagagagctacgttactataaaaatcgatgatacgatcaaagccagaacgaagccttctagaaatgacaggtggagtgaagattttcaaattccagttgaaaaagggaatgaaatcgagattaccgtatatgataaggtgaacgactcgctcattccagtggctataatgtggttactgctttccgatatcgctgaagaaattcgtaagaagaaagccggacaaacaaatgaacaacaaggatgggtcaatgcttcaaacattaatggtggttcttctctcgctagcgaagagggaagcacattgacttctacatactcaaactcagccattcagtctacttcagcaaagaatgtgcaaggcgaaaatacatcaactagtcaaatcagtacgaattcatggtttgtcttagaaccatccgggcagattttgttaacactaggattccacaagtcttctcaaatagaaaggaagcagttgatgggtggactacatcgtcatggtgctattatcaataggaaagaagagatattcgaacagcatggccaccactttgtacaaaaatcattttacaacattatgtgctgtgcatattgtggtgatttcctccggtatactggattccaatgtcaagattgtaaatttttatgtcacaaaaaatgttacaccaatgttgttactaagtgtattgctaaaacttctactgatacggatccggacgaggcaaagttgaaccaccgtattcctcatagattcctgcctacttcaaaccgtggtactaaatggtgctgtcactgtggttatattttaccatggggtagacataaagtacgcaaatgttctgaatgtggtataatgtgtcatgctcaatgtgctcatttggttcccgatttctgtggcatgtcgatggaaatggctaataaaattctgaaaacgattcaagacacaaaacgtaatcaagagaaaaagaagaggacagttccgtcggcacagttggggtcatctattggtactgccaatggtagtgatctttccccatccaaattagctgaaagggcaaacgctcctttgcctcctcagccaagaaaacatgataaaactccttcgcctcagaaggtaggaagagattctccaactaagcagcatgatcctattattgataaaagaatttcactacaaacgcacgggcgtgagaaactaaataaatttatcgatgaaaatgaggcctatttaaattttacagaaggtgcacaacaaaccgccgaattttcatcaccagagaaaacactggatccaacgtcgaatagacgttccttgggactcactgatttatctattgagcatagtcaaacttgggaatctaaagatgatttaatgagagatgaacttgaactgtggaaagcacaacgtgaggaaatggaacttgaaataaaacaagatagtggggaaatccaagaggatctagaagttgatcacattgatctagagacaaaacagaaactagactgggagaacaaaaatgatttccgtgaagctgatttgacaatagattccacacacacaaatccattccgcgatatgaatagtgaaacctttcaaattgaacaagaccatgcttcaaaggaagtactacaagaaacagtgtccttggctcctacaagtactcatgcctccagaaccactgatcaacaatctccgcagaaatcacaaaccagcacaagcgcaaagcataaaaagagagcggctaaacgtcgtaaggtttcattagataatttcgttttactcaaagttcttggtaaaggtaattttggtaaagttattttatctaaatcaaagaatactgacaggctttgtgccataaaagttctgaagaaagataatattattcaaaatcatgacatcgagagtgcaagagcagaaaagaaagtatttttgttagccacaaaaactaaacacccattcttaaccaatctatactgctcttttcaaactgaaaaccgtatatattttgctatggagtttattgggggcggtgacttaatgtggcatgttcaaaaccaaagactatctgtaagaagggccaaattttatgccgccgaggtcttactggctctgaaatattttcatgataatggtgtaatataccgtgatttgaagttggaaaacattctattaactccagaaggtcatataaaaattgccgattatggtttgtgtaaagatgaaatgtggtatggtaatagaacttctacattttgtggcacaccagaatttatggctccagaaattttaaaagagcaagaatataccaaagctgtcgattggtgggcatttggggtgctgctatatcaaatgctactgtgccaatctccattctcaggagatgacgaagatgaagtttttaacgctatccttaccgatgaacccttatacccaatagatatggcaggtgagattgtacaaatattccaaggcctattaacaaaagatcctgaaaagaggttgggtgctggtcccagggacgcagatgaagttatggaagaacctttcttccgtaacatcaactttgacgatatcttaaaccttcgcgtgaaaccaccctacatcccagaaattaaatctccggaagatacatcatatttcgagcaagaattcacctctgcgccacccacacttacacctctgccctctgttttgacaacgagccagcaagaagagtttagaggattttcctttatgccagatgatttggatttatga

SEQ ID NO: 75388 - DNA, 1461 bp, Saccharomyces pastorianus
atgatgaacaataacgaaagtgaggctgagaaccaacgtctactggacgaattaatgaaccagacaaaagtcctccaggaaactttagatttttcgttagtgacacccattccacaccacaatgatgattacaagatacacggaagtgcctacccaggtggtgagactcctgcccaacagcatgaaaaactctcatacatcaatacgcacaactctaacgataataataacttaatgggcagtcaagcgaggtccaattcacaaactcctacagcttcgaccatatatgaggaagcagaatcgcaaccgtcttacctggatgatatgtttagaacaagccaaggcggtagacctgtcactcaaaattccatatcttccatagggcagggtcccttgagatcatcttattctatggcttacgactcacctgtggatagagcaatgaatactccattacagcaacaagaaggcttaaaagctgagttaccacatgactttttatttcagcatggcaccgatgacacaatgtataacttaactgatgatttgagctcctctttatcttctagcatcaattctgatatgatgacaccaaacacatattcatcatcattttcttataatccacaaagcttgggcccagcatccgtatcttccacatattccccaaaggtaagatcaccatcatcgtcatttcgtgcaggaagtttcctttcatcttcttttaggcatggtagcataaacacacccagaacaagacacacttcaataagtagcaatatgactgaaaatataggacctggaagtgttccaaagattttaggcgtgttaacttctgatgagaaactgaggcgcaaaagagagtttcataatgccgtcgaaaggagaagaagagaattaataaagcaaaagataaaagaactcggccagttggttccaccatctttattgaattacgatgacctaggtaaacaaatcaaaccaaataagggtatcattttggatagaacggtcgaatatttacaatacctggccgaaattttagaaatacaagcacgaaaaaagaaggcgttattggcgaagataaaagaattggaagagaagaaaagttatgtcgcagcgttatctccttttaccaataaccaccatgccagttcggggcaaaataatagcgagaatagtgaggaaagaattatagatattagatctgtcccaaatgctttgatgaatgaacaaaatactaaggctgaattgcataattgggagccaccgttatatgattcggtcggtaaccacaatcatgctggcactatggagagtcatccacatacaaacattcatgaagaattaaaggagttcttatcaggcgatttgattgaagccgaagataatgcaaaattaatgtttggagatgacaactctaatccagctgactatcttttagaatttggttcggggtag

SEQ ID NO: 75389 - DNA, 648 bp, Saccharomyces pastorianus
atgagcgaggaaccaccttctgaccaggtcaatagtctccgtgactcattgaatcgatggaatcaaacaagacagcagaactcgcagggttttaatgaatctgcgaagacactgttctcaagctgggcggattctctcaataccagggcccaggatatatatcagacgttgcctgtatctagacaggacttggtgcaagaccaggagccgtcgtggttccaattgtcaagaacggaaagaatggtactttttgtctgttttcttttgggtgcaacagcctgtttcactctttgtactttccttttccccgttctagccgctaaaccaagaaagtttggtttactatggacaatggggtccctactatttgttcttgcgtttggggtacttatgggaccactcgcgtacttaaaacatttgactgcaagggaaaggctgcctttttcgatgttctttttcgccacatgcttcatgacgatttatttcgcagccttttccaagaacacggtgctgactattacatgtgctcttcttgaattagttgccgtcatttattatgctatttcatatttcccattcggtgcaacaggtttgaggatgttaagctctgctggtgtcaattcggcaagaggtgttctgcgcatctga

SEQ ID NO: 75390 - DNA, 3354 bp, Saccharomyces pastorianus
atgccgtttataacatcaagaccggtggcgaaaaattcatcccactctttatcagaaacagatttaaaccagtctaaaggacagccgtttcaaccctctcccaccaagaaattagggtccatgcaacaacgaagaagatcctccaccattaggcacgcgctatcatctttacttggtggcgctaatgttcactcacctgccgtcttgaacaacacaacgaaaggcggcaataataacggcaacatcagaagcagcaatacagacgcccaactccttggcaaaaaacagaacaaacagccgctgccagacgcaaggcgacacagtaccactgccatacagggctctatcagcgatagtgctactacgactccgagatcctcgacttccgacaccaaccgtcgcacttcgggaagattgtcggtagaccaagagcccagaatctctggggggcgctattcacagattgaggaggatagcacagtactagattttgatgatgaccataactcatcagctgtagtgtcaagcgatttatcatcaacttctctaacaaggttggcaaactcgaaaaagtttaacgagcaatttctcatagaatatttaaccgctagaggtctcctgggcccaaaaaccgttctatccaatgagtacttgaagatttctatttctacaagcggtgaaagcgttttcttaccaacgatatcctcgaatgacgatgagtatctgtccagactaaacggactcaatgatggtacggacgatgctgaggcggatttttttatggatggtatagaccagcaagaaggtaacactccatctcttgctacaacggcagcggctaccgaaagtggtggcagcataaatgaaaatagagacacactcctgagagaaaataattcaggagaccatccaggctccggctcggaacttaatacaaggtctgttgaaatcgacagttccatggtctcttacagcatagcagttatagtatccgttaaaaaaccaacccgatttacggacatgcaattggaattatgttcaagggttaaagtgttttggaatacaggtgttcctcctacaaagacgtttaatgaagaattttataatgctgcatcaatgaaatggaatttgaatgatgaaaatttcgatttgtttgtaccattaagcatatccccagatgatcaaatgattgaaaacaactccaacgatcgtcaaatgaggttgttcaagaatattcctacagaggagagactgtatttggacaagactaaaacaaaagccagccttttaaacgccatagacgtaaataagactcatctttaccaacctggagactatgtattcttagttccagtggttttctctaatcatattccggagactatctatttaccctctgcacgtgttagttacagactaaggcttgcaacaaaggcaatcaatagaaagggtttctatcgtcaagattcaaactctccgcaacccattgtgtcgccagactcttcttcatcactaagctccactacatcttctttaaaacttaccgaaacagaatccgctcaggcccataggaggataagcaacactttgtttagtaaagttaaaaatcatctacacatgagctcacatcaactgaaaaatgaagaatcaggagaagaggacattttcgcagagtatccaataaaagttattagaactccaccgcccgttgccgtatccactgcgaataaaccaatctatattaatagggtttggacagattctttgtcatacgagatttcctttgctcagaaatacgtgtcactaaacagtgaagtcccaatcaagataaaattggcaccgatatgcaaaaacgtttgtgttaaacgtattcatgtcagtattactgaaagagtcacatttgttagtaaaggttatgaatatgagtatgatcaaacagatcccgttgctaaagacccttataatccgtattatttagatttcgcctccaagagaagaaaggaaagaagtgtatcattatttgaaatcagaactaaggagaagggcacgagagctctaagggaggaaattgttgaaaattcattcaatgacaatctcttatcttatagtccttttgatgacgacagcgattcaaaaggtaatccgaaagaaaggctcggtataacggaaccaataattattgaaacaaaattgaagttccccaaatacgaagatttggataaaagaaccgcaaagataataccaccttatggtatcgatacatacacgagtatccccaatcccgaacatgccgtagccaatggaccctcacaccgtcgtcctagtgtaataggctttttatccggtcataaaggctcgaaaagtcatgaagaaaatgaaaaacctgtttatgatccaaaattccatcaaacaataatcaaatccaattctggtttgcccgtgaaaacacataccagattaaacacaccgaaaagaggcttgtacttggatagtttacacttcagtaatgtttactgtagacataagctggaaattatgctacgaatcagtaaacctgatcctgagtgtccgtccaaattaagacattatgaggttctaatcgatacgcccatattcctgctgtctgaacagtgcaacagtggtaatatggagttacccacatatgatatggccacaatggaaggcaaaggcaaccaggttcctctaagtatgaacagcgacttttttggtaacacatgtccacctccgccaacttttgaagaagccatatccgttccagcttctcccattgtctcaccgatgggatcacctaatatcatggcctcgtatgactctgatttactatctattcgacaattgaacttatcaagaactacgtcagttagtgggccatccggatacagcgatgatgccggtgtgccaaatgttaatcggaacagtatttcaaatgccaacgccatgaacggcagtatttcgaattccgcatttgtttcgggcaatagtggccaaggtgttgctagagcaagagcaacgtcagtgaatgacaggtcaagattcaataatctcgataaattattgagcactccatcgcccgtcaatagatctcacaattcatcaccaacaaatggcttatcacaagcaaatggtactgtgaggattccaaacgctaccactgaaaactctaaggacaaacagaacgaatttttcaaaaagggttacactttagcgaatgtaaaagataatgaagaacaagaaggaatagtaagttcgagctccgcagattcgctactctctcatggtaacgagcctccgcgttatgacgaaataatgcctttgatgagtgatgaagaatga

SEQ ID NO: 75391 - DNA, 120 bp, Saccharomyces pastorianus
atgagtcgttctattttttttttctcgtccctttttttgtcccctcttaacaaaattagaaatataggcgggaaagtggagaacccttggaagagtcagatcagagattgggaaaattaa

SEQ ID NO: 75392 - DNA, 1638 bp, Saccharomyces pastorianus
atgttggctcgtactgctgctattcgttctctatcgagaactctaattaactctaccaaggccgcaagacctgccgctgctgctttggcttccaccagaagattggcttccaccaaggcacaacccacagaagtttcctccatcttagaggaaagaattaagggtgtgtccgacgaggccaatttgaacgaaactggtagagttcttgcagtcggtgatggtattgctcgtgtttttggtttgaacaacattcaggctgaagaattggtcgagttctcctctggtgttaaaggtatggctttgaacttggagcctggtcaagtcggtatcgttcttttcggttccgatagactggttaaagaaggtgaattagtcaagagaaccggtaatattgttgatgttccagtcggtccaggccttttgggtagagttgtcgacgctttaggtaaccctattgatggtaaaggtcctattgacgctgccggtcgttcaagagctcaagtcaaagcaccaggtattttgccaagaagatctgtccatgaaccagttcaaaccggtttgaaagccgttgacgctttggtccctatcggtagaggtcaaagagagttgattattggtgatcgtcaaacaggtaagactgctgtcgccttagacaccatcttgaatcaaaagagatggaataacggtagtgacgaatccaagaaactttactgtgtttacgttgccgttggacaaaaaagatctaccgttgctcaattggtccaaactttggaacaacatgacgccatgaagtactctattattgttgcagctactgcatctgaagccgctcctctacaatacttggctccatttactgccgcatccattggtgaatggttcagagataatggaaagcacgctttgatcgtctatgacgatttgtccaagcaagccgtggcataccgtcaattatctttgttgttgagacgtcctcctggtcgtgaagcctaccctggtgatgtcttttacttgcattcaagattgctagaaagagccgctaagctttctgaaaaggaaggttctggttctttaactgctttgcctgttattgaaacccaaggtggtgatgtctccgcttatattccaaccaatgttatttccattaccgatggtcaaattttcttggaagctgaattattctacaagggtatcagacctgccattaacgttggtttgtctgtttctcgtgtcggttccgctgctcaagttaaggctttgaagcaagtcgctggttccttgaaattgtttttggctcaatacagagaagtcgctgcttttgctcaattcggttccgatttagatgcctccaccaagcaaactttggttagaggtgaaagattgactcaattgttgaagcaaaaccaatattctcctttggctacagaagaacaggttccattgatttatgccggtgttaatggtcatttggatggtattgaactatcaagaattggtgaatttgagtcctcctttttgtcctatctaaaatccaatcacaatgagcttttgaccgaaattagagaaaagggtgaattgtctaaagaattgttggcatctctaaagagtgctactgaatcatttgttgccactttttaa

SEQ ID NO: 75393 - DNA, 813 bp, Saccharomyces pastorianus
atgtccagaactattccatttctatttaaattagtcaacagggcagtaattttacctacggcaggttttacgttaggagttggtgcgtttgtaaaggcgtggcccgatgatgccggtgttctatcattgaatgatccgcaaacgccagcggagttgattagtgcgaccaagagccgccaacctatggagctgcagagggttgacatcctcgctcaaatcgagaaaagcgaggtttacaacaagttggcccaggatgagaagatgcaccatgtcttattcagtgagaaaataccaagcgggcatagggaatatcatgtaggacaaggcctcttgttcggcaaggggaagcttgaaattgatcctttggtgttccatgatgtgaatcacggtgaattaaccgtgatttatcacttaggtgctgagttagggaatcgagacggtaacgtccataagggcttgttgtcattgttgctggatgaagcattgtgctattgtggcttccctttgttgcctagtaaaagaggtgtaactgcaaggctgtcgctagagttttttgaggacattcctgtagatactacgattatactaaaagcaaacgtcaaagagattaaaggcagaaagtgtatcattgagggacacttggaacagtttccgttggaagtttcttctcgaaatggaactagaagttggaacttaccacatatttggggtttcaaccataagcaggagatagcaaaaaaatttgccaaggccaactgtattctcgttgaacctacttggttcaaatattttaaatggcttgatatgttttga

SEQ ID NO: 75394 - DNA, 333 bp, Saccharomyces pastorianus
atgctttttcaaaacatatcaagccatttaaaatatttgaaccaagtaggttcaacgagaatacagttggccttggcaaatttttttgctatctcctgcttatggttgaaaccccaaatatgtggtaagttccaacttctagttccatttcgagaagaaacttccaacggaaactgttccaagtgtccctcaatgatacactttctgcctttaatctctttgacgtttgcttttagtataatcgtagtatctacaggaatgtcctcaaaaaactctagcgacagccttgcagttacacctcttttactaggcaacaaagggaagccacaatag

SEQ ID NO: 75395 - DNA, 663 bp, Saccharomyces pastorianus
atggcttctagagtagacgaaactacagtcccctcatactactattacgtggatccggaaactacatatacgtaccaacaaccaaatcctctacaggacttgatatcggtgtatggcttggatgacatctccaggcaagtggcaagaacaaatttggacggcactaaagccgtgaagctaagaaaatcttacaagaaccagatagcagatctttcaggtaaattctccaccataccgaccagagaaaatggtaaaggtggtcaaatagcacatattcttttccaaaataacccagacatgatgatacaaccacctcagcagggtcaaaacatgtcagagcaacaatggcgcgaacagctgcgcaatagagacatagcattgtttcagcctccaaatttcgattgggacctttgctcttcggtactatcgcagtttgaaaggtcatatccaagcgagttcgcaaaccagaaccaagggggagcccaagcgccgtttgatatagacgacttggcgtttgatctagacggtacaggaaaaagccaatccggctcaaattcaggtaacaatagtaagaaaaggaagaacaaatctagtggaagttcgatggctacaccaacacatagtgacagtcatgaggatatgaaaagaaggaggctggagtag

SEQ ID NO: 75396 - DNA, 393 bp, Saccharomyces pastorianus
atggcctccttacctcacccaaagattgtcaagaagcacaccaagaagttcaagcgtcatcactctgaccgttaccacagagttgctgaaaactggagaaagcaaaagggtattgactctgttgttagaagaagattcagaggtaacatctctcaaccaaagatcggttacggttctaacaagaagaccaagtttttgtcaccatctggtcacaagactttcttagtcgctaacgttaaggatttggaaaccttgaccatgcacaccaagacttacgccgctgaaattgctcacaacatctccgctaagaacagagttgtcattttggctagagctaaggctttgggtatcaaggtcaccaacccaaagggtcgtttggctttggaagcttaa

SEQ ID NO: 75397 - DNA, 300 bp, Saccharomyces pastorianus
atggaccaaaaacgagacaaattcttgatcgttacacttcctatcccggcagcttaccaaaacgtggaggatggcgagctgttgtccgattggcctaatctggaagagcagtacaaagatgacatagtcttcaagaagatcaaagtatttcactccgtgttaccgaaaagaaaaccgtctggaaaccacgatgcagaatcagcaagagcgccatcagcaggtaacgggcaaagtctgagttccagagcattgcttatcatcgccgttatcgcattgctcgtcggctggatatactactga

SEQ ID NO: 75398 - DNA, 1266 bp, Saccharomyces pastorianus
atgacagacgctgaaatagaaaattcccctgcttctgatttaaaagaattgaatttggagaatgaaggcgttgaacagcaagaccaggcaaaagctgacgagtcagacccagtagaaagcaaaaagaagaagaacaagaaaaagaagaagaagaaaagcaatgtgaagaagattgaattactgtttccagatggaaagtacccagaaggtgcgtggatggactatcatcaagatttcaatctgcaaagaaccacggatgaagaatcacgttatttgaaaagggatctggaaagggccgaacattggaatgatgtcagaaagggtgctgagatacatcgtcgtgtgagaagggccatcaaggacagaatcgttcctgggatgaagttaatggatatcgcagacatgatcgaaaatactacaagaaagtatacaggtgccgaaaatttattagcgatggaggatcccaaatctcaaggtattgggtttccaacgggtctctctctcaaccattgtgctgcacatttcacacccaatgcaggcgacaaaaccgttctgaaatacgaagacgtgatgaaggtagattatggtgtgcaggtaaacggtaacatcattgattctgcctttactgtttcctttgatccacaatacgataacctgttagccgctgtaaaggacgctacttacacgggtattaaagaagcgggtatcgatgtgagattaaccgacatcggtgaagccatccaagaagttatggaatcctacgaagtggaaatcaatggtgagacttaccaggttaaaccttgtcgtaatctatgtggccacagtatcgcaccatatcgtatccacggcggtaaatccgttcccatcgtcaaaaatggggacactacaaaaatggaggaaggtgagcactttgccattgaaacttttggttctactggtagaggttatgttactgccggtggggaagtttctcattatgccagatctgctgaagaccatcaggtaatgcccacgttggacagcgccaagaacttgttaaaaacgatagaccgcaactttgggactttaccgttctgtcgccgatacctagacagacttggccaagagaaatacttatttgcgttgaataacttggttagacacggtttagtacaggattatccaccattgaacgatatccccggatcctacactgcacaattcgaacacaccatcttgttgcatgctcacaaaaaggaagtcgtttcgaaaggtgatgactactga

SEQ ID NO: 75399 - DNA, 534 bp, Saccharomyces pastorianus
atgttgaagagcacgctgaggctttcaagaatctctctcagaagaggtttcacaacgatcgattgtttacgccaacaaaattcggatatcgataaaatcatactaaatccaatcaaattagctcagggaagcaacagcgatcgtggccaaacctctaaaagcaaaactgataatgcagatattttatcaatggaaattccaatagacatgatgcaatctgctgggagaataaacaagagggagcttctatccgaggcggaaattgctagaagtagcgtggagaatgcacaaatgagattcaattctggaaaatctataatcgtgaataagaacaaccctgcagaatcattcaagagattaaacaggatcatgtttgagaacaatattcccggagataaaagaagtcaacggttttacatgaagccggggaaagtggctgaattgaagagatctcaaaggcataggaaggaattcatgatgggcttcaagaggttgattgaaattgttaaagatgccaagaggaaaggatactaa

SEQ ID NO: 75400 - DNA, 1530 bp, Saccharomyces pastorianus
atgcgtaactatttagttaaatttttgtatattttttattctatgacttcacttatccattatttccatcgtcagaaaaaggaaataaatactgttgctcgaacgaacagcaagataaagtggaaacgaaaagtaagcagcttcctcaatatgccgtcaaacgtacgttcgggagtcttgactttgctccatacagcatgtggagcaggcgtacttgcaatgccgtttgcattcaagccatttgggttaatgcctggtctgataacgctaacattttgcggaatatgttccttatgtgggctgctattacagactcgaatagcgaagtacgtacctaaatctgagaacgcctcgtttgctaaactcacccaactaatcaatccgtcaataagtgtagtgttcgattttgccattgctgttaaatgttttggcgttggtgtatcttacttaattattgttggtgacttagtgccacagatagtgcagtcaattttttatcgtaacgatgataacatgagtggttcgcaagagcatcacatgttcttagacaggcgtttgtatataactctgatcatggtgtttgttatctcccctttatgctttaaaagaagtttgaattctctacgatatgcttctatgattgccattgttagtgtcgcatatttatctggtttgattatttaccattttgtaaatcggcatcagctagagagagggcaagtatattttatggtacctcacggagattctcagtctcattctcccctgactacattgccaatttttgtgtttgcttacacttgtcaccacaatatgttcagtgtaattaatgagcaagtggataagagcttcaaggtaatcaggaggattccgatttttgccatcgtgttggcctattttttatacatcataattggtggtacaggttatatgacatttggtgagaatattgtaggaaatatcctcactttatacccgaattccatctccaccaccatcgggaggttagcaatgctgctattagttatgttagcatttccattgcaatgccatccttgcagatcatcggtaaaaaacataattatattcattgaaaatttcagaaaaggtaagttatacgataacagagctagctttattccattggacaactttaatagtgaagatccgcaggaggagccaacccaacaaaacaacgaagagccaaatctgcgtagtgagtctttacggcatatcaatattatcaccctttgtatcttactgttctcatatctactggctatttcaattacgtctctagcaaaagtcctagcaatagttggtgccacgggatctacgtcgatttctttcattttgccaggcctttttggttataaattaattggctcagaatttatgggcacgaatgaaagagtaccgacaagcataaaaatattcaaatacttaagtttatctctattcatctggggaatagcagtaatggtagcttcactatcagcgattgtatttttgggcacatcatcgcattga

SEQ ID NO: 75401 - DNA, 8364 bp, Saccharomyces pastorianus
atggaggatcatgggattgtagaaactttaaactttctatcatcaacaaaaatcaaagagagaaacaatgctttagatgagctaacaacaattttaaaagaagatccggaaaggataccaaccaaggccctatctacaacggcagaagctttggtagagttacttgcatctgaacacacaaaatactgtgagcttcttcgaaacttgacagtgtcaacgacaaacaagctatcacttagtgagaacagactctccacgatatcgtacgttttaagattatttgtagaaaaatcatgtgagagatttaaagtgaaaacgttgaagttacttttagcagtagtacctgaattaatggtcaaagatggttccaaaagtttattggatgccgtttcagtacatttatcgtttgctttggatgccctaattaaaagtgaccctttcaaactgaaattcatgatacaccaatggatatccttagtcgataaaatttgcgagtactttcaaagccaaatgaaattatctatggtagacaaaacattgaccaatttcatatcgatcctcctgaatttattggcgttagacacagttggtatatatcaagtgacaaggacaattacttggaccgtaatagattttttgaggctcagcaaaaaagaaaatggaaatacgagattaataatgtcattaataaatcaattaattttgaagtgccattgttttagtgttattgatacgctaatgcttataaaagaagcatggagttacaacctgacaattggctgtacttccaatgagctagtacaagaccaattatcactgtttgatgttatgtcaagtgaactaatgaaccataaacttccttatatgattggtcaagagaattatgttgaagagcttcggtccgaatctcttgtatctctataccgtgagtacattctactgcgcttaagtaattataagcctcaattatttaccgtaaaccatgtggaattctcatatattcgaggttcaagggataaaaattcatggtttgcattacctgattttagacttagagataggggaggcagatcggtgtggttaaaaatactcggaattaccaaatcattgttaacatattttgcattgaacagaaaaaatgaaaattactcattattatttaaaagaagaaaatgtgattcggatataccttctatcctacggatttctgacgatatggacacatttcttattcatcttttagaggagaacagctcacatgagtttgaagtgctaggattacaattgtgctcattttatggaactttacaagacttcactaaaagttttgcagaacagctgaaagaacttctgttttcaaaattcgaaaaaatccaatgctttaattgggtttgtttttcttttattcctttattatcccaaaaagaatgcgaattaagcaatggcgacatggcacgcctatttaaagtttgcttaccattagtaaaatcaaatgaatcttgccagttaagttgtcttttattagccaactccataaagttttcaaagcagcttttatccgatgagaaaactatcaatcagatatatgatctttacgaattatccgatattttgggtcccatattagttactaatgaatcgttcatgctatggggataccttcagtacgttggtaaagacttccaatctatgaacggtatatcgtccgctgatagaatttttgagtggctaaaatcaaagtggaaccagttgcgcggaactgatgctaaacaggatcagttctgcaattttatatcctggttaggtaacaaatatgacccagagaaccctttcaacgataaaaaaggcgaaggagctaatcctgtctcactatgttgggatgaaagccacaagatttggcaacattttcaagagcagagggaatttcttttaggcgtaaaaccagaagaaaagtcagaatgttttaacactcccttttttaatttaccaaaagtttccttagacctcacacgttataatgaaattctttacagattactggaaaatattgaaagtgatgcattttcgtctccactacaaaaatttacttgggtagcaaaattaatacaaatagttgataatctttgtggagattccactttttctgagtttattgcagcatataagagaacaaccttaataactattccacaacttagttttgatagcaaaaactcctaccaatcattttttgaggaggttttatcgatacggaccataaatgtagaccatttagtgcttgacaaaattaatatgaaggaaatcgttaatgattttatcaggatgcaaaaaaacaaatctcaaacaggaacttctgccatcaattacttcgaagcctcttcagaagacactacccagaataatagtccttacacaattggaggtagatttcagaagcctcagcactccactatagataaagcagtgcgagcttacctatggtcttcaagaaataaatccatttcagagcgtttggtagccatattggaattttctgattgcgttagcacagatgtatttatatcttatcttggcactgtttgccagtggttaaaacaagcaatcggggagaaatcttcttacaacaaaatcctggaagaattcactgaagtcttgggtgaaaaattgctttgcaaccactatagttcttccaatcaagctatgcttttacttacatcttatatcgaagcaataagacctcaatggttatcttaccccgagcagcctttgaattcggactgcaatgatatcctggactggatcatatcaagatttgaggacaattctttcactggtgtggcccctacggtcaacctttctatgctgctgcttagcctacttcaaaatcatgatctttcccacggatcaatcagaggtgggaagcagagagtctttgcaacttttattaaatgcctgcaaaagctagactcctccaatattattaacataatgaacagtatttcgagttatatggcccaagtgagctataagaatcaaagtatcatattttatgagattaagagcttatttggtccgcctcagcaaagtattgaaaagtccgctttctactctcttgcaatgtccatgttgtctttggtgtcttacccaagcttagttttttctttggaggatatgatgacatactctggcttcaatcatactcgtgcgtttatccaacaagctctgaacaaaattacggtcgcttttcgctaccaaaaccttacagagctcttcgaatattgtaagtttgatttgattatgtactggtttaacagaacaaaagtccctacttctaaattggagaaagaatgggatatatctctttttggatttgccgatattcatgaatttttaggaagatactttgtagaaatttctgcaatctacttttctcaaggtttcaaccaaaaatggatcttagacatgttacacgcgattactggaaacggtgatgcttatctggtggataacagctattacttgtgtattccacttgcctttatcagtggcggtgtgaatgaactaatatttgatatattgccccaaatatcaggtaaaacaacagtaaaataccataaaaaataccgtctactgatgttaaagtggatcataagatttactgatttgggctcacttactgaacttagatcgactgttgaaaaattattcccaacttcatacctttcgccatatttatttgaaaattccagtgtttcaatgaggtatcaatacccacttcatatacccttggcattaggagcaaccttagttcagacgcagtttgctcatgaaaagaacaacacacagaaattcaagcttttgtttttatcggttattacagaccttgaaaagacatcgacttacataggaaaactgcgatgtgcaagggagttaaaatatctttttgtgttgtatgagaatgtacttgtaaaatcatcaactttaaacttcatcataattcggctttcaaaattcttaatagatacacaaattcacgatgaagtaataacaattttcagctcattgttaaatctggctgacaaaaatacgtttgaaatagagccatctctgcccaatttattttgcaaaatattcatttatttgagggaaaacaaacagctcagtccatccttccagcaggctataaagctattagagcatcgggatctcatcaaaataaaaacttggaaatactgccttgatgcaatattcggaaatatagtccaagatgatatttatgaaaatacggaacttttggatgctagtgattgtggcgtagacgatgttgtattggtttctttactcttttcttatgccaggagaccggtagcttcaaaaatcggttgttcgctttccaaagctgctgcaattaacattttgaagcaccatgttccaaaggaatatttgagtaaaaacttcaaactatggttcgctgctctttcaagaagaattttacagcaagaagttcaaacagagagatctacaaactttaataatgaagttcatttgaaaaactttgaaatggtatttcgtcatcccgaacaaccacatatgatataccaacgtatttcaaccttcaataaagaagctgagttacatgattctactgaagtgttttttatttctgagtgcattctaacgtacctagtgggctactcaatgggaaatagcgaaagtgaattttgttttagggataacataatgaacgagaacaaagataaagttgctccattggataaggatgtactgaatgctatatacccgttggcaaacaattttgggatggaatcattcatatgcgatacttatttgtcagtgaacgaaccctacaactgctggctaagcaaattcgcccgtagtttgattcaccaaatatcatttaatatacctcctattgtttgcttgtatcctttatgcaaaggatcaacagctttttgtgaattagtacttactgacctcttttttctttcaacgacttatgatccgaaaagctgtttgaattggagcaatcgaatattcactcaaatatcaatgttgctgcatgttaaagattctgagataaagctaaaaatgcttttcaatgtaattaaaatgattaggatgggttctagatgcaaggaacgaaactgtctgcgcatatattctagcttagatttacaagaaatatgtcaaatttctcttaaaatagaagagttcaagtttggctatttgttatttgaggaaatgaacatgccaaacataagagaaatgaatataaatacacttcagaagatttacgaatgcataaatgacggcgattttttagcaggtttacctgttccacactcaatagagggtgttttaaactctatcaatagaattgactcagatacctggaaacgttttcttttcaacaacgccgattttgatgccaattacactacttcactagaagaggaaaaggaatcattaatcaaggccacagaagatagcggtttctacgggttgacaagcttattggaaagtggactttctggatccagtgatgtctacaaatggaatgtagaattgggagactggaaactattgactccaaaagttgttgattccaaagccaaaggtttatactatgccataaaaaatttaccacaggacgttggttttgctgaaaaaagtttagaaaaatccttattaactatttttgattctcgacaacattttattagccaaactgaatggatggatactctgaacgcgattattgaatttataaaaatagcagcaatccctcaggacgttacttccttcccgcaaacattgatgtctattatgaaggccgataaggagagactgaatacaatagacttctatgatcacaaaacaacgttaaagagtagacatactttaatgaatgtgctctcgaggaattcattagatgaaaacgtaaaatgctcgaaatatttacgccttggatccattattcagcttgctaattacgttcagctggcaattgccaatggtgcgcctcaagatgcgttacgaaatgccactctaatgagcaaaacagtgaagaatattgcaaaattatacgatgatccctctgtagtatctcaaattgagaaattggcaagtttcacatctgctaatgccctctgggagtctcgagagtacaaggcacctgtaatgataatgagagatcttttagctcaaaatgaggagaatattagcgaaagtatcctttatgacgattttaagctactcattaatgtgcctatggaccaaattaaagctcgactagttaaatggagctcagaatcaaggcttgaatcagctgctgcaatatatgagaaaatcattgtcaattgggatataaatgtcgaagatcatgaatcatgttctgatgttttctacacactcggaagttttctggatgaacaggcacaaaagttacgatcaaatggagaaatcgaagatagagaacataggtcatatactggaaaatctaccttgaaagctttggagctgatatataaaaacacaaaattaccagaaaatgaaagaaaagatgcgaaaaggcattataatcgtgtcttgctacaatataatagagattctgaagtactaaaggcactgcttcttcaaaaagaaaaatttttatggcatgcactccatttctatctcaataccttagttttcagcaacagatatgataatgacattattgataagttttgtggtttatggttcgagaatgatgacaatagcaagatcaatcaattactatataaagaaattggaacaataccgagctggaagtttttgccctgggtcaatcagattgcgtcaaaaatatctatggaggagaatgaatttcaaaagccattgcaactaaccatgaaacgacttctttacaaactaccgtatgactccctttattcagtgatgagcatactactatatgaaaagcaatccaataaggacaccaacatatcccaaaaaattcaagctgtcaaaaagattcttttagaattgcaaggatatgacaggggtgcctttgcgaaaaagtatttacttcctgtgcaagagttttgcgagatgtctgtagagttagctaatcttaagtttgtgcaaaatacgaagacgttacacttagctaatttgaagattggccaatattggctgaaacagctaaacatggagaagcttcccctaccgaccagtaattttacagtcaaaagttctgctgatggaagaaaagcccgcccttatattgtatccgtcgatgaaacagtaggcattactaccacaggattgtccctgccgaaaatagtcaccttcaacatctcagatggtacaacgcagaaagctttgatgaaaggaagtaatgacgatttgagacaagatgcaattatggaacaagtgtttcaacaagttaataaagttctacaaaatgataaagtattaagaaatctagatctgggtattagaacatacaaagtggttccattaggaccaaaggcaggaatcattgaatttgtcgcaaattctacatcattacatcaaattttgagtaagctacataccaacgataagataaccttcgatcaggcaagaaaaggcatgaaagcagttcaaacaaaatcaaatgaagagaggctgaaagcttatttaaaaatcactaatgaaataaaaccgcagttaagaaactttttttttgattcctttcccgatccgttggattggtttgaagctaagaaaacgtacacaaaaggtgtcgcagctagctctatcgttggatacatattaggcctcggtgataggcacttgaacaatatcctgcttgactgctcaacaggggagcctattcatatagacctgggaattgcgtttgatcagggaaaattactccccattccagagttggtccctttcagattaactagagatatcgttgatggatttggagtcacaggcgtggatggcctattcaggcggagttgtgaaagagtttacgcagtattaagaaaagattatgtcaaggtgatgtgcgttttgaatatcttaaaatgggatcccctttattcctgggtaatgtcaccagttaaaaaatacgaacacttatttgaagaagaacatgaaattacaaatttcgataacgtcagcaagttcataagtaacaacgacaggaacgaaaaccaagagtcttatagggcccttaaaggtgtagaagagaagcttatgggtaatggactaagtgtagagtctagcgtacaagatttgattcagcaagccacggatccatcaaatttgagtgttatatatatgggatggtcacctttttattaa

SEQ ID NO: 75402 - DNA, 1401 bp, Saccharomyces pastorianus
atgccatttaatcataatagcaaggcaaaaagaccaaagtttctactggacctgcaaatcaaagaattggtaaatattcctcaatcttctggctattgctacacgaaatggcgtttgaaggatggaacaggtacgtcgggacacaaagtggctctggacggtgagcatcaaaccacttcgacccagagtagaggtacaacaaaacacgtgcatgtgcaacatcatagagcacaatggaattattcattagacaaaccaatcctggtgaagctccacttggataaaaacggcagattcttgaagaaaattttggtgttggatgttttttttgagtttgctgatgcgaattcctcgttgacttctagttctagtcccaatggcaaagtgaagaaaacgacctatgctaacgccactgcactaacggccacaggaaacaattcatattctcaaaagataacgggtaaacttctattgggaacagtagacatagatataacagaatacgtcaaagaagacgaaactcccacaacaaacagatttctcctaaagcactcaaaggtcaattctataatcaacgtctcattgcagttgaagctagttagaggctcttacgaagatttcaacatttccaaatcgtttactaatggccagctcgctaattacaggccaggaataaatactatactggataacacgtctgaactatctagccccacatcaacaacaaaccagatgtcacccaagaatacattctccaattttaacggtattggaacaactgtagcgaaacccggtacaaatgcgacaggaaacagcacaagtattaaatcaccgacttctaccaaccacaagagtagcgaaatgacaacaaagccagggctgtcaacaacaatatcttcctctatgagcccactgattgagagcttgtaccagaaaacgtttaaattaccgtgggatcctcgaccaggtgaatttacgccaagagaatgcgtggaagatattttacaaggcggaaacggttgggctaagaacgagaagggcataaatttaatcgatttacaggcattgagattgaacgaaatggaagaagagtactacaatccaaattatggcaataaccttgggaacaaggcaagtagttggcctccaaatccaagcgatgacggctacagcacaatgggcaaaagagagtatttggagaaaaagcagaattggagtcatatgtcacgagcacaacgtgcaaaactgaggactcataatgacgaggataacgaaaatacggctaatgataaagggagcgacaaggataataactctgtcgaagacaataaccccacggactttttaacagatagaataagagaaaacaaaaactggtctataataaccccatcgggctag

SEQ ID NO: 75403 - DNA, 2943 bp, Saccharomyces pastorianus
atgagtctcgaaggaaataccctaggcaaaggggccaaatcttttcctctgtatattgcggtaaatcagtactctaaacgaatggaggacgagctcaatatgaaaccaggtgataaaattaaagtcattactgatgatggggagtacaatgacggctggtattatgggcgcaatttgagaaccaaagaggaaggtttatacccagcggtatttaccaaaagaatagcaatagaaaaaccagagaacctgcacaaatcaccaacccaagagagtggaaattctggcgttaaatatggaaatttaaatgattctgcgagtaacataggtaaagtctcctcgcatcaacaggagaacagatatacatcattgaaaagtacaatgagcgatatagacaaagccttggaagagctaagaaatggttcagttgaacaagaggtatcaaaatcgcccacacgcgtgcccgaagttagcactccacagttgcaagatgaacagactttgattcaagaaaaaaccagaaatgaggaaaacacgacacatgactcgttattttctagcacagcggatttaaacttaagttctgaatctttgaagaatataagtaagtcaaatatatcaacaaaatccctagaaccgagttcggaatcagttcgtcaattagatttgaaaatggctaaaagttggagcccagaagaggttactgattactttagcttggttggatttgatcaatccacttgcaataaattcaaagagcatcaagtctccggaaaaatactactggaattagaactggaacacctaaaagaattggaaataaattcttttggtataagatttgagatattcaaagaaataaggaacatcaagtctgcaattgattcgtcgtcaaataaactggacgccgactactctacctttgcttttgaaaaccaagctgcccaactaatgcctgcagccactgtaaatagagacgaaatccaacaacaaatttcctccaagtgtaacaagttgtcaagtgaaagctctgatagaaaatcatcttcggtcaccacagaattgcaaagaccaagctcggttgttgttaatcccaattttaaacttcacgacccagctgagcagatcctagatatgacagaagttcctaatttgtttgctgataaagatattttcgaatcaccgggaagggctccaaaaccaccatcatatccaagtccagttcaacctccacaatcgccctcttttaataacaggtacacaaataataacgcaaggtttcctcctcaaacaacatatccacctaaaaacaagaacccaaccgtttattcaaatgggctaattccaaattcttcgacatcttccgataattcaacgggcaagttcaaattccctgccatgaatggtcatgactcgaactctaggaaaacaacactgacatctgctactataccttctattaacacggttaacacagatgaatctctacccgcaatttcaaatatatcttcaaatgctacatctcatcatccgaacagaaattccgttgtttacaataaccataagaggacggaatccggaagctcatttgttgatttgttcaacaggatttcaatgctatcgccagtcaagtcaagtttcgacgaagaagaaatgaaacaaccttcaaaagctagcagagcagtttttgactcagcacgcagaaagtcgtcttacggacattcaagagatgcctcactttctgaaatgaaaaagcataggagaaactcttctatattatcttttttttcttcaaaaagtcagtctaatccaacgtcaccaaccaaacaaactttcactatcgatcccgcaaagatgacttcccattctcgttctcagtcgaattcctattcgcatgcaagatcacaatcttactcccatagtagaaaacactcgttagttaccagccccttgaaaacttctttaagccctataaattccaaatccaatattgctttagcgcatagcgaaactcctactagtagtaataataaggaggcagtatcacaaccaagtgaagggaagcacaagcacaagcacaagcacaagagcaagcacaaacacaagaacagtagctccaaagatggctcttccgaagaaaaaagcaaaaagaaattatttagtagcaccaaagaatcatttgtaggaagcaaggaattcaaaagatctcccagtgaacttacccaaaaatctaccaaatcgatacttcccaggtcgaatgctaaaaagcaacaaacatctgcttttaccgaaggtatacgctctatcacagcaaaggaatctatgcaaactgcggactgttcaggctggatgagcaaaaaaggtaccggtgctatggggacttggaaacaacggtttttcacacttcatggaacaaggctttcttattttacgaataccaatgatgagaaggagcgtggcctgatagatataacggcacatagggtcttacctgccagtgatgatgataggctcatttccttatacgctgcgagcttaggaaaaggaaaatactgtttcaaattggtccctccgcaaccggggtccaaaaagggactaacctttacggaacctcgcgttcactattttgcagttgagaataaatctgaaatgaaggcatggctgtcagccataataaaggccactattgatatcgatacaagcgtccctgtcattagttcatatgccacaccaacgatacctctaagcaaggcacagacgctattggaagaagctaggttacaaacccagttaagagatgctgaagaggaagagggaagagatcaatttggatgggatgacacccaaaataaaagaaattctaattatccaatcgaacaagatcaatttgagaccagcgattacctggaaagttcagcatttgaataccctggtggcagactttga

SEQ ID NO: 75404 - DNA, 2241 bp, Saccharomyces pastorianus
  modified_base (1091)..(1141): a, c, g, t, unknown, or other
atggcggtaaatcctgagttagcaccgttcaccctctcgagaggaatccccagctttgatgatcaagctttgagcaccatcatacagcttcaggactgcattcagcaggctattcagcagttgaactacagtaccgcagagtttttggccgaactgctctatgctgaatgctccattctcgataaatcaagtgtttactggtccgatgcggtatatttatatgcactttcgctgtttctgaataaaagctaccacactgcgttccagatatccaaagaattcaaggagtatcatcttggtatcgcttacatattcgggcgttgtgctttacagctttcgcagggagttaacgaagctatcctcactcttctctcaataataaatgtattttcttcgaacagcagtaatacgcgcataaatatggtgttgaattctaatctcgtccatattcccgatttggccactttgaattgcctgttaggcaatctttatatgaaactggaccattctaaggagggagcattttatcattctgaagcattagccattaatccttacctttgggaatcttacgaagcaatttgtaaaatgagagctaccgtggatctcaaaagggtttttttcgacattgcagggaaaaaaagtaatagtcataataataatgcagcttcatcgtttccgtctacatcactatcgcatttcgaacctcgttcacaacctagcttatattcaaaaacaaacaaaaacggcaataataatatcaataataatgttaatacactgtttcagtcgtctaattctcccccttctacatcggcatcttctttttcttccattcagcatttctcaaggtcacagcagcaacaagcgaacacatcaataaggacctgccagaacaaaaatactcaaactcctaaaaaccctgcaatcaacagtaagacgtcttctgcgctaccaaataacatttccatgaacttagtgtctccatcctccaaacagcctacaataagctcgttggccaaagtttataacagaaacaaacttttaacgactcctccatcgaaactgttaaataacgataggaaccaccnnnnnnnnnnnnnnnnnnnnnnnnnnnnnnnnnnnnnnnnnnnnnnnnnnncaactttcaaaactccaagaaacctatattcctcaacaggaaggttaacaacttccaagaaaaatccaaggtctttaataatcagtaactcaatactaacgagtgattattcaattacgctgcctgaaatcatgtataatttcgctttaatattaaggtcgtcatcacaatacaattcgttcaaggcaataagactgttcgagtctcaaatcccatctcatattaaagacacaatgccatggtgtctagtgcaattaggaaaacttcattttgagatcattaattatgatatgtccttaaagtatttcaatagattgaaagacctacaaccagcaagggtaaaagatatggaaattttttctactttgctgtggcatttgcatgacaaggttaaatcttcaaatttggcaaatgggctaatggatgcaatgcctaataagcccgaaacatggtgttgtataggtaatttgctatcattgcaaaaggatcatgatgccgcaataaaagccttcgaaaaagctactcagttagacccaaattttgcatacgcgtatactttgcaaggtcatgaacattcttccaacgattcttcggattctgccaagacatgctatagaaaggcgctagcttgtgatcctcagcattacaatgcatattacggattgggtacgagcgctatgaaattaggtcaatatgaagaagcgttgttatattttgaaaaggcaaggtcaattaatcccgtcaatgttgtgttaatctgttgttgcggtggttctttagaaaagctgggctataaggaaaaggctctacaatattatgaactagcatgtcatttgcaaccgacttcctcgctatccaaatataagatgggccagttgctctattccatgacaagatataatgttgctttgcaaacttttgaagaattggtgaaactcgttcctgatgatgccacagcccattatttgctgggtcaaacatatagaatagttgggaggaaaaaagatgcaatcaaggagctaactgttgctatgaatttggatccaaagggtaaccaagttatcatcgatgaattacaaaaatgtcatatgcaagaataa

SEQ ID NO: 75405 - DNA, 426 bp, Saccharomyces pastorianus
atggtcttccctgtgccatccgctgaggaaaaatgcagtgctcaatgccaatcccgccaagactattccattcgttctaatcgcatccaacttcatcggcgtcctattttcaaggtccctccactaccagttcctatcctggtatcactggactttgcctatactgatcttttggtcgggaatgcccttcttcgttggtccgatttggtacgtcttgcacgagtggtgctggaattcctatccaccaaactcacaagcaagcacgctattgttggcattgaatactgttctgttgcttctattggccttgacgcagctatctggttcggtcgccctcgccaaaagccatcttcgtaccaccagctctatggaaaaaaagctcaactgaaacagatgtataaatatcatatagtcgtattgttttaa

SEQ ID NO: 75406 - DNA, 1377 bp, Saccharomyces pastorianus
atggaaggtgaacagtctccgcaaggtgaaaagtctctgcaaaggaagcaatttgtcagacctccgctggatctgtggcaggatctcaaggacggtgtgcgctacgtgatcttcgattgtagggccaatcttatcgttatgccccttttgattttgttcgaaagcatgctgtgcaagattatcattaagaaggtagcttacacagagatcgattacaaggcgtacatggagcagatcgagatgattcagctcgatggcatgctggactactctcaggtgagtggtggaacgggcccgctggtgtatccagcaggccacgtcttgatctacaagatgatgtactggctaacagagggaatggaccacgttgagcgcgggcaagtgtttttcagatacttgtatctccttacactggcgttacaaatggcgtgttactaccttttacatctaccaccgtggtgtgtggtcttggcgtgcctctctaaaagactgcactctatttacgtgctacggttattcaatgattgcttcactactttgtttatggtcgtcacggttttgggggctatcgtggccagcaggtgccatcagcgccccaaattgaagaagtcccttgcgctggtgatctccgcaacatacagtatggctgtgagcattaagatgaatgcgctgttgtatttccctgcaatgatgatttctctattcatccttaatgacgcgaacgtaatccttactttgttggatctcgttgcgatgattgcatggcaagtcgcagttgcagtgcccttcctgcgcagctttccgcaacagtacctgcattgcgcttttaatttcggcaggaagtttatgtaccaatggagtatcaattggcaaatgatggatgaagaggctttcaatgataagaggttccacttggcccttttaatcagccatctgatagcgctcaccacactgttcgccacaagataccctcgcatcctgcccgatttatggtcttccctgtgccatccgctgaggaaaaatgcagtgctcaatgccaatcccgccaagactattccattcgttctaatcgcatccaacttcatcggcgtcctattttcaaggtccctccactaccagttcctatcctggtatcactggactttgcctatactgatcttttggtcgggaatgcccttcttcgttggtccgatttggtacgtcttgcacgagtggtgctggaattcctatccaccaaactcacaagcaagcacgctattgttggcattgaatactgttctgttgcttctattggccttgacgcagctatctggttcggtcgccctcgccaaaagccatcttcgtaccaccagctctatggaaaaaaagctcaactga

SEQ ID NO: 75407 - DNA, 1107 bp, Saccharomyces pastorianus
atgccaggccagataatcagcattccgtttttgtcgcagaacgaggacatggataaatacttgttggagtaccgcagtttgaagctccttcatcagtccagtaattccttccagtctcacaatgcgccctcccaccagtcgaactaccacccccattacaatcacatgaaatacaacaacactggtagctattactattacaacaacaacaataacagcagtgtaaacccacataaccaagctggtctacaatccattaacagatctattccatcggccccgtacggggcttacaaccagaacagagctaatgacgtaccatatatgaatacccaaaagaaacaccacagatttagcgctaacaataatttgaaccagcaaaaatacaagcaatatccccagtatacgtccaatccaatggttactgcacatctgaagcaaacgtaccctcaactgtactacaatagcaacgtcaatgctcacaacaacaacaacaacaacaacaacagcaacaacagcaacaacaacaacaacaacaacaacaatctttacaaccagacgcagttctccacgaggtacttcaactcgaactcctctccctcgttgacttcttccacttctaactcatcctctccatacaaccaaagcaccttcgaatacattttgccgtcaacttcggcagcttccacaaatttatcgtcgtcatcatcaaacaactctatgcacaccaacccaaccaccgcaacatcgacatccgccgatttaatcaatgatttacccgtgggccccacgtccagttcgcttatctcggatctacattctccaccaactgtatctttcctaccagcaagccaaaccctgctcatgtcctccaccacatctagctctattggcaccaacataaacccaccgcaacattcaccatccccatcgcaaagggaggatttttcgacggcaccagtgaacatgtcttcgtccgcatcactcttgatgaatgattcttctttaggatgggggtctaaccacatgaacgtatcttcatcctctcaaccagcatcatcaagaccctttggcatttggaatactgacatgagcgtttggagttga

SEQ ID NO: 75408 - DNA, 1626 bp, Saccharomyces pastorianus
atgttgcagcttgcacgtttttattctttggccagaaccaaagccatacatagtcacggtgcacccttcaggccggaatatgcattgaagtgtggattggagattcatacgcaattgaacaccaaaaacaagcttttttcacaatcaacgaatagcgccacatctctagtggatgcaccaaaccatcatactagttattatgacatagctctaccgggaacgcagccggttttgaatctggaagcaatcttgtttgccatgaaactatccttggcactgggttctcaagtgaatagcatatctcagtttgataggaagcattatttttatggagatcaacctcaaggctatcaactgacgcagcactacaggccgtttgctcggggtgggaagatcaatctgtcgaaggaattggatgatatcgatgaatcagccaaggaaatcggtatcttacagttgcagatagagcaggacacggggaagtcacactatacagagacagataaagacgttattactttggttgatttaaataggtcgaacgtcccgcttatcgaattggtaactaaaccagatttcagtgatattaaacaagttagagcgtttattaaaaaatatcagaatttggtacgtcatttgcacatttcctctggggacctggaaacgggcgccatgcgagtggacgttaacctctcaattaatgaatatgcacgcgttgagttgaagaatttacccaatactagtaccatcatcaatgcaatcaagtacgaatatcagcggcaagttgagttgatttctgtgggtgacactagctcactgatggagccagaaacaaggggctggacaggctcatcaacggtgaagttgagaagcaaagaaaccacgatcgattacaggtacatgcctgatccagaattgccgtatatcaacctcgcaccagacgttatcagtggtgtgagagggttgatgccccaattaccggacgatataatgagaatgcttatgaagaaaccctatcaattatcattgaaggacgccaagattctgacttataatagtaaccaaaacgatatgtacaatcatgaggcgttgagatcgtactacttagacaccttccgtgaattttccaagcttgctggtgaacgtagtaacgcgaaattacctacgaattggataatccatgaattcttgggagatttgaacaagctacaaattccattggctaaagcaaaagaaattttgcctcctccggttttcgcccagtttttgaagttattgcatgaagaggttatatccgcaactagtggtaaaatgttactgtttcacatattggaaagtttcaagcagagtaactgccaggatttgtctattccagatttttcaaaactaatcgagaaatttgaattgcatgcaattaatcaggtcgaccctcaagaattgatggatctctgtaatgatgtcattgcacagcacacagatgacacttttatacggaacctggttactggtaaaaagaagtcctctttaaaattcctaattggacaaggaatgagacgaagccagggacgtataaaggcaaacgaattcgagaaaaaattcaaagagatcttaaatattcaatggtaa

SEQ ID NO: 75409 - DNA, 354 bp, Saccharomyces pastorianus
atgaagtctacatttaagtctgaatatccatttgaaaaaaggaaggcggagtcggagaggattgctgacaggttcaagaataggatacctgtgatttgcgaaaaagctgaaaagtcagatattccagagattgataagcgtaaatatctagttcctgctgaccttaccgtagggcaatttgtttatgttataagaaagagaattatgctaccccctgagaaggccatcttcatttttgtcaatgatactttgccacctactgcggcgttgatgtctgccatatatcaagaacacaaggataaggacgggtttttgtatgtcacttactcaggagaaaatacatttggcaggtag

SEQ ID NO: 75410 - DNA, 432 bp, Saccharomyces pastorianus
atgtgctatgatttcacgggtattatacaacattatcggtggagacagttagcattacatgactctaacttaaacgtaaacttacacatatacatctatatcacttcgagtagagaaaaatttgtacgtatttatatgagttgttttcataatttgaacacttttaatttgaaaatggtgtcattaatagattgttcttcatcaccaattgggtctatctttgagccgtcatatttggcaatgtcggatctacaggtcttgcttaacatatcaaaatgttctttgacaatggcttcaaagtcgatagtatctttaactaattcgtactccactaaaacatcgtcggtggcttccaaaccacacttctttctcaatttttggattctgttgaccagctctcttgcgagaccttcactctttagttcagagtaa

SEQ ID NO: 75411 - DNA, 1950 bp, Saccharomyces pastorianus
atgtctagagcagttggtattgatttgggaacgacttactcgtgtgttgctcattttttcaatgatagggtagagataattgcaaatgatcaaggtaataggaccactccatcgtatgtggctttcacagacaccgaaagattaattggtgacgccgccaaaaatcaagctgcaatcaatcctcataatacagtttttgatgcaaagcggttaattggtcgtaaatttgatgatcctgaagtgacgacagatgccaagcacttccctttcaaagttatatccagagatggtaaacctgtagtgcaagtagaatataagggtgaaacgaaaacatttacgcctgaggaaatttcttccatggttttaagcaaaatgaaggaaactgctgagaactatttgggaactacggtcaatgatgctgttgtaactgttcctgcatatttcaatgattctcaaagacaagccactaaggatgcaggaactattgcagggatgaacgttttacgtattatcaatgaacccactgcagcagcaattgcttatggtttggataagaaaggcagggctgagcacaatgtcctgatttttgatttgggtggtggtacttttgacgtctctttactttcgattgacgagggtgtttttgaggttaaggctaccgcaggagacactcatttaggtggtgaagattttgataataggttggtgaaccatttagccactgaattcaaaaggaaaacgaaaaaggacatctctaataatcaaagatcgttaagaagattgagaactgcggcagaaagagctaagagagagctttcttcctcatctcaaacctcgatcgagatcgattctttatttgaaggtatggatttctacacttcgttaacaagggcaaggtttgaagagctatgtgctgatttgttcagatccacattggaaccagtggaaaaggttcttaaagattcgaagctggacaagtcccaaattgatgagattgtgttagtcggtggatctaccagaatcccaaagattcagaaattagtttctgacttcttcaatggcaaagagcctaatcgttctatcaacccggatgaggctgttgcttatggcgcagccgttcaagctgccattttaaccggcgatcaatcaacaaagacacaagatttactattattggatgttgcgccattgtccctaggaattgaaactgcaggcggcataatgactaagctaattcctagaaactcaacgattccaacaaagaaatcggaaaccttctctacctatgcagataatcaacctggtgttttaattcaagtctttgaaggtgaaagaacaagaacaaaggataataacttacttggtaaattcgaattaagtggcattccgcctgctcccagaggtgtgcctcaaattgatgttacctttgatatcgacgctaatggtattcttaatgtgtctgctttggaaaaaggtactggtaagagtaacaaaatcacgatcactaacgataaaggtaggctctcgaaggatgatattgataggatggtttctgaagctgaaaaatatagggctgacgatgaaagagaggcagaacgagttcaggctaagaatcagcttgaatcatatgcatttactttgaagaataccataaacgaagcaagtttcaaagagaaagtaggtgaagatgatgcaaagagattagaaacagcgtctcaggaaaccattgactggttagatgcatcgcaggcagcctctacggacgaatataaggatagacaaaaggagttggaaggcattgccaatccaataatgaccaaattttacggtgctggtgccggcgcaggtcctggagcggccgaatccggtggattccccggatccatgcccaactcaggtgctacgggaggtggagaagatacaggtccaacagtggaagaggttgattga

SEQ ID NO: 75412 - DNA, 1068 bp, Saccharomyces pastorianus
atgaatactgtaccattcacatctgctccgattgaggtaactatagggatcgatcagtattcctttaatgtcaaggagaatcagccatttcacggaatcaaggacatccccattggacacgttcatgtcattcattttcagcatgcagataattccagcatgaggtatggctactggtttgactgtagaatgggaaacttttacattcagtatgatcctaaagatggcctttacaaaatgatggaagaaagggatggcgcaaaattcgagaatattgttcacaacttcaaggaacggcagatgatggtttcttatccgaaaattgacgaagatgatacctggtacaatcttaccgagtttgtgcagatggataaaatccgaaagatagtaaggaaagatgaaaaccagttctcttacgtagattcttcgatgaccacagttcaagaaaatgagctgctaaaatccagcttgcaaaaagcaggttctaaaatggaaaccaagaatgaagatgatcctgcacattctttaaactatacagtaataaacttcaaatctagagaagccataaggcctggccatgaaatggaggattttttagacaagtcttactacttgaacactgtaatgctacaaggaatttttaaaaattcaagtaattattttggggagttgcagtttgcgttcttaaatgccatgttttttggtaactacgggtcgagtttgcaatggcacgctatgatcgaactgatatgttcaagcgctacagtgcctaaacatatgctcgataaattagacgaaatcttatattatcagataaagacattgcctgaacaatactcagacatcttgttgaatgaacgagtttggaatatttgtctgtattcgtcatttcaaaaaaactccctacacaacacagaaaagataatggaaaacaaatatccagaattgcttggtaaagacaatgaagacgacgctcttatttacggtatcagtgatgaagaaagggatgacgaggatgatgagcacaaccctaccattgttggcggtctctattaccaaaggccataa

SEQ ID NO: 75413 - DNA, 312 bp, Saccharomyces pastorianus
atgctgaaaatgaatgacatgaacgtgtccaatggggatgtccttgattccgtgaaatggctgattctccttgacattaaaggaatactgatcgatccctatagttacctcaatcggagcagatgtgaatggtacagtattcattgcaggcttccgatattttgttttttagccccatgtcccagcgataaggaggatctttggtgtccattcatctcattaaaccctaaaccattgaaatattcgtgttcgtgcgtcgcgattttttccgctttcaagatgtgtcctttcttcatctcttggttcttataa

SEQ ID NO: 75414 - DNA, 603 bp, Saccharomyces pastorianus
atgggtatttctcgtgattctcgtcacaaaagatccgctaccggtgccaagcgtgctcaattcagaaagaagagaaagttcgaattaggccgtcaaccagccaacaccaagatcggtgctaagagaattcactctgttagaactagaggtggtaacaagaaatacagagctctaagaattgaaaccggtaacttttcttgggcttctgaaggtatctccaagaagaccagaattgctggtgttgtttaccatccatccaacaatgaattggttagaactaacactttgaccaaggctgccattgtccaaattgatgctactccattcagacaatggttcgaagctcactacggtcaaaccttgggtaagaagaagaacatcaaggaagaagaaactgttgccaagagcaagaacgctgaaagaaagtgggctgctagagctgcttctgccaagatcgaatcttccgttgaatctcaattcagcgccggtagattatacgcttgtatctcttccagaccaggtcaatccggtagatgtgatggttacatcttggaaggtgaagaattagctttctacctaagaagattgactgctaagaaatag

SEQ ID NO: 75415 - DNA, 99 bp, Saccharomyces pastorianus
atggaactgcttcatatacgttatttacaggcctatcttaaagttataggaaattacacttgccatttgctttttggtactcacaagaagacgttataa

SEQ ID NO: 75416 - DNA, 249 bp, Saccharomyces pastorianus
atgtcaacatatgacgaaatcgaaatcgaagatatggcgtttgagcctgaaaatcaaatgttcacctatccttgtccctgtggagataggtttcaaatatatctggatgacatgtttgagggcgaaaaagttgctgtttgtcccagctgctcactgatgatcgatgtagttttcgataaagaagacttggctgagtactacgaagaggcaggcatacaacccccggagcctattgccgctgctgcctaa

SEQ ID NO: 75417 - DNA, 321 bp, Saccharomyces pastorianus
atgggccctgttttagtatggaatatcagcgatttaattggaatgaactttacatgtcttaaaggtctagcgactcttttcaaaacaggagcgtccataggtatctctttgggagcaggcgccgagtgttcaacgatcatcgcttgcaatttagggtcctggttcttcaaaatatctttagccattgttcaacgtttgcctcttggtatggaatgtcgtatttgtagctttcggaatgctcgacaaggtgggaatatacctgagctagctttgattataatatgtacttttatatattttctttatttttcattattttga

SEQ ID NO: 75418 - DNA, 1290 bp, Saccharomyces pastorianus
atggctaaagatattttgaagaaccaggaccctaaattgcaagcgatgatcgttgaacactcggcgcctgctcccaaagagatacctatggacgctcctgttttgaaaagagtcgctagacctttaagacatgtaaagttcattccaattaaatcgctgatattccatactaaaacagggcccatggatttttcttatgaaaagaagatcaagacgcctattcctaagaacaaaattgtagttcgagtaagtaatgtgggtttgaaccctgtagatatgaaaatcaggaacggctacacatcatcgatttacggtgagatcggcttggggagagagtacagtggtgttatcactgaggtaggcgagaacctaaactacgcctggcacgtgggtgatgaagtatacggtatatactaccaccctcatttggccgtgggatgtttgcaaagttcaatcttagtagatccaaaggtggacccaatccttttgagaccagaatcggttagcgccgaagaagctgcaggctccttattctgcttggccaccggctataatattctgaataaattatccaagaacaagtatttgaagcaagattcaaacgttttgattaatggtggaacttcgtcagtggggatgtttgtcatacaattattgaagcgtcattacaagttacagaaaaaactagtgattgtaacgtctgcaaatgggccccaagttttacaggagaaatttcctgatctggctgatgaaatgattttcatcgattacttaacgtgtaggggtaaatctagtaaaccactaagaaaaatgctcgaagaaaagaaaatttctcagtatgatccggtcgaggataaggaaactatacttaactataatgaggggaagttcgatgttgtactcgattttgtcggtggttacgatattttgagtcattctagttcattgattcacggcggtggtgcgtacgtaaccactgtaggtgattacgttgccaattataaagaagacattttcgattcatgggataacccaagtgccaatgcaagaaaaatgttcgggtctattatttggtcatataactacacacattactattttgatccgaatgcaaagacggcttccgccaataatgattggattgagcaatgtggtgactttttgaagaacggtactgtaaaatgtgtcgtcgacaaagtttatgactggaaagaccataaagaagcattttcttatatggccactcaacgtgcccaaggaaagttaatcatgaacgtcgaaaaattctag

SEQ ID NO: 75419 - DNA, 1065 bp, Saccharomyces pastorianus
atggtcatcgaccttgagcatgtggtagactatataatgcacatagactctcagcttcaactcaaaaaggcttctccagcaaaaatgaattcagagtctcgagaagatatggctataaatagtatcaaattgctagcgggaaactcccatcctgatttggctgaacaaatatcgaaaaagttaggtattccactttccaaagttggtgtgtaccagtattctaataaagaaacctctgtcaccataggtgagagccttcgcgacgaagatgtgtatattatccaaactggaataggtgaacaagaaattaatgatttcttgatggaattattaattttaattcatgcttgcaaaattgcatctgcaagaaagatcactactgtaatacccaattttccatatgcaagacaagacaagaaagataaatcccgggcgcccattaccgcaaagttggttgccaatttattgcaaactgctggtgctgatcatgtcatcacaatggatctccatgcctcccaaattcaagggtttttccatatcccggttgacaacctatatgcagaaccaagtgttttaaattatattagaacgaaaacagatttcgacaatgctattttggtgtcgcctgatgcaggtggtgctaagagagtagctgctttggctgacaagttagatttaaattttgctttgattcacaaagagaggcaaaaagctaacgaggtttcaaaaatggtgcttgttggtgatgttaccaataaatcatgtttattagttgatgatatggcggatacttgtggtacgttggtaaaagcttgtgatacgttgatggagcatggtgccaaagaagttatagctattgttacacacggtattttctccggttcagcaagagaaaagctaagaaatagtagattgtctagaattgtttgcacaaataccgttccggtagatttggatttacctattgctgaccagatcgatattagtcccacgttcgctgaagctataagaagactacacaatggtgaatccgtgtcatatttgttcacccatgctccagtatag

SEQ ID NO: 75420 - DNA, 786 bp, Saccharomyces pastorianus
atgtttagtagaatttgtagcgctcaattaaagaggacggcatggacccttcctaagcaggctcacttgcaatcacagacgattaaaacatttgccacagcacctattctgtgcaaacaattcaaacaaagtgatcaaccaagactaagaataaactctgatgctcctaactttgatgctgacacaacggttggtaaaatcaatttttacgactacttgggtgactcttggggggtcttgttttctcacccagcagatttcacccctgtctgcaccaccgaagtcagcgcattcgccaaattgaagccggaattcgacaagagaaatgttaaattgatcgggctttcagtggaagatgttgagtcccacgaaaaatggattcaagacatcaaggaaatagcaaaggttaaaaatgttggtttcccaataattggtgacacttttagaaacgtggcattcctatatgatatggtagatgccgaaggattcaaaaatatcaatgatgggtcactgaagaccgttaggtctgttttcgtcatcgatcccaagaagaagattagactgatttttacctacccttccaccgtcggaagaaacacttctgaagtgttaagggtaatcgacgccttgcaattgactgacaaggagggcgtagtaactccaattaattggcagccagctgacgatgtcattattcctccctctgtctccaatgatgaggcgaaggctaaatttggtcaattcaatgaaattaaaccctatttaagattcaccaagtcgaaataa

SEQ ID NO: 75421 - DNA, 3336 bp, Saccharomyces pastorianus
atggcttgttcttccttgcccaaccgccgcaccgcccagttcgaagcgaacaagaggaggaccattgcacatgctccatctccaagtctttcaaatgggatgcacactctaacgccgcccacctgtaacaatggtgctgccacttcagactccaatatacatgtatacgtaaggtgcagatcgcgtaataagcgagaaatagaggaaaaaagtagtgtagttatatctacactaggcccacaagggaaagaaatcattctgtccaacggttctcaccaatcgtattcgtcctcgaagaaaacttaccaatttgatcaggtgttcggcgcagaatctgaccaggaaacagtgtttaatgccactgcaaaaaactacattaaggaaatgttgcacgggtacaattgtacaatatttgcatacggtcaaacgggaacaggtaaaacctacactatgtctggcgatataaatattctcggtgatgtgcaatctaccgataatctattattaggagaacatgcaggtatcataccacgggttctggtcgatttgtttaaagaattgagctccttaaataaagagtactccgtaaaaatatcctttttagagttgtacaatgaaaatttgaaagatctgctctctgatagtgaggacgatgatcctgcagtcaacgatcccaagaggcagattcgtatttttgacaataacaacaataattcatccatcatggtcaaggggatgcaggaaatctttattaactctgcacacgaaggcttgaatttgctaatgcagggttcgttaaaaaggaaagtggccgctactaaatgcaacgatctttcatcaaggtctcacaccgtctttacaatcacaacaaacatagttgagcaagatagcaaagaccatggacaaaacaaaaattttgttaaaattggcaaattgaatttggtggatttggcaggcagtgaaaacatcaacagatcgggtgcggagaataaaagggctcaagaagctggcctaataaacaaatcgctgctaacactaggccgtgttatcaacgcactcgttgatcattctaaccatataccttacagagaatctaagctaacaagattgctacaagactctttaggtggtatgacgaaaacatgcattatcgcaactatatcacctgcgaaaatatccatggaagagactgcaagtacgctagaatatgcaacgagagccaaatcaattaagaatactccacaagtaaatcagtctttatcgaaggatacatgtctcaaagactacattcaagagattgaaaaattaagaaatgatttgaaaaattcaagaaacaaacaaggtatatttataactcaagatcagttggacctttacgagagcaattctatcttgattgatgagcaaaatctaaaaatacataacctgcgagaacaaattaaaaaattcaaagaaaactacctgaaccaattagatatcaataatcttttacagtctgaaaaggaaaaactaattgccataatacagaattttaatgtcgatttttctaacttttactcggaaatccaaaaaattcaccatactaatctcgaactaatgaatgaagtcatacaacagagagatttttcactagaaaattctcaaaaacagtataatacgaaccagaacatgcaattaaaaatctctcaacaagttttacagactttgaacactttacagggctctttaaataattataactctaaatgttccgaagttatcaaaggcgtcaccgaagaactaaccaggaacgtaaatacccataaggcgaaacacgattctactctcaaatcgttattaaacattactactaacttattgatgaatcagatgaacgaactggtgcgtagtatttcgacttcattggaaatatttcagagtgattctacttctcactatcgtaaagatttgaatgaaatctaccaatcacatcaacaatttctaaaaaatttacaaaacgatattaaaagctgtcttgattcgataggcagttcaattctaacttccataaacgaaatatcgcaaaattgcaccactaacttgaatagtatgaatgttttaatagaaaaccagcagtcaggatcatcgaaattaattaaagagcaagatttagaaataaaaaaactgaaaaacgatctgatcaatgagcgcaggatttctaaccaattcaaccaacagttggctgaaatgaagcgatattttcaggatcacgtttccaggacgcgtagtgaattccacgacgaacttaacaaatgtatcgataacctaaaagataaacaatctaagttggatcaagatatctggcagaagacggcctctattttcaacgaaacagatatcgtagttaataaaattcattccgactcaatagcatccctcgctcataatgctgaaaacactttgaaaacggtttctcagaacaatgaaagctttactaacgatttaatcagtctatcacgcggaatgaacatggacatatcctccaaactgagaagtttgcccatcaatgaatttttaaacaagatatcacaaaccatttgtgaaacctgtggcgatgataacacaatcgcatcaaatccagtattgacctctattaaaaaatttcaaaatataatttgttcagacattgccctaacaaatgagaagatcatgtcattaatagatgaaatacaatcacaaattgaaaccatatctaatgaaaacaatatcaatttgactgcaataaatgaaaattttaattctttatgcaattttatattaactgattacgatgagaatattatgcaaatctcaaaaacacaagatgaggtactttctgaacattgcgagaagctacaatcactgaaaatactgggtatggacattttcactgctcacagcatagaaaaaccccttcatgagcatacaagacctgaagcgtcagtaatcaaggctttacccttattggattatccaaaacaatttcagatttatagggatgctgaaaataagagcaaagacgacacatctaattctcgtacttgtataccaaacttgtcaactaatgaaaattttcctctttcacaattcagtccaaaaaccccagtgccagtgcctgatcaacctctaccaaaagttcttataccgaaaagcataaactcggccaagtccaatagatcaaagaccttaccaaatacagagggtactggacgagaatcgcagaacaatttgaagagaagatttaccaccgagccaatattgaagggagaagaaactgaaaataatgacatactgcaaaataaaaaacttcatcaataa

SEQ ID NO: 75422 - DNA, 381 bp, Saccharomyces pastorianus
atgtgtacctacataattacacagtcttttttttttttaccttgtttatccttcttgttcttcaagctcgtaggtttttttgactcagtttttactgcaggaaaatctttacgagtcatgtttgaactgcccatatttgatgaactaacttcttgctttgctgccatcgactgctcagcaacttcccttgacattccctttgctgaggaagaacttttcctgatgcttgtatcagaacccgttttaataccatttctattcgtgtttgaattcatattaatttgcaaaccttgtggctcacgatcacgttttgaatttccagtaaagaatgtttcagattttgaagaaactcttgaatttgatcctacgttacttgtttga

SEQ ID NO: 75423 - DNA, 2091 bp, Saccharomyces pastorianus
atggcaagttcaccgcaggtacatccatataagaagcatttaatgcaatcacagcatataaattttgataacaggggcctccagtttcaaaacagttcgttgaaggtaggtcaagatttttcagataataaagagaatagggaaaacagggacaatgaagacttcagtaccgcagaccttcctaagcggtcggcaaaccaaccgcttatcaatgagcatcttagagctgcgtcagtacctctactatcaaacgatataggcaatagtcaagaggaagatttcgatccagtcccacccccacagcttcatcttaataattcaaataatacttccttaagttctttgggaagtactcctacaaattctccgtcaccgggagcattaagacagacaaattcgagtacatctcttacgaaggagcaaataaagaaaagaactcgttctgtagatttgtctcacatgtacctgttgaatggtagcagtgatacccaattaacggctactaatgaatctgtagcagatttgtcacatcagatgatcagtcgatatttgggtggtaaaaataatacttccttagttccaaggctaaaaacaatagaaatgtatagacaaaacgttaaaaaatctaaagatcctgaagtgttattccagtatgcgcaatatatgttacaaaccgcactgactattgaatcttccaatgctcttgttcaagatagtgacaaggaaggaaatgtcagccaatctgacttaaaactccagtttttgaaagaagcgcaaagttatttgaagaaactgagcataaagggttattcagatgcccaatacttattagcggacggctactcatccggagcatttggaaagattgaaaataaagaagcatttgtcttatttcaagcagctgcaaagcatggtcatatagaaagtgcttacagagcatcgcattgcttagaagaaggactaggaacaacaagagattctcgtaagtcagtcaattttttaaagtttgcggctagcaggaatcatccctcagcaatgtataaattgggactttattctttctacggcagaatgggtcttccaaccgacgttaatactaaattgaatggggtaaaatggttatcaagggctgcagcaagagctaatgagttgacggccgcagcaccatacgaattggctaagatttatcatgaagggttcttagatgttgtcattccggatgaaaagtatgcaatggaactatatattcaagcagcaagtttagggcatgttccttcagcaactttgttggcacagatttatgaaacaggtaatgatacagtagggcaggatacatcactttctgtacactattatacgcaggcagcgttaaaaggcgattctgtggcaatgttaggtttatgtgcatggtacttactgggagcagaacctgcctttgaaaaagatgaaaatgaggcttttcaatgggccttgcgtgcagctaatgctggtttgccaaaggcccaattcactctgggctacttctatgagcatggcaaaggctgtgatcgtaacatggaatacgcatggaaatggtacgagaaagctgcagggaatgaggacaagagagcgattaataagctacgctcaagggacggtggactagccagcattggtaaaaaacagcataaaaaaaataaaagtatcagtactttgaatttattctctactgtggacagtcaaacaagtaacgtaggatcaaattcaagagtttcttcaaaatctgaaacattctttactggaaattcaaaacgtgatcgtgagccacaaggtttgcaaattaatatgaattcaaacacgaatagaaatggtattaaaacgggttctgatacaagcatcaggaaaagttcttcctcagcaaagggaatgtcaagggaagttgctgagcagtcgatggcagcaaagcaagaagttagttcatcaaatatgggcagttcaaacatgactcgtaaagattttcctgcagtaaaaactgagtcaaaaaaacctacgagcttgaagaacaagaaggataaacaaggtaaaaaaaaaaaagactgtgtaattatgtag

SEQ ID NO: 75424 - DNA, 2064 bp, Saccharomyces pastorianus
atgtgcgccagtttaaacgaggtaaaaaagaatgacacctatggggtctcacaaaagggctacaatgacaatttcagtgaaagtgagggcgtccttcatggtagtaagtcgatgcccactagcatgaaaaatatgctacagtctcccacgatggtcaacatgtgtgatattttacaaaacaaggaagctgctaatgacgaaaaacctgtgatacctactacgaataccgccactgcggggactggtactgaagatattagctccactcaatccgaggaaactgatcagaatagtcatcttattgcctcagagatcttggaagacactttcaaagatgtatcttacaaggaatatgcaaatttcttgggaaatgataacaataatcaagtcttgactgagtttgtaaagttattgagtcctttgccgtcgtcactattagaaacgcttttcaatttatcgaaaagtatatatttcattgcagaagcgcaaaatatcgaccggatactagagtgcttgagcaaagaatggatagcttgccacccgaacacacattggaagtcaggctataagtcatgtcacatagtcttattttccctgttgatccttaattcagatttgcacaacaactttcaagttgaccataaaaagattaagttttccatggttgcatttatcaacaatacactgagggcactaagagaggaaaatgaatacgaagaattgaaaatatactcccgcgaacatttgatcatcgaagaactttccgaatactataaaacgttaaatgaaacgcctttaccgttatgcacagaatctagaacatcaataaatacatcagataaccaatcttccttgaaaaggttctctactctaggatcacgggaatttagtacatcaaatttacgtagtgttaactctaattctactacactatattcaagagatggtcaagtatctgtacgagaaatgagcgcaaaatcaaataaaaactttcacaataatcaccccatggatgcactctaccttaaagagtcttttgatgacagtttaattaccgaaaacggctccagttggttcatggacgatttaattcttataagcaagaaatctttaccacgtaaatattctaaaagagacaaagatcaagtggcggcaccaaaaatgacctctaagagaaacaaatcgttcttcggatggctaaaaccatctaaaacgactacacttattgagcacacatctagaaggacttctttatcgtatttgaataaggattctgaatgggagagggtgaaaatacaggtcaaggagggcagaatttttattttcaaaattaaaccagatgttaaggatatcatccaatcaagtgaaacagacagtgctaccatcgactatttcaaagatatcagtagctcttattttgcttactcactgcttgaagctgaagcacatgtcgtgcaagataatataattataggtagtggagcaatgaaatcaaatgtgtgtaacaaaaacaccaagaggaaaagtggcaactttaccgttagttttccagagaatatcaacggaccaaagcttgttctggagttccagacgagaagtgttgaagaagcccacaagtttatggactgtatcaacttctgggcaggtaggatttctccagttcctttaacacaattcgaagccgtatctaatgcagaatatggatggagtgacaagatcttgacagagcacgcttccctcaatcttaaaaatattgttgtaagtgaatggaagccactattggggctagagctactatacgaagatgcgaaagatgtagagatggtcgaactaaaagaaagactaaaggaattgatgaacttcaccagacagcttggtatatggatagataaacataacgaaataaaggataaactggtcgaaatttggagctttgacgataactattttgaagcagtcatgaataattggaattcgagatatttgtatatgaataatcaatataagaaacgactgagctatttgaaagctttgcaaaaagccatgggctctgttcagttttaa

SEQ ID NO: 75425 - DNA, 1275 bp, Saccharomyces pastorianus
atggcggaaatacctgatgaaaccatccagcagttcatggcattgaccaatgtgtcgcataacatagccgttcaatatctctctgaatttggagatttaaatgaagcactaaattcctattatgcttctcaaacggatgaccaaaaggatagaagagaggaagcacattggaacagacagcaggagaaggccctcaagcaaggagccttctcctccaccaactcttcgaataaagccataaatacggagcacgttggtgggttatatccaaaaccaggatcctcacaaggtagcaacgagtacttaaaaaggaaagggtctacctctcctgaaccaaccaagggtagtagccgctctggaagtggtaacaactccaggtttatgagcttttcggatatggtaagaggtcaagctgatgatgacgatgaagatcaaccgagaaatacttttgctggtggtgaaacatccggcttagaggttacagatccttcagatccgaattcattactgaaggatttgctggaaaaagcgagaagaggtggtcaaatgggcgctgaaaacggatcccgtgatgacgaagaccaggaaatgggtgccaataggtttactggaagaggttttagattagggtcaaccatcgacgcagcagatgaagtcgtagaagacaacacttcacaatcacaacgtagaccagaaaaagtcacaagagaaattacattttggaaggaaggttttcaagtggccgatggtccgctttatcgctatgatgatcctgcgaacagtttctatttgagcgagttaaatcaagggagggctccattaaagctcttagatgtgcaatttggacaagaagttgaagttaatgtatataaaaaattagatgagtcttataaagctccgaagagaaaactgggcggtttttcaggccagggccaaaggctagggtctcctatcccgggtgaatcatcacctgcggaggttccaaagaatgagacacccgctgctcaggaacaacccacgtcggacaatgagccaaaacaaggcgacacctccatccaaattagatacgcaaatggcaaaagagaagttttgcgctgcaattccacagattcagtaaagtttttgtatgagcatgtgacatcaaatgcgaacactgacccatcgaggaatttcaccttgaattacgcctttcctatcaaaccaataagcaacgatgagacaacattgaaggacgctgatctgctgaactcagttgtcgtgcaaagatgggcatga

SEQ ID NO: 75426 - DNA, 1407 bp, Saccharomyces pastorianus
atgggtcaaatattgtccaatccaattatcgacaaagagcatcattctggtacggactgtttgacagcgtttggactatgtgccatgcaaggctggcgtatgtccatggaagatgcccatattgttgagccgaaccttttggctgagtctgacgaggaacatctcgcattttatggtatatttgacggtcatggtggttcttctgtagcggagttttgtggctctaaaatgatatctatactgaaaaaacaggagagcttcaagagcggtatgttagagcagtgcttaatagatacctttttagctacagatgttgagttgttgaaagatgaaaaattaaaagatgaccatagtggttgtacagcaactgtgatattggtatctcaattgaaaaagctactaatttgcgccaattccggtgatagtagaacagttctatctactggtggtaatagtaaagcaatgtcatttgatcataagcccacattgttaagcgaaaaatctcgtattgtagctgctgatggttttgttgagatggaccgtgttaatggaaatttagcgttatcaagagccataggtgattttgaattcaaatctaacacaaaattgggacctcatgagcaagtcgttacatgtgttcctgatatcatttgtcacaatttgaattatgatgaggatgaatttgttattttagcatgtgatggtatttgggattgtttaacttctcaagagtgtgttgacttggttcactacggtataagtcaaggtaatatgacgttgagcgacatttcatctagaatcgtagatgtttgttgttcacccacaactgaaggctcaggaattggctgtgataatatgagtatttccattgttgctttactaaaggaaaatgaatctgagtcacaatggtttgagcgtatgagatcaaaaaattacaatatccaaacgtcttttgtccaaagaaggaaaagtatttttgatttccatgatttttcggatgatgacaacgaagtgttcgcaataaccaccaaaaaattacaagaccgcttgaatcgtagtaaagataatgacgacatggaaattgatgatcttgataccgaattaggcagcagtgctactccctcaaagttatcaggtgaggatagaactggccctattgacttgttttcgttggaggctctattagaagccgggattcaaataaggcagaggcccagctccgacagtgacggcaacacttcttatttccatggtgcttctttatcagatatgttggcatctttaagcaatgcggctgcaggagaaacagaacctaatgatgctgatgataacgatgataacgacggcgaagaaaacggcaagaatgaaaatgcgaagaagggttccaagattgaagaaattgaataa

SEQ ID NO: 75427 - DNA, 1578 bp, Saccharomyces pastorianus
atgacgttgccgaaactcagtagcgtttctgtttcatcaggacatgttagtgccaactcacatggtttctcaatactaagcaaacaccctcacccaaataatcttgtccattcccactcactttctcacacaaatgcaaagagccacctgcctatcagtagcactagcactaaagagaacagcacgaacaaggaggaggcggaatcactcaaaaaaaacaacccctcttcttgggaccctagtgatgatatcaagctccgccacctgaaagagatcaagaacttgggctggaaggagattgcacatcatttcccaaatagaactcctaacgcttgtcaattcagatggaggagactgaaatcaggcaacttaaagtctaacaaaaccgcagttattgacatcaataagctattcggcatgtatgcgactggtgatgctaccccatccgcgggtactccgtctgcggaagaagccgtaaaagaggaagctgttgaggatgaagatattactgcaggttctagtgctatcgaggattctccaccggatttcaagccattagttaagcctaaatacatggacagaaaactgataactcaaagatctacatcaacattttcggaccatgagccacaacacacgaaaccaaggaaactgtttgttaagccaaggtccttctctcattctataacaaccaacacgcctaatgtaaagactgctcagcagacaaatctaagcctttataacactacttcagcaaagacaaataaagctgttaattccagtgattatgagaatattggtcttgtgcctaaaattattatcaggtctagaaggaactcctttattccttcaactcaaatccctcattcaacgacgaagactaggaaaaactcgcattccgtaatttcttctagaagatcatcttttaacatgatgcatccaagaagatcatccttcaactctcacgctcctacggagcctatttctagaagagcttccttggtagttagcccgtatatgtcacccagaaggttatctacatcgcaatccgttcattatcatccacagcaccaatactatcttaaccccatagcgtctcccaactgcaagacagaccacgcaaatgacaaaatcacgcacacgaggactttcttagatatgcaaaaattcgctaataaacacccgtggtctagagaagatgatgaagtgctacttaacaatacgaaggacaaacaaaaccatttgtcgccgctagaaatttctattgttctgcctaataatagatccgagttggaaatccaacaaagaatggattatttaaagagaaaaggatgtgtaagtggttttcatacaaatgaaggatgtaaagatgaggaggaggaggatgacattgacccactgcacaaggagaatggcattaacacgccatcgcagcaatcgcaaaattacggtatgttagaggctaaacatgataatccaaagtctagtgagctttcttctatgaccagcgcaaaggacatacgcaataagcaagatgaacttccaggtataaattctatctttaaaaatatattttaa

SEQ ID NO: 75428 - DNA, 375 bp, Saccharomyces pastorianus
atgttacatgtatatgcttatatccaatatatacccatcgccgcttattcttcgtcatcctctattagagttatttttcttctttttctgactctctccttccttatgtggcttactatatcgttttcatcctgctcttgtccttttctcttcccatcctcatcgtcatcactgtcttcttcatatgtgtcttcctcctcatcattttcttctgatatttgctcatcctcaatgtcatcatcaagggtaaagtcttcgtcttcgtcttcatcttctttggcgttttcacctacatataattcagtatctacatcgttttctacttcatcctgctctaaacttgatattccagtatcgtttctcctagctgcatga

SEQ ID NO: 75429 - DNA, 2499 bp, Saccharomyces pastorianus
atgtcattaacagcaaacgacgaatcaccaaaacccaaaaaaaatgcattattgaaaaacttagaaatcgatgatctgatacattctcaatttgtcagaagcgatacaaatggacatagaactacaagacgactattcaactccgataccagtatatcacatcgaataagaggaagtgttcggtctgataaaggccttaataaaataaaaaaagggttgatttcccagcagtccaaacttgcgtcagaaaattcttctcaaaatatcgttaatagggacaataaggtgggagcagtaagtttccccattattgaacctaatattgaagtcagcgaggagttgaaggttagaattaagtatgattctatcaaatttttcaattttgaaagactaatatctaaatcttcagtcatagcacctttagttaacaaaaatataacatcatccggtcctttaatcgggtttcaaagaagagttaacaggttaaagcaaacatgggatctagcaaccgaaagcatggagtacccatattcttctgataatacgccattcagggataacgattcttggcaatggtacgtaccttacggcggaacaataaaaaaaatgaaagatttcagtacaaaaagaactttacccacctgggaagataaaataaagtttcttacatttttagaaaattctaagtctgcaacgtacattaatggtaacgtatcactttgcaatcataatgaaaccgatcaagaaaatgaagataggaaaaaaaggaaagggaaagtaccaagaatcaaaaataaagtgtggttttcccagatagaatacattgttcttcgaaattatgaaattaaaccttggtatacatctccttttccggaacacatcaaccaaaataaaatggtttttatatgtgagttctgcctaaaatatatgacttctcgatatactttttatagacaccaactaaagtgtctaacttttaagccccccggaaatgaaatttatcgcgacggtaagctgtctgtttgggaaattgatgggcgggagaatgtcttgtattgtcaaaatctttgcctgttggcaaaatgttttatcaattctaagactttgtattacgatgttgaaccgtttatattctatattctaacggagagagaggatacagagaaccatccctatcaaaacgcagccaaattccatttcgtaggctatttctccaaggaaaaattcaactccaatgactataatctaagttgtattttaactctacccatataccagaggaaaggatacggtcagtttttgatggaattttcatatttattatccagaaaggagtcaaaatttggaactcctgaaaaaccattgtcggatttaggattattgacttacagaacgttttggaagataaaatgtgctgaagtgctattaaaattaagagacagtgctaaacgtcgatcaaataataaaaatgaagatacttttcagcaggtcagcctaaacgatatggctaaactaacaggaatgataccaacagacgttgtgtttggattggaacaacttcaagttttgtatcgccataaaacacgctcattatccagtttggatgatttcaactatattattaaaatcgattcttggaacaggattgaaaatatttacaaaacttggagctcaaaaaactatcctcgcgtcaaatatgacaaattattgtgggaacctattatattagggccgtcatttggtataaatgggatgatgaacttagaacccaccgcattagcggacgaagctcttacaaatgaaactatggctccggtaatttcgaataacacacatatagaaaactataacaacagtagagcacataataaacgcagaagaagaagaagaagaagtagtagtgagcacaaaacatctaaacttcatgtaaacaatatcatagaaccggaagtacctgctactgatttttttgaagacactgtttcctccttaacagagtatatgtgtgattataagaacacaaataatgatagattaatctatcaagcggaaaaaagagtgctggaaagcatccatgatcgcaaagggataccaagatcaaaatttagtacagaaactcattgggagctctgcttcaccattaaaaactccgaaacaccacttggaaatcatgcagctaggagaaacgatactggaatatcaagtttagagcaggatgaagtagaaaacgatgtagatactgaattatatgtaggtgaaaacgccaaagaagatgaagacgaagacgaagactttacccttgatgatgacattgaggatgagcaaatatcagaagaaaatgatgaggaggaagacacatatgaagaagacagtgatgacgatgaggatgggaagagaaaaggacaagagcaggatgaaaacgatatagtaagccacataaggaaggagagagtcagaaaaagaagaaaaataactctaatagaggatgacgaagaataa

SEQ ID NO: 75430 - DNA, 417 bp, Saccharomyces pastorianus
atgggattgcgttactccatatatattgaaaatccgttatcttccccatcatcatcgtataaatcaataaacgacccgttattccactctcagcatcgatcgcaaaaaaacgtgagcttcatcacctacggttgtagacattgcaagacacatctttccagttccttccagattatttctagagattataggggtaggaccggaactgcttatttaatgaacaaagttgttaatgtcgttgaaggaaaggtcgagcaacgaagaatgttgactggcgactacttagtctgtgatattctttgtcattggtgcaagaggaacgtaggttggaaatacttgcagagcagcaatgatgatcagcagtataaggaaggaaagtttatcttagagctgaaaaacatttgtaaatgtacttga

SEQ ID NO: 75431 - DNA, 312 bp, Saccharomyces pastorianus
atgattctttttaagaatctggtctttcttccttctattttgattgggtatatttctattcgtgtttcattactggtctgggttaattgggttttggtttggtccagttgttttcaagtagcctttattttttcattgtggtattttatcttatcgatttatacttttttttattcaaagaaaattaaacagataatctcttatgagcctagctactttgttttttcttacagggccattgacttatgccctgaacgagtcttactttactttttttgtattttcaaaaatgtcgtgtttcccatgttgtaa

SEQ ID NO: 75432 - DNA, 1353 bp, Saccharomyces pastorianus
atgagctcgacgatgttggatgatgtggataataatatgatgggtatcaagtctatcaacctttatgaattacttagcgatgtggtgaaacagggcgacaagacgcgattggtgacggcgggtcccgagcaagttttgcccgatttaatccgacatatcactgaaacaataccgtttgacctatttataaaccttaagaatgaaatgaacgatgcgagaaatctcgttaccagattaaattggctgggtaagtttctgaatgataattttttacaaaatcatacatttccattcacaatacttcggatatgcgaattgtgttatgatcctttcaaatattacaagatcaatgaattggagaagtttgtaaatgcgctagaaaaatgttgcatggtaactagcagttggcaggtttttgataaaacacacggtgagaagcaagaggacgataaggagaaagatattaacttcatcaagaatcaagaagatgtctcactaatgaagataccgtggataaccgagaacaatactagggagttggcaccctttataagagaaatcgactctataatgagtgtcaacctaggctacgatgacgaggatgaagaggatgaagacaatggtgatggagaagaggaaggattttttgatggtgatgaagatagggagatggggaataagagtaagcgtaatgttttgctgaaagatgaaaatttcatggtggaagaatactatgaggatgattgcgggataaacgatgataataccgataataaaggacaaaattgtcagagcgatgttacgaagaataatagcgatgatgaagatgacgatgacaacgatgacgattatcgtgaagatggtgcagatgaagatgatgaggatgatgatcacatgggcagcacagatgacgatgaagatgatgacgaagataggcaggcgggcgaaagtaccaaggtgcaaaattttgacaagaaaaatgaaactccaaggaagaggaagcccacagatttagataactttgaatatgacgaatcaccatcattcacaaacatggatctcacgacgccaaagaaatataaacataccgcaacgggcaggttctccataatagagtcgccatcgtcttcgctcctcaatgccatggacggcagtaatgagatctcatcgagccaggaggaggagaaagaggatgctcgtgaaaaccatgagggtggaagtgaaggactgttaccaggtgacgaattagtgagtccatcgatgagctcttcacaagaggataagatggttgcgattgctggtattacctaccgtgagaatattagcagtccattaggcaagaagttcagatga

SEQ ID NO: 75433 - DNA, 774 bp, Saccharomyces pastorianus
atgaactctacaaccccatcgattcaagatcaatatattttggccagcaaagtacgctccaagctggcaaaatgcgttagcgtgactactaaaaacaaagactacaacctgagagttttagtcgggcacgcaaacttgctggataagattactgaaaatgtggaaactcataatgctgcaaccaacgcccttgccggagaccctttcagtaaaggacctgaaaacttgtccatcgaacatatcgaattgtccaatgctaatgctagtaaaaatgacgtcggtaaggaggaaaatgcagaaaagacgatagaaagtgaagattactgtgatttttactctagtgacgaagatccagatgctgacactctatcctctactgacagtgaagacgatgatgattatgaagactatgattttgagtacgattactctggcggtgattataacaagaaaattgacatgtactttagttttcacaccgcacctaattatcaatatttgactcacacaaactctcattccgagcagacggatgaacttgccgaatcaacgccgcgctacaatgctcttcccgccactgcctccacgacagaggaagaacaggacactgaaacgctcgatgctgtgagtttgcatagttcagcgccaatctttcgtgtgctctctcggcgggtaaatggacaagaagatgacagcgaaaacgagagtagtagcgatgtcgacgatggttccgtaccattaacgagatttcattcttgtcctatcacagcataa

SEQ ID NO: 75434 - DNA, 180 bp, Saccharomyces pastorianus
atgggcttttttaacaataatccggtaattgaattcttccacagaataacgagaaaacccagtaccattgcgatgtgggtgtttgctggtctgatttgctcaagtacattttatttaatgttcatgtcatcacctacaatcgacttcaactcgaagagtaagaaaaaaaatgataaataa

SEQ ID NO: 75435 - DNA, 1740 bp, Saccharomyces pastorianus
atgaagtacgttgttgtttcaggtggtgtcatttcgggtatcggtaaaggtgttcttgcatcttcaactggtatgctaatgaaaaccctcggtttaaaggttacgtcaattaaaattgacccttatatgaacattgatgcaggtactatgtctcctttggaacatggtgaatgtttcgtgcttgacgacggtggtgaaacagatttggacttgggtaactacgagagataccttggagttaccttgactaaagaccataacattactactggtaaaatatactcgcacgttattgctaaggaaagaaaaggtgactatttaggcaaaaccgtgcaaattgtccctcatttgaccaacgctatccaagattggattgagcgcgtggccaaaattcctgtagatgacaccggtatggaaccagatgtttgtatcattgaattgggtgggacagttggtgacattgaaagtgctccttttgtggaggcactaagacaattccaatttaaagttggaaaggaaaattttgccttgatacacgtttctctagttcctgtcatccacggtgaacaaaaaactaagccaactcaagctgccatcaaaggtttgaggtctcttggtttggttccagatatgatcgcctgtagatgtagtgaaactttagataaaccaacaatcgataagattgccatgttttgtcatgtggggcctgaacaggtggttaacgttcacgatgttaactctacttatcacgtcccattgttgctactggaacaaaagatgattgattacttgcacgccagattaaagttagatgaaatatcacttacagaagaagaaaaacaaagaggcctggaattattgtctaaatggaaggctacaacaggtaacttcgatgaatccatggaaaccgtgaagattgctttggttgggaaatacaccaacttgaaagattcttatctatcagtgataaaagcattggaacattcatccatgaagtgtcgtcgtaagttagacattaaatgggtggaagctactgatttggaacctgaagcacaagaaagcaacaaaactaaatttcatgaagcatggaacatggtcagtaccgcagacggtatcttaatccccggtggttttggtgttagaggtactgaaggtatggttttggctgctagatgggctcgtgaaaatcacattccattcttaggggtttgcctgggtttacaaattgccaccattgaatttacacgtagtgtgttgggaagaaaagacagtcattcggcagaattttatccagacattgatgaaaaaaatcacgttgtcgttttcatgcctgaaattgacaaggaaaccatggggggctcaatgagattaggtttgagaccaacatttttccaaaatgaaactgaatggagtcaaatcaagaagttatacggtgacgtctccgaagtccatgaaagacaccgtcaccgttacgaaatcaatccaaagatggttgatgaattggaaaacaacgggttgatctttgtaggtaaggacgacactggaaagcgttgtgagattttggaattaaagaatcatccatactatattgctactcaatatcacccagaatacacatcaaaggtcttagatccatccaaaccatttttgggtttagttgctgcttccgctggtatccttcaagatgtcattgaaggtaagtacgatcttgaggccggcgaaaacaaattcaacttttaa

SEQ ID NO: 75436 - DNA, 84 bp, Saccharomyces pastorianus
atgtggggcctgaacaggtggttaacgttcacgatgttaactctacttatcacgtcccattgttgctactggaacaaaagatga

SEQ ID NO: 75437 - DNA, 699 bp, Saccharomyces pastorianus
atgttcccctatttaacaagaatgaatttagccataaagatgggagggctaactttaaaaggaagttcccccaatgcttttttaaataacaccactattgctaggagattcaagcatgaatatgcgccacgtttcaaaatcgtacaaaaaaagcaaaaaggtagagtgccagttcgtacaggtggttcaataaagggatccactttgcaatttggtaagtacggattacgactgaaaagcgaaggtattaggatatctgcgcaacagctgaaggaagcagataacgcaattatgagatatgtcaggcctttaaacaatggtcatttgtggaggcgtttgtgtacaaacgttgctgtatgtatcaagggtaacgaaacaagaatgggtaaaggtaaaggtgggtttgaccactggatggtgagagtacccacagggaagatccttttcgaaataaatggtgatgatttgcatgaaaaagtcgcacgtgaagccttcagaaaagcaggcaccaaattacctggggtatatgaatttgtatccttggattctctggttagagttggattacatagtttcaaaaatcctaaagacgacccagtgaagaatttttacgatgaaaatgcaaagaagccatcaaagaagtatttgaatattttaaagtctcaagaaccacagtacaaactcttcagaggacgttga

SEQ ID NO: 75438 - DNA, 3078 bp, Saccharomyces pastorianus
atggatcgcaaaaaaacacttataaactcaagtgtttctaataataacagtaccatcaagggcctacagttattcattgcagatcttcgttctgcacaacaagcacaagagcaggaaaagagaatacaatctgaaattgtcaaaattaaacagcatttcgatgctgcaaagaaaaaacaaggcaatcacgacagattaggtggctatcaaagaaagaagtacgttgccaagctagcctatatatatattacttctaatacgacaaaactaaatgaaattttattcgggttggagcaaacggtagagctgttgaagtccagcatattttctgaaaaattcattggatatatgacccttgagttgctttatgaacgtagtgaagttgttgccaaagttaacgatgaggtgaattatcaactgatgaaagatctctcttcttccgatgataatttcgtaatgttggcgctgaattttgttggtgtagtaggagaacttacgaaccgtctagcgtacaacgatgatatcacaacaggagtattcaagatattaagatcaccgacctcctccatttatctcaagaaaaaatcagcattgtcatttctagcactattgaaaagtaatcattctatactgaccgaagatttacaacgtaagcaactatggatacaaaggatattaagcttattggatgatacggaaaactataggttaactttagctacgattccgttaatagaattcattgcaaaatacattgatcccagttactgtacgagactattaccacagctaacagaaattttgtacaattgtgttgttgttggtacttcaagatctagtgacaatcagtttccgttagaatatacgttcgcgaatatgccaaatccttggcttatcacaaaagttgtctctttgttgagcatattgattgcctcaccaactgagagggattctggctcattattacaaaccaacaacatagataatgaattactaaataaacttcgaaagtgtgtttccgttgccatcgaattaggaaccagacaagctcaagatcccatggaacgtatcgtccaaaacacagtattgttttcattgatcaatttcgcctctaagcttgatccgtcggatgaagctatcagcaattctgtgacagccttatgttccctgctaacatctaaggaaattaatattcggtatttaacgctagattcattggtcaaattatgctcatcaagcgggaaacctgcaattgatgccgttcgttacaagaatttggatatgatttttcatcttttgaacacagaaagagattcatctattgttaggaaggttgttgacttgttatatacctttactgatgttgaaaacgttaagattattgtggacggattactgcagtatattttatctccgaaaaatcttgctgaaccgcaaataaaatctgatattgcagttaaaatagctattttgaccgagaaatatgccacggatatcaattggtttgtaattatttcgttgcagttgctatcattaacttcaaatacaactattaacgatgatgagatctggcaacgactatgtcaaattgtagtgaacaatccatctttacatagaataacatgtgaacggttggtggactatttatgtaaaaagcaagcatctgaagctattattaaagctgcggcttttctactaggggagtactcaagtctcataacagacaggatttcaagcgcaaatttatttactttgtttgccgagaaatattttagtgcaccaaatgtggctaaggcgatgatattgactacgatgatcaagttgtacaagacctcacctgagatcggctccaacgtcatcaaatttttccaattggaattgaactctcttgatattgagttgcaaacaagatccttcgaatatctcaacattattcaactggctaaggtgaacggaaatacagatattttgcaaattttatttgaaccaatgccgccttttaacagcaaatctaatccattattgaagagattagggtcactgccggcatcagcgggtagcacaactttaataaattcaccatccgaagcatcctcctccacgcctgacttactatcaaaaagagcaaactcttccaggtcgatcatggttcccatgcccccaccatctcgtaggaacaccattgatgatgcaaattccaaaattagttcatctgaagacttttcaggaaaggactcttattattcaaggcagatcctcgctccaaattggagggaaggtttcacaagaatgatttcgcataagcagggtgtgcttttcacatcatctttgatgaaagttttctatcggataaccactcctgatgcacaacagccatacgtgtttcatatatctcttgccttcattaacctgactgagtgggaaatcacgggattatccacacagattatcccttcaaaaacgcaaggtaatcctgagtatttaattctgaatattaatacaccttctactgctactattgggccccataaaagggcagagcaaagctatgaagtttcaataagaaaacctttcgacgttgaagatagtccaattttggcaattcatttcaaatgtggcggtagtacaaacactatcaatttgaaaactgccataggcatgaccacaacactaattagcagcgatgtcaatcctagcatgcatttgaatttggcacagttcatcagccgttggaagactttgagcgatgctttgggaaaagagggagaataccaaaaatctggcataaagctcaacaaggattttagaaaagttgaaacaatcagtttagaagacggactcctactattgacgcaaacagtgaagaggttgggctttgatatagtcgatcagaccagtgttcgtagtacattgtttgtctcgggtattattcatacgaaaagtgagggaaacttcggttgtttaatgaagatacaataccaggtaaatggatcagttaatgttacctgtaaaacaacgacggccggtcccctggcgaagtacattgtcgaatgtataaagaatgtgcttacgaagtaa

SEQ ID NO: 75439 - DNA, 774 bp, Saccharomyces pastorianus
atgtccacaggtattacttatgatgaagatagaaagacacaattaattgcccaatacgaatctgtaagggaagttgtgaatgcagaggcaaaaaatgttcatgttaatgaaaatgcctccaaaattttattattggttgtttcgaaattgaaaccagctagcgatatacaaattctttacgaccatggtgtgagggagttcggggaaaactatgttcaagagttgatcgaaaaggcaaaattactaccagacgatatcaagtggcactttattggcggtttgcaaacgaataaatgtaaagatttggctaaagtgccaaatttatactctgttgaaacaatcgactccttgaagaaagccaaaaaattaaacgaatcgagggctaaatttcaaccagattgcaacccaatattgtgtaatgttcaaattaatacctcccgtgaggatcaaaaatcgggcttgaataatgaagcagaaatatttgaagtcatcgacttcttcttatccgaagaatgcaagtatattaagttgaatgggttaatgactattggttcatggaacgtctctcatgaagatagcaaagaaaacagagactttgctacgctggttgagtggaagaagaagattgatgctaaatttggtacatcattgaaattgtctatggggatgagtgctgatttcagggaggctataaggcaaggaacagcagaagtcagaattggtaccgacatttttggtgctagacctccacaaaatgaagctagaatcatttag

SEQ ID NO: 75440 - DNA, 2118 bp, Saccharomyces pastorianus
atgagcggatctatcgatgtcatcactcattttgggcctgatgcagacaagccggaaatcatcactgcattagaggatttaactaaactgcatgcattgtccgtcgaggatctatacattaaatgggagcagttctccaatcaaaggcgtcaaactcacacagatctgacttccaagaacatagatgagtttaaacaatttttacaattacaaatggaaaagcgtgctaaccaaatttcatcgtcctctaaggtaaacacatccacaaaaaaactagtgattaaaaaaagtttgaattcaagtcccttgtttggccttagtattccaaagactccgactttaaaaaaaagaaagttacatggtcccttttcactcagtgattccaagcaaacatataatgtaggctctgaggcagaaacaaatgaaaaaggaaatagttctttaaaattagagtttactccaggcatggcagaagatgctgtgggtgacagtgctccattgtcccacgctaaaagctcggatgccaagactcccggctcgtcgacattccaaactccaacaacaaacactcctaccacatcgaggcaaaatgttcctgctggtaaaattttggattctttgaaccctgaaaatattgaaatatcatctggtaatccaaatgcaggccttctttcgactgaagaaccatcatataaccaggtcaaagtagaaccattctatgatgctaaaaagtataaattcagaacaatgaggcaaaacttacaggaagcgtctgatgtcctcgatgatcaaattgaatcgtttactaagattattcaaaatcactataagttatctccaaacgacttcgctgatccaacgattcaatctcagtccgaaatttatgctgttggaaggatagttccagattcgccgacctacgacaagtttttgaatccagaatcgctttccctagagacctcaagaatgggcggcgttggaagaagagtaaggttagacctatcgcaggtcaacgaactttcgtttttcttaggccaaattgtggcattcaaaggtaaaaatgctaatggggattacttcaccgttaactctattttgccgctaccttatccaaactccccagtgtccacatcgcaggaactgcaggagtttcaagcaagtttggaaggttcttctttgaaggttatcgtgacctgtggcccatactttgcaaatgataacttctccctcgaattgttgcaagaatttatcgatagtataaataatgaggtaaaacctcacgtcttgataatgtttggcccatttatagatatcacccatcctctgatagcgagtggtaaattgccaaattttccccagttcaagacacagcccaaaacattggacgagctttttttgaagttattcactcctattctaaaaaccatatcaccacatatccaaaccgtattgataccctccacaaaagatgcaatttctaatcacgccgcatatccacaagcttctttaattagaaaggctttacagctgcctaaaaagaacttcaaatgcatggctaatccttcatcttttcaaataaatgagatatacttcggttgctcaaacgttgatacattcaaagatctaaaggaagttataaaaggcggtactacctcatcaagatatagattagatcgtgtttctgagcatattttacaacagcgcaggtattaccccatatttccaggtagtattcgtacaagaataaaaccaaaagacgtatctacgaagaaggaaaccaatgatatggaaagcaaagaagaaaaagtttatgaacatatatctggtgcagatttagacgtgagttatctgggactaacagagtttgttggtgggttctcgcctgatataatgattatacctagtgaattacaacactttgcaagagtcgtccaaaacgtagttgttataaatcccggaagatttattagagcaacaggtaacaggggatcctatgcacaaattactgtccaatgccctgatcttgaagacgggaagttgacgcttgttgaaggtgaagagccagtttatctacacaacgtgtggaagcgcgctagagttgacttgattgctagttga

SEQ ID NO: 75441 - DNA, 1038 bp, Saccharomyces pastorianus
atgaccatagataactacgacaacagtaaacaggatagcagcaaatacgaggttagtggtacgggtgatggcaggaacggcgatggcggcttgcctctagtacaatgtgtcgcaagagctcgtatcccaaccacacagggtccggatatctttttacatctttacagtaacaacagggacaacaaggaacatctagccattgtgtttggtgaagacatacggtcgcgctcgctattccgtagaagacagtgcgagacgcaacaagatagaatgatcaggggcgcttatattggcaaactgtatcccggcagaactgtggcagacgaagacgatagactcggattagctctggagtttgatgatagtacaggtgagttattagcttccaaagccactacatgggacgcccataacgacacgctggtacggatccattctgaatgttacaccggtgaaaacgcatggagcgcccgttgtgattgtggtgaacaattcgatagggccggtaggcttatcgcttgcgaccacgaacccacaagcaacatcaaaggtggcaacggccatggtgttatcgtgtatctaagacaagagggtcgtggcatcgggttaggtgagaaactcaaggcctacaacctgcaagacttaggtgctgacacagtgcaggccaacttaatgctgaaacatcccgtggatgctagggacttctcgctgggtaaggctattttgctggatcttggcattggtaatgtcaggctgctgacaaataacccggaaaagataaaacaggtagatcatgcgccttaccttaagtgcgttgaacgagtgcctatggtacccatacactggacaaactccagtgaaggcatagactccaaggagatagaaggttacctaaggaccaagatagaaagaatgggtcatttactaacggagcctctgaaacttcatacaaaccctcaacctactgagacaagtgaagcccaaaaccaaaaccgtatgaactctgcgttgtcatcaacatcgacgctggcaatataa

SEQ ID NO: 75442 - DNA, 1017 bp, Saccharomyces pastorianus
atgaatgataaactccaagaagagcataacgaaaaagacaccacttcacaaattaatgatttcacgccgccgcatatgagtatagactttcattcaaataacaatagcaatatcatcgagactattggcgtttccaaaagactaggaaattctgtattaagtgaactggattctagagctagctcaaaatttgaatttttaaaagatcaatccgaacaacaatacaacggcgacaagaacaatgaaccaaaatcgggctcgtataatattaatgagttcttccaagcaaagcacgactctcaatttggccagatggagtcgctagacacacattatacccttttacatacgcccaagagaaagtcacaacatgcaatcccacaggatcgatcggattcgatgaaaaggtcgagaccgtcccgctcaattccatacactacaccagtggtaaacgatatcacaagaagaatacgaagattgaaattacggaactcattggttaatggtaatgacatagtggctagagcgagatctatgcaagcaaactctaacgttaattcaataaagaacacaccattgtcaaagcccaagccatttatgcacaaaccaaactttctaatgcccactacgaattctttgaacaagatcaattccgctcaccgtaatacatcctcctcttcgacagcttcatcgataccaagatctaaagtacacagatcgacatcaataagagatttacacgccaaaaccaaaccggtagaacgcacgccagttgcgcaaggaacaaattcgcaattgaagaattcagtttccgtttttgatagactttacaagcaaacaacgttctctaggtcgacgtctatgaacaacttatcgtcaggaacctctgcaaaatccaaggaacacacaaatgtaaagactcggttggttaaaagtaagacaagtggttcattgtccagtaaccttaagcaaagtactgccaccggcacaaagagtgatagacctatttggcggtga

SEQ ID NO: 75443 - DNA, 957 bp, Saccharomyces pastorianus
atgtcttctaacgcccaagtcaaaaccccactacctccagccccagctccaaagaaggaatctaactttttgattgatttcttaatgggtggtgtcagtgccgctatcgccaaaactgctgcatctcccatcgaaagagttaagcttttgatccaaaaccaagatgaaatgttaaaacaaggtactttggacagaaaatacgcaggtatcgtagactgtttcaagagaaccgctacacaggaaggtgttatctcattctggagaggtaacactgctaacgttatccgttatttccccactcaagctttgaatttcgccttcaaggacaagatcaaggccatgtttggtttcaagaaggaagaaggttacgccaaatggtttgccggtaacttggcatctggtggtgctgctggtgccttgtcattactatttgtttactctttggattatgcaagaactagattggctgctgactccaagtcctctaaaaagggtggtgcccgtcaattcaacggtttgatcgatgtctacaagaagaccttaaaatctgatggtgttgctggtctttacagaggtttcttaccttctgtcgttggtattgttgtctacagaggtctatacttcggtatgtacgactctttgaagcctatattgttgactggttctttggaaggttcattcttggcttcattcttgttgggttgggttgttactactggtgcttctacatgttcttacccattggatactgttagaagaagaatgatgatgacctccggtcaagctgttaagtacgacggtgcctttgactgtttgaagaagattgttgctgctgaaggtgttggttctctattcaagggttgtggtgctaacatcttaagaggtgtcgcaggtgctggtgttatctcaatgtacgatcaactgcaaatgatcttgtttggtaagaagttcaaataa

SEQ ID NO: 75444 - DNA, 285 bp, Saccharomyces pastorianus
atgtcattcatacctattgtatgtggtatgaagagtttcgactcttcatacgataccgttcccggacatcaaaacctgtattgcccgaattgtcacaattatagtgtcggccccataaaaagaaaggaatttttcactatttggtttataccgttggttccggtcttctggggaaaacagttgcactgccccatatgcaattggcgacaagattttaagaatgacgaacagcttaataaagtcattcaagaacaacaaaacttacgacaaaagcagcccaactga

SEQ ID NO: 75445 - DNA, 1131 bp, Saccharomyces pastorianus
  modified_base (210)..(300): a, c, g, t, unknown, or other
atgtgcgccaatatccccgaattcgactctttttacgaaaatgaaaatataaattacaacttggaatcattcgcacctttaaattgtgatgttaattcgccctttctccccattaataacaatgacatcaacgttaatgcttatggtgacgcaaatttaacgtactccaactttttattgtcttataacgataagctggctactacaacnnnnnnnnnnnnnnnnnnnnnnnnnnnnnnnnnnnnnnnnnnnnnnnnnnnnnnnnnnnnnnnnnnnnnnnnnnnnnnnnnnnnnnnnnnnctcggtaatgacatcagtcagatggcttttttactcgattacccttctactctcaacgaaccgcaatttgccgtaaattgtaaagacatttacagaaaggatatatcaacaccttcgtcattagtttcgagtctgccatctgcaaagttttcgttatccctatcgaattcgccttctccgccaccaccatcgtcgtcctctttgaaacatggggaagcaataatttctaataccagcgaaagcagtgacatatttgccgatcctaattcatttgaaaaggatactatgcccctaacgcaagaactgacgctagaaaatctaaataatcaattaaactatcccgatttcacgataaacgccatcgagcaggatcctgccccttcgtctttttcatcctcatcttcgtcttcggagtcaacggtctcttccagcaggaagaggaagccctgtcatgattcctacacacattcttcacgctcttcctcagagtctaagaaaatttccgactcgagattatccgccgaaggtttagccaaagtgcttaatttagaatcccccgaagaagctttaaaaagagaacgctttatattgggtattttccagaatgaattaaattacccgctaggttaccaaacgtggattagggatactaccaaagaatataggacaaagttaatcaatcaactgcacgaacgagtaaaggtaaagtaccccgaatacaaccagtccatactggaaacgataattagacgaggcacctactacatgatgcagagtaggttaagaagagagaggagaatgaagcttaaggaacgtaaaagaacaacctaa

SEQ ID NO: 75446 - DNA, 321 bp, Saccharomyces pastorianus
atggccaaatcattacgtgctagcagtcatctaaatgctaaatctgtcaaaagacgtggcgttttccaaaaagcagtagatgcacgtgaacaaagaatatccgataaactaaaggaagacttactaaagcaaaaattagaagatctaaaaaagaaagaagagcaaggaattgacatggatgtcgacgagaaaaaatccaatgaagaagctcccagaaaaaaaatcagcacctctggttggagagacggtagacatcacacttataaaaaggctaagctgatgaaacaatctaagaaaaaaacttctttcactagattctga

SEQ ID NO: 75447 - DNA, 438 bp, Saccharomyces pastorianus
atggatagaaatgtatatgaagcctgcagcaatataattaaggaatttggaacacatgtagtgagcgccgatgaagtactcgcagaaaagatagataatgctgttcctataccgttcaaaacaagggaggacatagatgccgacgtggaaaaagatagaaacgaaggagttttcgaaggtaatatcattcctgatatcgacctacgtgtagtacactactacgccacgcagttgtgtctaaataagtaccctcatttgattaacgcctttgatgagacaagccttataacattgggtttactcatcgaaaagtgggtaaaagactatctaaccagcatccagacagaacagggaaggcaaagtaaggtaatcgggaaggggccatgcgaattcatatcaaaacatattgattataggcatgcgccaggtaatatctga

SEQ ID NO: 75448 - DNA, 435 bp, Saccharomyces pastorianus
atgaataccaacgagtccgaacatgttagcacaagcccagaggatactcaggagaacggtggaaacgctagctccagcggcagtttgcagcaaatttccacgctaagagagcaggacagatggctacccatcaacaatgtagcgcgactcatgaagaatactctcccaccgagtgctaaggtatcgaaagatgcgaaagagtgcatgcaggagtgtgtcagtgagctcatttcttttgtgactagcgaggccagcgatcgatgcgctgctgacaaaagaaagacgataaacggggaagacattctcatatcattgcacgccttaggattcgagaactatgcagaggtgttgaaaatctacttggctaaatacaggcaacaacaggcgctgaagaatcaactaatgtatgagcaggacgacgaagaggtgccttga

SEQ ID NO: 75449 - DNA, 1725 bp, Saccharomyces pastorianus
atggcgaaaaaaaactcacaattgccctctactagcgagcagatcttggaaaggtccacaacaggagctaccttcctcatgatgggccaacttttcaccaaactggtaacgttcatactaaataatttgttgatcaggtttctgtcgcccagaattttcggtatcacggcctttctagaatttatacagggcacagtgttattttttagcagagatgcgattcgtctgtcgacgttgagaatctcagactccggtaatggaataatcgatgatgacgacgaggaggagtaccaggaaactcattacaagtctaaagttttgcaaaccgcagtcaattttgcttacattccgttttggatcgggtttccactgtccattggtcttatcgcctggcagtacagaaacatcaacgcgtatttcatcactcttccattcttcaggtggtcgatttttcttatctggctgagtatcatcgtggagctgttaagcgagccattcttcatcgtcaaccagtttatgttgaactatgccgcaaggtcaagatttgaaagcatcgcggtgactacaggatgtattgtcaattttatagttgtttatgccgttcagcaatcccgctacccaatgggggttgtcacatcggacattgacaaagaaggcatcgccatattggcatttgccttgggcaagttagcacattcgatcaccctgctagcatgctactactgggactatctcaagaatttcaaaccaaagaaattgttcagtaccaggctaacgaagataaaaacgcgtgaaaacaacgaattgaagaaaggctacccaaagagcacatcttattttttccaaaacgacattttacagcacttcaaaaaagtttattttcaactatgttttaagcatttgttgacagagggtgataagttgattatcaattctttatgtactgtggaagaacaaggcatttacgctctattgtcgaactatggatcgctactaacaagattattatttgcgccgatcgaagaatctctgcggttatttttggcccgtttattgtcttcgcataaccctaaaaatttaaaactatctattgaagtcctggtgaatttaacaaggttttacatatacttatcgttaatgatcattgtatttgggcctgccaattcatcctttttattgcagttcttgattggctcgaaatggtccactacttccgttttggacactataagagtctactgcttttacatcccatttttatcgcttaatggtatttttgaagcttttttccagagtgtagccactggtgaccaaattttgaaacattcatattttatgatggccttttctggtattttcctgctcaattcctggcttcttattgaaaaactcaaactatcaatcgaaggtttgatattgagtaacatcattaacatggtgttgagaatattgtattgtggagttttcttgaataaatttcatagggaattgtttacagattcctcttttttcttcaattttaaggatttcaaaacagttattattgctggctcaacgatctgtctacttgactggtggtttattgggtacgttaaaaatttacaacaatttgttgttaacgtattattcgcaatgggattgttagcgttaattttggtcaaggagcgccaaaccatacaatcttttattaacaagagggcggtttccaattctaaagatgtataa

SEQ ID NO: 75450 - DNA, 1563 bp, Saccharomyces pastorianus
atgtcatcaagcgaaaacacgttactggatggaaagtcagagaacacaatacgatttttaactttcaatgtcaatggtataagaaccttttttcattatcaaccattttctcaaatgaatcaatcccttagatctgttttcgacttttttcgagcagacataataacattccaagagctcaagacggaaaaattgtctatctctaagtgggggagagttgatggtttttattcttttatttctatccctcaaaacagaaagggatattctggcgttggctgctggattagaattccggaaaagaaccacccactataccatgcattacaagtcgttaaggcagaagaaggtataacgggttacttgacaataaaaaatggtaagcattcagcaatctcctatagaaacgacgtaaatcaaggaattggtggttacgattctttagatcccgatttagatgagaaaagtgcactggaactagattcagaaggcagatgtgttatggttgaactggcatgtggaatagttattatcagtgtatattgtcccgcaaattcgaactcatcggaggagggtgagctgtttagaataaggttcttgaaagttttattaagaagagttcggaatttggacaaaattgggaagaagattgtgctaatgggcgacgtaaatgtttgccgggatcttatagacagtgccgatacattagaacaattctcaattccaataacagatcccatgggtggaacaaagttagaagcacaatatagggataaagcaatccaatttattatcaatccggacacgccacatcggaggatatttaatcaaatattggctgattcacttttaccagacgcgagtaaaagggggatactgatagacactacgaggctaattcaaacaagaaatcgacttaaaatgtatacagtctggaatatgttaaaaaatttaagaccttcgaattatggctcacggatagattttatcctagtgtccttaaagcttgaacgatgcataaaaacagctgacattcttccggatatattgggctctgaccattgtcctgtgtattctgatttagatatagtggacgacagaattgaacctggtacgacacaagttgccataccaaaatttgaagcaaggtacaaatataatttaagaaaccatgatgttttagagatgtttgccaaaaaggatacgaataaagaatctaataaacagaaatattgtgtatcaaaagtcatgaataccaaaaaaaacagcaacatcaaaaacaaatcgctcgactcatttttccagaaggtaaatggagaaaaagatgacaggattaaagaatcctctgaaattccacagcaagctaaaaaaagaatctccacgccaaagttgaatttcaaggatgtcttcggaaagcctcccctgtgcaggcatggggaggaatccatgctgaaaacatcgaaaacttcggccaatccaggtagaaagttctggatttgcaagagatctcggggtgattcaaataatacagaatcatcatgtgggttttttcagtgggtttaa

SEQ ID NO: 75451 - DNA, 1062 bp, Saccharomyces pastorianus
atgccaaagagaattgtatacaatatatccagtgacttccagttgaagtcgttactgggagagggtgcatacggtgtggtatgttctgcaacgcataagcccacgggagaaatcgtggcaataaagaagattgaaccattcgataagcctttgttcgcattacgtacgctgcgtgaaataaagatcctgaagcacttcaagcacgaaaatatcataacaatcttcaacattcaacgccctgactcgttcgaaaacttcaatgaggtctacataattcaagagctaatgcagacagatttacaccgtgtaatctccacccagatgctgagtgacgatcatatacaatattttatataccaaaccttgagagcagtgaaagtgctgcatggttcgaacgtcatccatcgtgatttaaagccctccaaccttctcataaactccaactgtgacttgaaagtatgtgatttcggtttagcaagaatcattgacgagtcagccgcggacaattcagagcccacaggtcagcaaagcggcatgaccgagtatgtggccacacgttggtacagggcgccagaggtgatgttaacctctgccaaatattcaagggccatggacgtgtggtcctgcggatgtattctcgctgaacttttcttaagacggccaatcttccctggcagagattatcgccatcaactactactgatattcggtatcatcggtacacctcactcagataatgatttgcggtgtatagagtcacccagggctagagagtacataaagtcgcttcccatgtaccctgccgcgccactggagaagatgttccctcgagtcaacccgaaaggcatagatcttttacagcgtatgcttgtttttgaccctgcgaagaggattactgctaaggaggcactggagcatccgtatttgcagacataccacgatccaaatgacgaacctgaaggcgaacccatcccacccagcttcttcgagtttgatcaccacaaggaggcactaacgacgaaagacctcaagaaactcatttggaacgaaatatttagttag

SEQ ID NO: 75452 - DNA, 1581 bp, Saccharomyces pastorianus
atgacaatttctaatttgttaaagcagagagttaggtatgctccctatctgaaaaaagttaaggaagctcacgagcttattccattgttcaagaatggtcagtaccttgggtggtccggttttacaggagtgggtactcccaaggcagtgccggaggcactgatagatcacgtggagaagaacaatttacaagggaagttgagattcaacctttttgttggagcttctgctggtccagaggaaaaccgttgggctgaacacgacatgatcattaagagagcccctcatcaagtagggaaacccattgcaaaggcaattaaccagggtagaattgagttctttgataaacatctgtccatgttccctcaggatctgacatacgggttctacaccagggaaagaaaagacaacaaaatccttgattatactataatcgaggcaacggccattaaagaggacgggtctatcgtcccaggtccctctgtcggtggttctccagaattcattacagtcagtgataaagtgattattgaggttaacacggctacgccttcgttcgagggtattcacgatatagacatgcccgtgaacccacctttcaggaaaccatacccatatctgaaagtggacgacaagtgtggtgttgactccatcccggttgatcctgaaaaggttgttgcgattgtggagtccaccatgagggaccaggtcccaccaaatacgccctctgacgacatgtccagggctattgcaggtcatttggtcgagtttttcagaaacgaggtaaaacatggtaggctacctgaaaacctgctgcctttacaaagtggtataggtaacattgctaacgctgtcattgaagggcttgctggcgcccaattcaagcacttgactgtatggacggaagtgctgcaggactcgttcttggatcttttcgagaacggatctttggactacgccactgctacttccatgagattgactgaaaagggtttcgacagagcctttgcaaactgggaaaatttcaaacacagattgtgtttgaggtctcaagtagtgtcgaacaatccggaaatgatccgtagattgggtgtcatcgccatgaataccccagtagaagttgacatttacgcgcacgccaattctacaaatgtgaatggttcccgtatgttgaacgggttgggtggatctgctgatttcttgagaaatgcaaagttgtccatcatgcatgccccctctgcaagaccaactaaagtagaccctaccggtatctctaccattgttcctatggcctctcatgtagatcaaactgagcatgacctggacatcttggtcactgaccaaggtttggcggatctaagaggtctatcgcctaaggaaagagcccgtgaaatcatcaacaagtgtgctcatcccgattatcaagctttgttgaccgattacttggacagagcagagcattacgctaaaaagcacaattgcttgcatgaaccacacatgctaaagaatgctttcaagttccacaccaacttagctgaaaagggtacaatgaaggtcgacagctgggaaccagttgactag

SEQ ID NO: 75453 - DNA, 2685 bp, Saccharomyces pastorianus
atgagtgagggacaaattccaagctcagatgtgttaggctcgcaattgggtgttggtgtacaaggcgccagtctttactgtccgcaagaaaattacactacgaagaagcaagaaaagccacaatggctaagaccagtggatgatacattggccgaggatgcactagaccttcatatagtggtcaaaagtctgctttgtgatactgccataagatatatttccgacgacaaggttttgcaagaatcagatgccgacgatgatctcataactagcgatattgatgaagatacggacaatcagggggatacatctatagtggtcaatccagtgatacccgtggtaccgaaagatgtccatttttttaagaaagttgacgttggtaatggttctatgtttggcgtgaactgcgatacgccagtttcatttcaagattacattccttcagatttgctgcgcaacttagatgatacattacaagaaagtactaactcttcgaggccgatgcaagacgccttcttttgggatcctactgtggctaatcgactggactctcaatatattcagacagcatcagatttaagaaattatagagacggaaccgaaatcatagcatatgcctcgggtaaaacaggctcagtcctaaatatagcagttctgacacgacaaaatacattgcatttaaaccgacataacaatgtaacgagtatcgaattgcattcacctatcaagagtattaagataccggaggcctctgagtccatcgggcggagatcaaacctggtgggcataatcaccgaaaattctttccaaatctttagaattgaaagtgtccactcaagatcatgtgatgtcatggttagtagttcagaaccactgtattttgttgaaatagacgaccttcaggtggtagattttgcattcaatccttgggacttacaacaattcgcaatcattgatatcaaaggtaactggagtatcgggaggataccaaagaatttcaataataataacaaaaggaaactacagttaatagataacctccacggtacgatttttgatccagaagaattatcgtcatggaaaagaatagaatggttttcacacttccaaaaaatactggtctttgataggtccaaaatgattgagatcgactttatgaacaattggcaaacggaagtagtacaagcgaaagcatggtcaaacatacgtgattataagcggatagatgataaaaatggtattttactcacttcaagggaaataatcatcgtaggggcatcagaatcaaatgatccagtgagaagaatatcttggaaacacgatctggatccagatgatactacgctcagaatcactggacaaaaggttaaaaagcctgaccatattcttctggtggcctttgtatattcgatgcggcataaacgcatctatatgcatgtattttcccataagaaagcaaacttgtttcaatccttaggatgttcaacagttcttgaaattccgggtgggacccccaccggtatagagacaatcttaacactggatcatatagacgatgaatctcggagagaggaggatgcagatgaaaattttgagttagttgtagattttttagtcaaactaaggaactcatccgaggtttattactatgctttatcaaacactcaaaactccgaaccgaacaaacaagaaacccccatcattgtcgaccatcccgaatgggcgtcacttttcaataacgctgatgaacgtgaaaaggagagtatcggtgcactggtttctcaaattaagttgaaggaaagagagcgcatatctcgagtccaaaatttaattgagcatgaaaacagtcacgacgaagataaatatctccaagatttgggatatcgcttatctatagctacaaacgaattgcttgaatcttggcagaagacgaaagatgaaagcatccttagtgggtctttgagccattcaaaattgaaaaaccttgtggagaattcagattccttcgcgagtatacctgaattttcttcattactagatcagtttttccagtactatcaggatcaggatgtgacatttattggttttgagaaattgctacatttgtttttacatgaagacgttccgggcttggatatcttttacaacaaattattgcaatgttgggttttggtatccccgcaagcggaactgctgacaaaggagatagtcaaagacattatctggagtttagcaagacttgaaaaaccatcactttttgaaccgattcaaaacgaaatttcacgatcactaagtggtccttaccaggatattatctcctcttgggatatggatgatatcaatgaagaagatgaatcgaatgaatttaattttgatagtcaattttcagcaccctttaatggcaggcctccatttaatttaaattcgcaatctcaaattccaacgatcaaatcatcacaaagtagcggactggcaaggaggaaaagaatattaaagacacaatcacaaaaagctactccgttatcacaatccactcaaaacttaagtgtcctgccagattcaatgacaccagcatttactctaatgcagcccccttcctcgcagatatcatttgtgaacgattcacaaccgcgtaattctcaaaaagccaaaaagaagaagaaaaggatccgggggtttggataa

SEQ ID NO: 75454 - DNA, 2265 bp, Saccharomyces pastorianus
atgcctgcatcaaaactcacggagaaatctgcctcttccaagagcacacagaaaactacgaattacagttccatcgaggccaaaagcgtcaagacgtcggctgatcaggcatacatctaccaagagcctagcgctaccaagaagatactttactccatcgccacatggctgttgtacaacatcttccactgcttctttagagaaatcagaggccggggcagtttcaaggtaccgcaacagggaccggtgatctttgttgcggctccgcatgctaaccagttcgtcgaccctgtaatccttatgggcgaggtgaagaaatctgtcaacagacgtgtgtccttcttgattgcggagagctcattaaagcaacccgccatagggtttttggctagtttcttcatggccataggcgtggtaaggccgcaggataatttgaaaccggcagaaggtactatccgcgtagatccaacagactacaagagagttatcggccacgacacgcatttcttgactgattgtatgccaaagggtctcatcgggttacccaaatcaatgggatttggagaaatccagtccatagaaagtgacacgagtttgaccctaagaaaagagttcaaaatgaccaaaccagagattaaaaccgccttactcaccggcactacttataaatatgccgctaaagtcgaccaatcttgcgtttaccatagagtttttgagcatttggcccataacaactgcattgggatctttcctgaaggtgggtcccacgacagaacaaacttgttgcccctgaaagcaggtgtggcgattatggctcttggttgcatggataagcatcctgacgtcaatgttaagattgttccctgcggtatgaattatttccatccacataagttcaggtcgagagcggttgttgaattcggtgaccccattgaaataccgaaggaactagtcgccaagtaccacaacccggaaatgaacagagatgcagtgaaagaattattagataccatatcgaagggtttacaatccgttaccgttacatgttctgattatgaaactttgatggtggttcaaacgataagaagactatatatgacacaatttagcaccaagttaccgttgcccttgattgtggaaatgaacagaagaatggtcaaaggttacgaattctatagaaacgatcctaaaatagcggacttgaccaaagatataatggcatataatgccgccttgagacactataatcttcctgatcaccttgtggaggaggcaaaggtaaatttcgcaaaaaacctcggacttgttttttttagatccatcgggctctgcatcctcttttcgttagccatgccaggtatcattatgttctcacctgtcttcatattagccaagagaatttctcaagaaaaggcccgtaccgctttgtccaagtctacagttaaaataaaggctaatgatgtcattgccacgtggaaaatcttgattgggatgggatttgcgcccttgctttacatcttttggtccgttttaatcacttattacctcagacatagaccatggaataaaatatatgttttttccgggtcttacatctcgtgtgttatagtcacatattcagccttaatcgtgggtgatattggtatggatggtttcaaatctttgagaccactggttttatctcttacatctccaaagggcttgcaaaagctacaaaaggatcgtagaaatctggcagaaagaataatcgaagttgtaaataactttggaagcgaattattccccgatttcgatagtgccgccctacgtgaagaattcgacgtcatcgatgaagaggaagaagatcgaaaaacctcagaattgaatcgcaggaaaatgctaagaaaacagaaaataaaaagacaagaaaaagattcgtcatcacctatcatcagccaacgtgacaaccacgatgcctatgaacaccataaccaagattccgatggcgtctcattggtcaatagtgacaattccctctctaacattccattattctcttctacttttcatcgtaagtcagagtcttccttagcttcgacatccgttgcaccttcttcttcctccgaatttgaggtagaaaacgaaatcttggaggaaaaaaatggattagcaagtaaaatcgcacaggccgtcttaaacaagagaattggtgaaaatactgccagggaagaggaagaggaagaagaagaggaagaagaagaagaagggaaagaaggagatgcgtag

SEQ ID NO: 75455 - DNA, 240 bp, Saccharomyces pastorianus
atgaaaatgaacccttgtactgttatcctctgtaagtcgttatttttcttttgcctttttcaggttgactgctactgtaatcgtaagaatattcaaaatcaatcatctcgcatcgcaacaaaaataaaacgaagttactggtttaggtggcagaaacatataatattggcgaacattcataaaataattaaggcttaccaacgaagcataataaaattgccagtaaccaaaggtctctga

SEQ ID NO: 75456 - DNA, 2931 bp, Saccharomyces pastorianus
atgaaagtgaagaaatcaactagatcaaaagtttcgacagcatgtgtcaattgcagaaaaaggaaaatcaaatgcacaggtaaatatccatgtaccaactgcatttcttacgattgtacgtgtgtattcctaaaaaaacatttaccgcagaaggaggatagttcccagtctttgcctactacagctgttgctccaccctcttcccacgccaatgtagaggcttcagcagatgtacagcatctggacactgcgattaagctagataatcaatattacttcaaactgatgaacgacctgatacagactccagtctctccgagtgcgacgcatgctcctgatacttccaataatcctactaatgataataatattctctttaaagatgattccaaatatcaaaatcaactggttacgtatcaaaatattctgacaaatttgtacgctctgccgccttgtgatgacactcagctcttgattgataaaacgaagtcgcagttgaataacctgattaacagttggaatcccgaaataaactaccccaagctttccagtttctctcctcgcccacaaagatcgatagaaacgtatcttttaaccaacaagtatagaaataaaatacacatgacgaggttctccttttggacagaccaaatggttaaatcacaaagtccagattcatttctagccaccactccactagtagatgaagtatttggtcttttctctccaatacaggctttttcactaagaggtataggatatttaattaaaaaaaatatcgaaaacacgggttcatcgatgttaatagatacaaaggaaactatttatctaatattaagattgtttgatttgtgttatgaacatttgatccaaggttgcatctctatttctaatccattagagaactatcttcaaaaaataaagcaaactcctactacgacggcatctgctagtttgcctacttccccagcacctttatctaacgatttagtcatttctgttattcatcaactacctcagccatttatacaatcgatcaccgggtttacgactactcaattgatagaaaatttacatgattcattttcgatgtttcgaatagttactcaaatgtatgctcaacataggaagcgctttgcggaatttttaaaccaagctttttccttgccccatcaagaaaagagtgttttattctcatcattctgctcatcagaatatcttctatctactctttgttacgcatactacaatgttaccctatatcacatgttggacataaacactttagattacctagagattttagtgtcattgctagaaatccaaaatgaaattgatgagcgttttggatttgaaaaaatgctagaagttgcggttacatgctccactaagatgggattgtctcgttgggagtattatgttggaatagacgaaaatactgccgaacggagaagaaaaatatggtggaaaatatacagtctggaaaagcgttttttaactgatcttggtgatttatccttaataaatgaacatcaaatgaattgtctcttgccgaaggatttcagggacatgggattcattaaccataaagaatttttaacgaaaattggtacgtcctctttatcaccgtcatcgcccaagctaaaaaacttgtcattgtccaggcttattgaatatggtgagttagcgatagcccaaattgttggagattttttttcagagactctttataatgagaaattcacgtctttagaagtatccgttaaacccacaattatcagacaaaagttattggagaaagtttttgaggacattgaatcttttaggttaaaattggccaaaataaagcttcacacctcaagagtttttcaagtagctcactgcaaatatccagaatatccaaaaaacgatctaattgaagcagctaaatttgtaagttatcataaaaatacatggttctccatcttgggtgctgttaacaatcttattgctaggctatctgaagatccagaggtgataactgagcaaagcatgaagtatgcgaatgaaatgtttcaagaatggagggaaattaatcaattcttaatacaggttgatactgattttattgtttgggcatgtttggacttttatgaactgatatttttcgtgatggcttcaaaattttatgtggaagacccgcacatcactttagaggatgttatcaacactttgaaagtttttaagagaataactaacattatttctttttttaataataatttggacgagaaggattatgattgtcaaactttcagggagttttcgagaagttcgagtttggttgccatatccataagaatcatatttttaaaatactgctatgccgaacaaattgatagagccgaattcatcgaacgtttgaaagaagttgaaccgggtctaagtgaccttttgcgtgagttttttgatacccgctcttttatttacaggtacatgttgaaatccgttgaaaaatcaggctttcatttaataattagaaaaatgttagaaagcgactataaatttttgtatagagacaaattggccactggtaatattccagatcaaggaaattcaagccaaatttctcagttgtatgacagtactgctccttcatacaacaatgcttctacctcagcagcaaattcaccgttgaagttatcgtctttgttgaactctggagaggaatcgtacactcaagacgcatcagaaaatgttccatgtaatctgcggcatcaagatcgatcgttacaacagacaaaaagacaacattctgcgcctagccaaataagcgctaatgagaataatatatacaacttgggtactttagaggagtttgttagcagtggtgacctgactgatttatatcatactctgtggaatgacaatacttcatatcccttcttatga

SEQ ID NO: 75457 - DNA, 399 bp, Saccharomyces pastorianus
atgtccggtggtaaaggtggtaaagctggttcagctgctaaagcttctcaatctagatctgctaaagctggtttaacattcccagttggtagagtgcacagattgctaagaagaggtaactacgcccagagaattggttctggtgctccagtctatctaactgctgtcttagaatatttggctgctgaaattttagaattggctggtaatgctgctagagataacaaaaaaaccagaattattccaagacatttacaattggccatcagaaatgatgatgaattgaacaagctattgggtaatgttaccatcgcccaaggtggtgttttgccaaacattcaccaaaacttgttgccaaagaagtctgccaagactgccaaagcttctcaagaactgtaa

SEQ ID NO: 75458 - DNA, 396 bp, Saccharomyces pastorianus
atgtcctctgccgccgaaaagaaaccagcttccaaagctccagctgaaaagaagccagctgccaagaaaacatcaacctccgtcgatggtaagaagagatctaaggttagaaaggagacctattcctcttatatttacaaagttttgaagcaaactcacccagacactggtatttcccagaagtctatgtctattttgaactctttcgttaacgatatctttgaaagaattgctactgaagcttctaaattggccgcttataacaagaaatccactatttctgctagagaaatccaaacagccgttagattgatcttacctggtgaattggctaaacatgccgtctccgaaggtactagggctgttaccaaatactcctcctctactcaagcctaa

SEQ ID NO: 75459 - DNA, 315 bp, Saccharomyces pastorianus
atgcccaagatcttttgtttagcggacgtgtgtatggtccctattggcaccgactctgctagtatttctgattttgttgcactcattgaaaaaaaaatcagagaaagcccattaaagagcactttacacagtgcaggaacaacaattgaagggccttgggatgatgtgatgggtttgattggcgaaatccatgaatacggtcatgagaaaggatatgttagagtacacactgatattcgtgttgggactagaactgataagcaccaaactgctcaagataagatcgatgttgttttaaaaaaaatttctcaatga

SEQ ID NO: 75460 - DNA, 2343 bp, Saccharomyces pastorianus
atggtagattttttaccaaaagtaacggaaataaatcctccatccgaaggtaatgatggtgaagataacataaagccactttcaagtggttcagagcagcggccgttgaaagaagaggggcaacaaggtggtagaagacaccaccggcggttgtcctctatgcatgagtattttgacccgttttccaacgcagaggtctattatggaccaataacagatccaagaaaacagtcaaaaattcatagactaaatagaaccagaactatgagtgttttcaataaagtttctgacttcaaaaacggaatgaaggattataccctgaaaaggaggggttctgaagacgacagcttcctcagcagccaaggtaaccgtagattttatattgataatgtggatctcgctttagatgagctgctcgctagtgaggacacagacaagaatcatcaaattaccatagaagacactgggcccaaagttattaaagtcgggacggccaattccaacggtttcaaacatgtaaatgttaggggaacatatatgctttctaacttgttgcaggaactaaccattgcaaaaagtttcggacgacaccaaatatttttggatgaggcgcgtataaatgaaaaccctgttgatagattatcaagattgataacgactcaattttggacgagtttaacgagaagagttgatctttataatattgcagaaattgctagagactcaaaaatagatacgccaggcgctaaaaatccaagaatttatgttccatataactgcccagagcagtacgaattttacattcaggcatctcaaatgaacccgtccttaaaacttgaagtggagtacttaccaaaagatattacagcagagtatgttaaatcattaaatgatacaccgggtttgttagccctggctatggaagaacacgttaatccatctactggtgaaaggtccctagttggttatccttatgcggtacctggcggtagattcaatgaattgtatggctgggattcatatttaatggcactgggactcatagaaagtaataaggttgatgttgcaagaggtatggtggagcattttatattcgaaattgatcactatagtaaaattttgaatgctaataggagttattatctttgcagatctcagccaccattcctaaccgatatggctctgctcgtatttgaaaagataggaggtaagaataatccaaacgctattcagtttttaaaacgcgcgttcagagctgctattaaagaatataaagaggtgtggatgtcgagccctaggttagattctctgacagggctgtcttgttatcatcctgatggtattggtatccctccggaaactgaaccagatcattttgatactatattattaccgtatgctgaaaagtacaatgttactttggaaaagcttaggtacctttataacgaaggcatgattaaagaacccaaactggatgcattttttttacatgatcgtgccgtgagagagtcaggacatgacacgacttataggtttgaaggtgtatgtgcatatttagcgacaattgatctaaactccttgctctataaatatgagaaagatattgctttcgtcattaaggagtattttggtaatgaatataaagatgagaatgatggaacggtaaccgattctgaacactgggagaagctagctgaactgaggaaaacaaggattaataagtatatgtgggacgaagattcagggtttttcttcgattataacacgaaactgaaatgcagaacgtcttatgagtctgcaacgactttttggagtttgtgggctggtcttgcaactgaagagcaagcaaaaatcacagtagaaaaagctcttcctcagctagaaatgctcggcggactagttgcatgcacagaaaaatcaagaggtcctatttctattgatagaccgatcaggcaatgggattatccttttggttgggcgccgcaccaaatattagcctggaaaggtttatctgcatatggttatcaacaagtagctacaagattggcttataggtggctgtacatgattacaaaatcatttgttgattataacggaatggtggtagaaaaatatgatgtgacaagagggactgatccgcatcgcgttgatgcggaatatggtaatcaaggtgctgattttaagggcgtcgctacagaaggctttggttgggtgaacacaagttatttgctcggattgaaatatatgaataatcatgcaagaagggctctcgctgcttgtagtccaccattgccatttttcaatagtttgaaaccctctgagaaaaaattgtattacctataa

SEQ ID NO: 75461 - DNA, 1422 bp, Saccharomyces pastorianus
atgtttcaaaggtctggcgctgctcatcacatcaaatcgatttcatctcgaagatgccgctttaaatcctcctttgcagttgctttaaacgctgccagtaagttggtaactcccaagattctttggaataatcccatatcattagtctcgaaggagatgaacacattggccaaaaatatagttgccctcatcgggtctggccatccggtgctaaacaaggttactagttactattttgaaacagaaggcaaaaaagtacgtcccttgttagtgttgttgttgtcaagagcactttctgaaattcccatgacagaaagaaatcacttgaaaattgacaagtcggatgttcctgaggacccaatttactctaaacctagtcaaaatcaactatttcaacgtcctgcaagtagcatatccccactacatattcttcacggtattaaaccactaaatcccttgacaaaaggtcctgagcctttgccagaagaaacttttgacaaacaaagagggattttacccaaacagagaagattagcagagattgtagagatgatacacactgcgtctttacttcatgatgacgttattgatcattctgatacaagaagaggaaggccaagcggaaatgctgcctttaccaacaagatggccgttttggcgggtgattttctcttaggaagagcaacagtgtcaatttcaagattacacaaccccgaagtcgtagaactaatgtctaatagtattgcgaatcttgtcgaaggtgagttcatgcaactgaaaaatacttccattgacgcggatatcgataccatcgaaaatggccataagctacttccggttccttctaaaaagcttgaagttaaagagcacgactttcgtgttccaagccgccaacaggggctgcaattatctcatgatcagattatagaaactgcatttgaatactacatacacaagacctatctgaagactgctgctttgatatcaaaatcttgcagatgtgctgctatattatctggggcatcacctgccgttatcgacgaatgctatgatttcggtagaaatctaggtatatgtttccaactcgtagatgatatgcttgattttactgtgtctggaaaagatttagggaagccatccggcgcggatctaaaattaggtattgctactgctccagtcttgtttgcatggaaagaagacccatctttaggtccactaatttcacgcaatttttcagagaggggtgatgttgaaaaaactattgattctgtgagactccataatggtatagcgaagacgaaaatactagcggaggaatatagggacaaggcattacaaaatctacgggattctcttcctgaatctgatgctcgttctgccctagagtttttaactaatagtatactaacaagaagaaagtaa

SEQ ID NO: 75462 - DNA, 642 bp, Saccharomyces pastorianus
atgggacttatttcatacgaaaatgaggcgataaacgaggtgaaaaaggcagataaccatcacgttagcaaatttgtgactagttactatgggccatcatcgtcgtcatggcagtcaggaagatggattttgtttgtgctgtttgttgccgcaataatccttataatactgttcacttttgtagcgaacagaaggagacgaaggatggggcgtgctcccattagaggtacggcatggttgacaccgccttcatacagacagtctcaacaacaatatactgggaccgttcagcaacggacagatgattatgttcctgagtatacagaaacagcgaacgaacatgatcttggatactatgaccagcggggcgagtttcaccccaacgataaggctgcatacgtggcccccccgccattggtacaagaatgttcatcagaatctgttaattctttagaaagacctcccgctgctgtagttcaccaagctaactctttagatacggattacggtttaacaaggcctagcaatgggcgcgttccagctgtaagtgatacggtggagcaattggaaaggcttccgggcgggactacaacgcaggaaattaacccaccggagagggcaaaggtaaatgcaaggtcatga

SEQ ID NO: 75463 - DNA, 2211 bp, Saccharomyces pastorianus
atgaatcaaaatataaaaaacacttcttgggctgatcgaataggaagcgacgatcaagaaagaaaagctaactcttcagaggtttcacaaagcccaccacccaataatagcttcgagtcatcaatggattcacaatttagctatgctcattcaaataaaagtagcatttcattcgaatctattcaaaccacggaaagacttcttgacaaattagacctcagcttggaagatgaactgattctgcaagaagctttattagaagaagaaaacgcgtcgagaaattcgcaactgtcacaaacaagtggtccaacattatgtatgcctgcgtcggaattcccttcattaaggtatagaactaatccctctccaacatatatacaagctagagatcgttctcttatcatagacaatttaaaagaaaaggattccactttgagaggcaaatactcttccggtaaagtggaaaggcatttgcccgtgaagtcgagatactcttatatcgtcgaagaagattatgactctgagacttttagttgcatgaaaccccaaatgaatagaaatgagaaagattataagtacccaaaccttgaaaatggcaatagaagcacaaatagccctaatcctttcaacttcgagaaatataggattgaaaatactagactgcaccatctttatcctacgctgatatcagacaataatattagcgttgacaataatgctaatagtaagaataacagaactactagtaataatattaatacatctacaaaaactgacagaatatccgagaagcagagttgccccaatgagttcacaaccacgcaaaagagtaattgtctttatcggaacggaagttcaacaagcaccaacacctccttttctgaagttggacaactatcaaagccgaaaactcagtcttcttttgaaagtgaatcatcctcattctccaaactcaagttaactaagagtgatacaacacccatcaaaccatctcctaaacggtctaattcctctacctcgacgataacgaaaacaaataccatgacaaatgatatttcattacctccaacgccaccatataaagctcataaaaaaaaaacgtcactaaattcgctaaaaaaactttttaaatctcctaggacaagagcaaaaaataagaaagaccttgagtctgaaggatcaagccctatccggtctgccagcaattcattggacttctctggggagaatattcaacttccatctacttcaagtaccattaataattccagtccacatttagctaggtatatttttcctccaaacccagttttccattttaaaacagcatcaacacctcagtcatccacggataaaaaaaagaacagtaaagcacgtccaaataggactcatttgagaactttctcggatttccatacaacggaaaaagattcaaaaataggtgaattaagtgcactaacagaacaatcaaataagccctaccacccgaaagttagaagaagaacactttctttagatggtatgttgcccaataattcgacgcaatgcatggattccttcagtcataaaaaagaaggatcgaacgcaacaagcaagtgcgggaagcttaaatttcacccagaaccttatgataatgatgaatcttcacacatcggacaggcaattactatgcgtcatcaaggcaaacttgaagaatctgcacaacgactgaaaaaagcctgcgcgtgcggaaacaaaactgcgtttctgttatatggactagccctgcgacatggctgcggagtggacaagaacttgaaattatcattaggatatttaatggctgccactgatatcaaatcctttgctgctgaggttcttgatttagatataaatccgttaaattttgcttcaatggacgatatccctgatatagcgcctgaaccaacagcacctgccttgtatgaatgtggtatggcatatttaaagggtcttgggatggatcatcccgacgagcgaaaaggtttgaaatttttggaaaaagctgctctattaggccatgtagactcaatgtgcttaagcgggacaatttggtccaaaacttcaaacgtaaagaaaaaggatctcgccagagctgctgcatggtttaggatagccgataaaaaaggtgcaaatctattaggttcagattggatttataaggaaaagtacatgaaacaaggtccgaaataa

SEQ ID NO: 75464 - DNA, 312 bp, Saccharomyces pastorianus
atgtccggtagaggtaaaggtggtaaaggcctaggtaaaggtggtgccaagcgtcacagaaagattctaagagataacatccaaggtattactaagccagctatcagaagattagctagaagaggtggtgtcaagcgtatttctggtttgatctacgaagaagtcagagctgtcttgaaatccttcttggaatccgtcatcagagactctgttacttacaccgaacacgccaagagaaagactgttacttctttggatgttgtttatgctttgaagagacaaggtagagccttatacggtttcggtggttaa

SEQ ID NO: 75465 - DNA, 411 bp, Saccharomyces pastorianus
atggccagaacaaagcaaacagcaagaaagtccactggtggtaaggccccaagaaagcaattagcttctaaggctgccagaaaatccgccccatctaccggtggtgttaagaagcctcacagatataagccaggtactgttgctttgagagaaatcagaagattccaaaaatctactgaactgttgatcagaaagttgcctttccaaagattggtcagagaaatcgctcaagatttcaagaccgacttgagatttcaatcttctgccatcggtgccttgcaagaatctgtcgaagcctacttagtctctttatttgaagataccaacttggctgccattcacgccaagcgtgtcactatccaaaagaaggatatcaagttggctagaagattaagaggtgaaagatcatag

SEQ ID NO: 75466 - DNA, 864 bp, Saccharomyces pastorianus
atgacctacactaccagacaaattggtgccaagaacaccttggaatacaaagtttatatcgagaaggatggtaagccagtttctgccttccacgacattcccttgtacgctgacaaggaaaacaacattttcaacatggttgttgaaattccacgttggaccaacgccaagttagaaatcaccaaggaagaaactttgaacccaatcatccaagacaccaagaagggcaagttgagatttgttagaaactgtttccctcaccatggttacattcacaactatggtgctttcccacaaacttgggaagacccaaacgtaagccacccagaaactaaggcagttggtgacaacgatccaattgatgtgttggaaattggtgaaactattgcttacactggtcaagtcaagcaagttaaggctctaggtatcatggctttattggatgaaggtgagaccgattggaaagttattgccattgatattaacgatccattagctccaaaattgaacgacattgaggatgttgagaaatacttcccaggtctgttgagggctactaacgaatggttcagaatttacaaaatcccagatggtaagccagaaaaccaatttgccttctccggtgaagctaagaacaagaagtacgctttggatatcatcaaggaaacacatgactcctggaaacaattaattgctggtaagtcttctgacagcaagggtattgatttgaccaatgttactttgcctgacaccccaacctactccaaggctgcctctgatgccatcccaccagcttctccaaaggcagatgctccaattgacaagtctattgacaagtggttcttcatctccggttctgtttaa

SEQ ID NO: 75467 - DNA, 612 bp, Saccharomyces pastorianus
atggctattgttataaacaaaagaaacgtgagagtcttggtaataactaatttactgctcattgttgtgttttttgtgttaaggaattcgaatgctagcgtcaacgaaagtattactactcaccatcctgattcattggtgacgtttgacaattcaggaaatgcacctggcactcaccaatctgtccatgatacagtaaatacacaagataaggaagccgaagaagttgataaaaatagtggggacgctgaatttgatgccgctgcagaatacaacaaaataatggaacagtcacccatgattgtatttagcaagactggctgcccatatagcaaaaaactgaaagctttgttgactaattcgtacacgttttctccatcttaccacgttgtagaattggataggcacgaacacacaaaagaactacaagaccagattgaaaaagtcactggtaggagaacagtcccaaacgttatcatcggtggtacttccagaggtggttatactgagatagcagagttacataaaaatgatgaacttctagattctttcaaaaaatggagcgatggggcgtttactgtaacagctaattcgcaatctgagagtgcctag

SEQ ID NO: 75468 - DNA, 1794 bp, Saccharomyces pastorianus
atgctgcttaccaaaaggttttcaaagctgttcaagctgacgttcatagttttgatattgtgcgggctgttcgtcattacaaacaaatacatggatgagaacacgtcagtcaaggagtacaaggagtacttagacagatatgtccagagttactccaataagtattcatcttcctcagacgccgccagcgctgacgattcaaccccattgagggacaatgatgaggcaggcaatgaaaagttgaaaagcttctacaacaacgttttcaactttctaatggttgattcgcccaaggggagtactgcaaagcagtataacgaggcatgcttattaaagggtgacattggagaccgtcccgaccactacaaagatctttacaagttgtctgctaaggagctgtccaagtgtttggaactatctccggatgaagtagcaagtctgaccaaaagccataaggactacgtagagcatatagcgactctcgtctcgccaaagggtacgtacaaagggtccggtatagccacagtgggtggcgggaagttctcccttatggcatttttgatcattaagactttaaggaatatggggaccacgttacctgtggaagtcctgatccctcctggtgatgaaggtgaaactgagttttgtaacaagattctgcctaagtataactccaagtgtatttacgtttcagatattctaccacgagagacgattgaaaaatttgttttcaaaggataccagtttaaatcattggcccttatcgcttctagttttgaaaacctgctcttactggatgctgacaacttccccatcaaacccctagacaacatattcaatgaagaaccatatgtgtctacgggcttggtcatgtggcccgatttctggaggcgtacaactcacccattgtattacgacattgcaggtattgctgtggacaagaaaaagagagttcgcaattctcgagacgatatcaccccacctgctgtttacacaaaggatttgaaggatttgagtgacgtcccgctaagtgacctagacggaacaatacccgacgtgtctacggaatccggccaactgatgataaacaaaacgaagcatttggctacggctcttctatctttattctacaacgtcaatggaccaacgtggtactacccaatattttctcaaaaagctgctggtgaaggtgataaggaaactttcattgccgctgcaaacttttatggtctatcattttaccaagttagaacaaggacaggcgttgaaggctaccatgatgaagacgggtttcatggtgtagcaatgttacaacacgactttgtgcaggattatggccgttacttaaatgctatggagagcattggcaacaaatacggtggcactaaatcagctgatgcaatcaagtttgacaaaaactattccctcgaaaaatacaccgaagaatttttcgacaacgaggacttaaatgccaagaatcatgtagatgttatgttcatccattcaaacttcccaaagtttgacccatacgatttatctaaaagcaattttttgactacgaatggtaaacctgctcgttcatatacggccttaaaaaaggtaaaaaattacgatattgaactagagaatttcaaggttttaaacgaatatgtttgtgttaataagaatcctttcaaatatctcgatgaccttttagggcaggataaaacggaatggaaaagagtgtgtggttacatcaccgatagattagcatttttagaatctactcatgataaggcgattgccggtaaataa

SEQ ID NO: 75469 - DNA, 387 bp, Saccharomyces pastorianus
atgtctgctaacgattactacggcggaaccgccggcgcgaagagccaatattcccgtccctccaacccgccaccttcatccgctcatcagaacaaaactcaggagcgtggatacccaccccaacaacagcagcagtactaccagcagcagcagcagcatcccggatactataaccaacaaggatacaatcagcaagggtacaatcagcaagggtacaatcagcagggctacaatcagcagggatataaccagcagggatacaaccaacaaggccatcaacaaccagtctacgtccaacaacaaccaccccagaggggtaacgaaggttgtctggctgcatgtctggctgcattatgtatatgctgcaccatggatatgctattctaa

SEQ ID NO: 75470 - DNA, 2748 bp, Saccharomyces pastorianus
atggcatcgacatggaagcccgccgaagactatgtgttgcaactagcaactcttttacagaactgtatgtcaccaaatccagagattcgtaataacgcaatggaagctatggagaacttccagctgcaacctgaattctcaatatttgtgttatatttaattgaaggcgaatctgatgatgtattgaagcaacactactccctacaggatcttcagaacaatagagctaccgccggtatgctgttgaaaaattcaatgctagggggaaacaatttaattaagagcaatagccacgacttaggatacgtcaaatcaaacattatacatggcctttataattcgaacaataatctcgtttcgaacgtgacaggtatcgttattactactttattttccacttactataggcagcatagagatgatccaactggtcttcaaatgctttaccagttgctagagctaacctcaaatggaaatgaaccaagtattaaggctttatctaagatcatggaagacagcgctcaatttttccaattggaatggtcgggaaatacgaagcctatggaagccttattggatagtttttttaggtttatttcgaatccaaatttctcacctgtgattcgctcagaatcggtgaaatgtataaatacagtgatcccgctacaaacacaaagttttattgtgagattagataaattcttagaaattatttttcagttggcacaaaacgacgaaaacgacctagttagggcacagatttgcattagttttagtttcttattggaattcagaccagataagctggtttcccatttagatggtattgtacaattcatgttgcatttgatcaccactgtaaatgaggaaaaagtggctattgaagcctgcgagtttttgcacgcctttgcaacgagcccaaatattcctgaacatatcttacaaccatatgttaaggatatcgtgccaatattattatcgaaaatggtctataacgaagaatccatcgttctcctggaagcttctaatgatgatgatgcattcttggaggataaagatgaggacatcaagcccattgcaccccgtattgtgaaaaagaaagaggcaggaaatggagaggatgcagatgacaacgaagatgatgatgatgatgatgaagatggcgatgttgatacgcaatggaatttgagaaaatgttccgcggcaacgctagatgtaatgacgaatattttacctcatcaagtgatggatatagcgttcccatttttaagagaacatttgggttctgataggtggtttattagagaagctactatattagcactgggggccatggcagaaggtggaatgaagtattttaatgatggcttaccagcactaataccatttttagtggaacaattgaacgataagtgggcaccagtgaggaaaatgacatgttggacattaagtagattttcaccatggatattacaagaccatactgagtttttaattccagtcttagaacctataataaacacattaatggacaagaaaaaggatgttcaagaggcggctattagtagtgtagcagtatttattgaaaacgccgactccgaattggttgaaactttattttatagtcaattattgacgagttttgataaatgtttgaaatattacaagaaaaagaatttaattatattatatgatgccatcggcaggttttctgaaaaatgtgcattagacgagacagcgatgcaaataattttgccgcccttaattgaaaaatgggctttgttgtcagacagtgacaaggagctgtggccacttttagaatgtctttcctgcgtggcatcatcactaggggaaagattcatgcctatggcaccagaagtgtacaacagagcctttagaattctatgtcattgtgtcgaattggaagccaaatcacatcaagacccgacaatagtagtgcctgagaaggacttcatcatcacctcattagatttgattgatggattggtacaaggtcttggcgctcactcgcaggatctattgttccctcaagggacgaaggatttaacgatattgaaaatcatgctagaatgtttgcaggaccctgtccatgaagtaagacaaagctgctttgccctgttgggagatattgtatattttttcaattcggaactggtaattggtaatttggaggatttcttgaagttgattggtacggaaataatgcataacgacgatagtgatggtactcctgctgtgataaatgcgatatgggcgcttggtttgataagtgaacgtatcgatttgaatacttatatcattgatatgtctagaatcattctagatttatttaccaccaacacacaaatcgtagacagctctgtgatggagaacttgtctgtgaccatcggaaaaatggggctaacacaccctgaagttttcagttctggcgcatttgccaatgattccaactggaataaatggtgtttgtccgttaacgcattggacgatgtagaggaaaagagtagcgcgtacatgggtttcctgaaaattatcaatttgaccagcacggaggtcacaatgagtaatgataccattcataaaattgttacgggcctttcaagcaatgtagaggcgaatgtttttgcgcaagagatctacacctttttgatgaaccattctgcccaaatttctgcaataaatttcacgcccgatgaaatctccttcttacaacagttcaccagctaa

SEQ ID NO: 75471 - DNA, 1587 bp, Saccharomyces pastorianus
atgactaaatctcattcagaagaagtgattgtacctgagttcaattctagcgcaaaggaattaccaagaccattggccgaaaagtgcccgagcataattaagaaatttataagcgcttatgatgctaaaccggattttgttgctagatcgcctggtagagtcaatctaattggtgaacatattgattattgtgacttctcggttttacctttagctattgattttgatatgctttgcgccgtcaaagttttgaacgagaaaaatccatccattaccttaataaatgctgatcccaaatttgctcaaaggaagttcgatttgccgttggacggttcttatgtcacaattgatccttctgtgtcggactggtctaattactttaaatgtggtctccatgttgctcactcttttctaaagaaacttgcaccggaaaggtttgccagtgctcctctggccgggctgcaagtcttctgtgagggtgatgtaccaactggcagtggattgtcttcttcggccgcattcatttgtgccgttgctttagctgttgttaaagcgaatatgggccctggttatcatatgtccaagcaaaatttaatgcgtattacggtcgttgcagaacattatgttggtgttaacaatggcggtatggatcaggctgcctctgtttgcggtgaggaagatcatgctctatacgttgagttcaaaccgcagttgaaggctactccgtttaaatttccgcaattaaaaaaccatgaaattagctttgttattgcgaacacccttgttgtatctaacaagtttgaaaccgccccaaccaactataatttaagagtggtagaagtcactacagctgcaaatgttttagctgccacgtacggtgttgttttaccttctggaaaagaaggatcgagcacgaataaaggtaatctaagagatttcatgaacgtttattatgccagatatcacaacatttccacaccctggaacggcgatattgaatccggcatcgaacggttaacaaagatgctagtactagttgaagagtctctcgccaataagaaacagggctttagtgttgacgatgtcgcacaatccttgaattgttctcgcgaagaattcacaagagactacttaacaacatctccagtgagatttcaagtcttaaagctatatcagagggctaagcatgtgtattctgaatctttaagagtcttgaaggctgtgaaattaatgactacagcgagctttactgccgacgaagactttttcaagcaatttggtgccttgatgaacgagtctcaagcttcttgcgataaactttacgaatgttcttgtccagagattgacaaaatttgttccattgctttgtcaaatggatcatatggttcccgtttgaccggagctggctggggtggttgtactgttcacttggttccagggggcccaaatggcaacatagaaaaggtaaaagaagcccttgccaatgagttctacaaggtcaagtaccctaagatcactgatgctgagctagaaaatgctatcatcgtctctaaaccagcattgggcagctgtctatatgaattataa

SEQ ID NO: 75472 - DNA, 1902 bp, Saccharomyces pastorianus
atgccagacaatctatcattacatttaagcggctcttcaaaaagattgaactctcgccaacttatggaatcttctaatgagacctttgcgccaaataatgtggatttggaaaaagagtataagtcatctcagagtaatataactaccgaagtttatgaggcatcgagctttgaagaaaaagtaagctcagaaaaacctcaatacagctcattctggaagaaaatctattatgaatatgtggtcgttgacaaatcaatcttgggtgtttctattctggattcatttatgtacaaccaggacttgaagcccgtcgaaaaagaaaggcgggtttggtcctggtacaattattgttacttctggcttgctgaatgtttcaatatcaacacttggcaaattgcagctacaggtctacaactgggtctaaattggtggcagtgttggataacaatttggattgggtacggtttcgttggtgcttttgttgttttggcctctagagttggatctgcttatcatttgtcattccctatatcatctagagcatcattcggtattttcttctctttatggcccgttattaacagagtcgtcatggccatcgtttggtatagtgtccaagcttatattgcggcaactcccgtatcattaatgctgaaatctatctttggaaaagatttacaagacaaaatcccagatcactttggatcaccgaatgctactacttacgagttcatgtgtttttttatcttttgggctgccagtcttccatttttactggttccacctcacaaaattagacacctgtttactgttaaagccgtcttggttccgtttgcttcttttggtttcttaatttgggctatcagaagagctcacgggcgtattgccttaggatctttaaccgatgtacaacctcatggctctgccttttcgtgggcttttctaagatcactaatgggttgtatggctaatttctccacaatggtaatcaacgctccagatttctctagattttcaaaaaaccctaactccgctttatggtcccaattagtgtgcattccatttttgttttccatcacttgtttaattggaattctagtcaccgcagctggttatgaaatatacggtattaattactggtcgccactcgatgtgctagaaaaatttttacagactacttataataagggcacaagagctggtgttttcttaatctcttttgttttcgccgtagctcagttaggtactaatatttctgcaaactcattatcgtgtggaactgatatgtccgctattttccccaagtttatcaatatcaagcgtggttcattattttgtgcagccatggcgctgtgtatttgtccatggaatttaatggcaacatcaagtaaatttacaatggctttgtccgcatatgctatctttttgtccagtattgccggtgttgtctgctcagattactttgttgttagaagaggatatatcaagctaacacacatatattcccatcaaaagggctctttttatatgtacggaaacaggtttggtatcaattggagagctttggctgcatatctatgtggggtggctccttgcttgcccggtttcatcgcggaggtgggcgctcccgctataaaggtttctgatggagctatgaaactatattacctaagttactgggtaggatatggcttgagtttttcttcttatactgctctgtgttacttcttccctgtacctgggtgccctgttaacaacattataaaggacaagggctggttccaaagatgggccaatgtcgatgattttgaagaagagtggaaagacacaattgagagggatgacctggtagatgacaatattagtgtctacgaacacgaacacgaaaagactttcatttaa

SEQ ID NO: 75473 - DNA, 534 bp, Saccharomyces pastorianus
atgtcgaacatcacttatgtcaaaggtaacatcttaaaaccaaagtcatatgctaggatcctcatccattcttgcaactgcaatggctcgtggggtggtgggatcgcttatcaacttgctttgcgctacccaaaagcagagaaagattacgttgaagtatgcgaaaagtatggttctaatttactaggcaaatgcatattacttcccagttacgaaaactcagatctgctgatttgttgcttgtttacatcatcatttggaggttcaagtcatggagaaaagcaaagtattttgaattatacaaaacttgctttggataaattgaagacctttagagaagcaaaagacaaaactcgaacaagtgaagattcaatcggtgactatttaaacggccacatcaaatacccaataggggaatataaattggaaatgccacagataaatagtggcatattcggagtcccttggaaagagacagaacgcgtgttagaagaatttagtggcgacatgagttttacagtatatcagctgtaa

SEQ ID NO: 75474 - DNA, 906 bp, Saccharomyces pastorianus
atgttgaatagttcaagaaaatatgcttgtcgttccctattcagacaagcgaacgtctcaataaaaggactcttttataatggaggcgcatatcgaagagggttttcaacgggatgttgtttgaggagtgataacaaggaaagcccaagtgcaagacaaccactagataggctacaactaggtgatgaaatcaatgaacccgagcctattagaaccaggttttttcaattttccagatggaaggccaccattgctctattgttgctaagtggtgggacgtatgcctatttatcaagaaaaagacgcttgctagaaactgaaaaggaagcagatgctaacagagcttacggttcagtagcacttggcggtcctttcaatttaacagattttaatggtaagcctttcactgaggagaatttgaagggtaagttttccattttatactttggattcagtcattgccccgacatttgtccagaagagcttgacagattaacgtattggatttctgaattagatgataaagaccatataaagatacagccattgtttatctcatgtgatcctgcaagagatacaccggatgtcttgaaagagtacttaagcgattttcacccagctatcattggtttaaccggtacgtacgaccaagtgaaaagcgtatgcaaaaaatacaaggtatatttttcaactccacgtgatgtcaagcccaaccaggattacttagtggaccattcgatatttttctatttgatcgaccctgaaggacagtttatcgatgcgttgggaagaaactacgatgagcaatctggtctcgaaaagattcgtgaacaaattcaggcgtatgtgccaaaggaagaacgggagcgtaggtcaaaaaaatggtactcttttatcttcaattga

SEQ ID NO: 75475 - DNA, 1185 bp, Saccharomyces pastorianus
atgcctccaaagaagcaagtcgaagaaaaaaaggtcttattgggtcgtccaggtaataacttgaaagccggtattgtcggtttggccaatgttggtaagtctacctttttccaagccatcactagatgtccattgggtaacccagctaactatccattcgctaccattgatccagaagaagcccgtgttattgtcccatctccaagatttgataagttgtgtgaaatctacaagaagacagcttcggaagttccagctcatttgaccgtttacgatattgctggtttgactaagggtgcctctgctggtgaaggtttgggtaatgctttcttgtctcacatcagatcagtcgattctatctaccaagtcgttcgttgtttcgatgatgctgaaattatccacgttgagggtgacgttgatccagttcgtgatttagaaattattaaccaagaactaagattgaaagatattgaattcgcacaaaaggctttggaaggtgctgaaaagattgccaaaagaggtggtcaatctttggaagtcaaacaaaagaaggaagaaatggatttgattacgaaaatcattaaattgctagagagtggtcaaagagttgctaatcactcctggacttcaaaagaagttgaaattatcaactccatgttcttgttgactgctaagccatgtatctatttgattaatttatctgaaagagattacatcagaaagaaaaacaagcatctgctaagaatcaaggaatgggtagacaagtactctccaggtgacttgatcattccattcagtgtttctctagaagaaagactatctcatatgtccccagaagatgctgaagaagaattgaagaaactgcagacaatatctgccttgccaaagattatcactaccatgagacaaaagttagatttgatttcctttttcacctgcggtccagatgaagttcgtgaatggaccatcagaagaggtactaaagctccacaagctgctggtgttattcataacgatttaatgaatacctttattttggctcaagttatgaaatgtgaagatgtcttcgaatataaggacgattctgccatcaaggccgctggtaagttgatgcaaaagggtaaagactatgtcgttgaagacggtgatatcatttacttcagagctggtgctggtaagaattga

SEQ ID NO: 75476 - DNA, 1143 bp, Saccharomyces pastorianus
atgcttcccacattcaaacgttacatgtcgtcctcagctcatcagattcccaagcacttcaaatcgctcatctattcaactcatgaagttgaggattgtaccaaggttttgtcagtgaaaaattatacgcctaaacaagacttatctcaatcaattgtgttaaaaactttggcctttcccataaacccttcggatatcaatcagttgcaaggagtatacccgtctcgtccagaaaagacatacgattactccacagatgagccagccgctatcgccggtaatgagggtgtctttgaagttgtttctttaccttcgggaagttccaagggagatttgaaattgggtgaccgagttatcccattgcaggcaaatcaagggacttggtccaattatagagttttctctagtagttctgatttaatcaaggtaaatgatttggatctgttttctgcggcaactgtatctgttaatggttgtaccggtttccaattagtatcagactatatcgactggaacagtaacggtaatgaatggattatccaaaatgccggtacatctagtgtatcaaaaatagttacgcaagtagcaaaagctaaagggatcaaaacattaagtgttatacgtgaccgtgataattttgatgaggtagcaaaagttttggaggataagtatggtgctacgaaggttatttccgaatcgcaaaacaacgacaagacttttgccaaagaagtattgtccaagattttgggtgaaaatgcaagggtgaggcttgccttgaattctgttggaggtaaatccagtgcatcaatagcacgtaagttggaaaataatgctttgatgctcacttatggaggaatgtcaaaacaacctgtaactttaccaacatctctacacattttcaaaggcttgacatccaaagggtactgggtgactgaaaagaacaaaaaaaacccccaaagcaagattgacaccatcagtgattttatcaaaatgtataattatggtcacattatttcaccaagagatgaaattgaaactcttacctggaatactaacactactactgacgaacagttactagaactagtcaaaaaaggtataactgggaaggggaagaaaaaaatggttgttttagaatggtaa

SEQ ID NO: 75477 - DNA, 1578 bp, Saccharomyces pastorianus
atgattttctcactagatgaagaacttcatcgtgtgtcactagatgataaaaagaatgacattaaagtagattattcctcggcaatatacgatgatatcaatcatgaacaaggcagctccatcacatatgaggagagtataaatcacctctcggttcattcaaatgcgattccgctaaatggcatgagtcctccacataggatgagaagaaggtcctcagcttattccaaattccctattctcactccaccaaatacgagaagattttctattacaggttcggacgcaatgccaactaatacgaatagactatccataacacctcaggacattatttcctctaatattggagaaaatgaattatcaaggaacctgcacgattttaagcccgtgagagtcctaggccaaggtgcctacggtaaagttcttcttgttaaggacgtcaatacatccaagctgtatgctatgaagcaattacggaaagcagaaattttaatttctcaaacagccacagattccaagagagaagacgaagataaaaatgatggtaataacaacgataatgacgatggattatcaaagaggcttgagagaacatttgccgaacggtctattctatctgaaatagaacatccaaacattgtcaagttattttattcttttcacgataactcaaagttatatttactgctacaatatatccctggcggtgaactattttaccacttgaaggaacacgggaccctagatgagacgacagtttcgttttacgcggcagaaatcagctgtgccttgagatttttgcatacgaaaggtgttgtctatagagatttaaaacctgaaaactgtttattgaatcaacgtggacatttagtattgacagattttggtctgagtaataaaagtgctaatgattccgcggttgatgaggaggatccagagtacgtcaatgccctatactcgattatcggtacgcctgaatactgtgcgcctgaaatattattaggtaaagcttacagtcagaattgtgattggtattctttgggatgtctgttgtatgacatgttagtaggtaagcctccatatactggtagcaatcataaggtgatcattaataagattcaacaaaacaagcaaggccccaaaattccattttatctgagcgagggaatgaaagatatattaaacgcgctgttgaagaaggaaactgccaaaaggtggaatgttgacaaatactgggccaaaaccggggctaataataagcctactaagtctaagaagaagaaatcaggggctgcaagaactagtcttttcactgaacattttatctttagaaaaatagactggaagttattagaatctggacaattgcaaaaaaccactctaggcccaattgttccagttattacggatttggaactagcggaaaattttgacacagaatttacttctatgtcatatgaggaaacctatacggatagcaagccgattaatatcaattcggtgagcaagtccccggatatgttcaagggatttagttataaagcaagtggtagctatttggagaagtacttttga

SEQ ID NO: 75478 - DNA, 1374 bp, Saccharomyces pastorianus
atgtctgacaaccctgagatgaaaccacatggtacgagcaaggagattgtggagtcggttactgacgccacctcaaaggcgattgataaattgcaagaagaactccacaaggacgccagcgaatccgtcacgccggtgaccaaggaaagcactgctgctacaaaggaaagcaggaaatacaactttttcattagaacagtttggacgtttgttatgatcagtggtttcttcatcaccttagcatcgggtcatgcatggtgtatagtgctgattttgggctgccaaattgctacttttaaagagtgtattgccgtaacaagtgcatctggtcgcgaaaagaatttgccattgacaaagacgttgaactggtaccttctcttcaccactatctattacttagatgggaaatcactcttcaagtttttccaagctactttttacgagtatcctgtattgaactttatcgtaacaaatcataagtttatctgctattgtctctatcttatgggatttgttttgttcgtttgtagtttaagaaagggatttttgaaattccagttcggatcattgtgcgttactcatatggttcttcttctggtagtatttcaggctcatttgatcatcaaaaacgtgctcaatgggctattctggttcttattaccatgcgggttggtaattgttaatgatatcttcgcctacctgtgcggcattacattcggtaagactaaactaatagaaatctcgcccaagaaaactttagaaggtttccttggtgcctggtttttcactgctctagctagtattatattaacaaggattctgagcccttatacttacttgacgtgccctgttgaagatctccataccaattttttctctagtttgacatgtgaactaaacccagttttccttccacaagtttacagacttccacccatctttttcgataaagttcaaatcaattcaattacagtaaaaccaatttatttccatgctttaaacttagctacctttgcatcattatttgcgccatttggaggctttttcgcatctggtctaaagagaacttttaaagttaaagactttggccactccatcccaggccatggtggtatcacagacagggttgattgccaattcataatgggttcttttgccaatttgtactatgaaacattcatcagcgaacacagaataacagtagatacagttttatccactattttaatgaacctgaacgacaagcagattatagaattgattgatatcttgattagattcctatctaaaaaaggtataatatcagcgaagaattttgaaaagttggctgacatctttaatgtgaccaagaaatcattgaccaatcactcttga

SEQ ID NO: 75479 - DNA, 1683 bp, Saccharomyces pastorianus
atgtccgtaacttttaaggacgatgttcatcggattctgaagtttgttgctaattgcaatggcaggtttgaagattccaaatgtgatataagagaatcgcctctcggtggattgggtgtctttgcaaagactgatattgcagaaggtgagtcaatattgacgttgaacaaatcctcgattttttctgcatctaacagctccattgccaatttgttatgtgacagtagcatcgatggaatgttagctctaaacatcgcattcatttacgaaactacagttttcagaaattctagtcattggtacccatttctgcgaactatccgaattcatgatgacgaagggcacttaaacctgccgccaagcttttggcatgcggatgctaagcgacttttaaaaggaaccagtttcgataccttattcgattcgttgacaccagaagaagaaatcatggaaggatttgaaattgctgtggatttggcacacaaatggaacgacgagtttgggttggaaattccaaaaggcttcctagacgttagtgaggagaatcatgaagaagattacaatttgaaattagaaaagtttatatcggtggcatatactttatcatcaagaggatttgaaattgacgcgtaccatgagacagctttggtgcccatcgcagacctgttcaatcaccatgtttccgacccggatttaaagtttgtatcgctatatgatgtgtgcgataaatgtggtgaaccaggcatgtgtaaacatctcatagcagaggaatacttggaagcagaaaatctagacaaaaatatgcccaaagtcgcaagtatggagactcgtgtcatcgatgaagacttaatcaaaagtttagaaaatgatttagagaaagaacactctaatgttacggcaaacaccgaggatgatgatggcggtattgaaaaccctgacgaatgtgtcgatttagtgttaaagaatgacgtcgcacaaggccaagaaatatttaattcctatggtgagctctcaaacgtctttttgttggccagatatggtttcaccgtacctgagaatcagtatgatattgttcatttaggacctgattttatgaagatcttaaagaaagaagaaaaatatcaagaaaaagtcaagtggtggagccaagtcggtcatggcttgttttcagcatggtatgctcaaatgcgccaagaagatgaagaagacgaagacggtcaagcaaaatcagataatctgtctgacgatatagagagcgaagaggaagaggaagaggaagaggaagaggaagaggaagaggaagagggtgatgatagcttggaatcatggctttcccagctttacatagactcaagtggcgagccttcaccctcaacgtgggccttagctaaccttttgactttaacggccgttcaatgggaatcattgttttccaaaaaggccactcctcacatcagtgattctatagttaacgaagaaaagctgcccttcctggccaaaaaagacaatccccattccaagaaactgctttccaaattacttaaggaaaagcaactaccttgcataaaaggcgacaactcgtcaaagataacaagtgctactaaaagcatgctccaaaatgctcggacacttgtacaatcggagcataatatcttagatagatgtctcaagagactatcctaa

SEQ ID NO: 75480 - DNA, 303 bp, Saccharomyces pastorianus
atggtaatcatacgtatcacattgagcaacttactgagggagaaaggagacctgtgcctggaactacttcgtgtagacaaaggaatatacccctttgatacttctcaaccaattggtagtatgcaggtgctgctcccccacgctagtaattaccccggttccgctcaattttatctttttgacgcggctacgaaactcggtttcgagcagtccgttaacttaaactacagtgaaaatcattggttaaacaacactccatgccagtatctgtatgtgtttttgcaacaagcacgactggagtaa

SEQ ID NO: 75481 - DNA, 687 bp, Saccharomyces pastorianus
atgactaaacaagctgaggagacccaaaagccaatcatatttgctcctgagacgtatcaatatgataaatttactttgaatgaaaaacaacttactgacgacccaatcgatcttttcaccaaatggttcaacgaagccaaggaagacccaagggaaacgttgccagaagcaattactttttcatccgcggaactgcctagtgggagggtgtcgtccagaattcttctttttaaggagctcgaccatagaggttttactatttattctaactggggaacctctagaaaggctcatgatattgctaccaacccgaatgcggcaatcgtattcttttggaaggatctgcaaaggcaggtgagagttgaaggtatcacagagcatgttaacagagaaacttctgaaagatactttaagacgagacctcgtggatccaagatcggtgcatgggcttcccgccaatcggatgttatcaagaacagagaagaactagacgagctgacccaaaaaaacaccgaacgtttcaaggatgctgaagacatcccatgtccagattattggggtggcttgagaatcgttccactggaaattgagttctggcaaggtagaccctcgagattgcatgatagattcgtttacagaagaaaaacagaaaacgatccatggaaagtcgttagactagccccatga

SEQ ID NO: 75482 - DNA, 1233 bp, Saccharomyces pastorianus
atgtctaccacactactttggttttcaagtgtaataggctacgtgattcaaacaaaatgtttgtctaacatacaatctaaaaaggaaatctccgtggggcccaatggtacaattgcaacgcctgaaactaacggcgacaacggaaactcaagttcattaaccttctatctgacctttatgtattttgcttcgtggctgctcttggtgcctgcatctcgactttggaagaagatgagaccgatgtttgtctctgactcagactcgaacaggaattctcagttcgacaacaacaacagcgggtctgtgacaaacgaagatgtcgatacgttctcgcacgtgttggatgatcctcaaccacggattccagcccaacagcagaagcaaaaaatcatatccgtggctatcttcaaatatgtggctaagctaacagtgctggctctcataatgattgtcgctgatttgacttataacctggctttgtcattgtcaccagcatttgatgttgctttgatgcaaaatactgccattttcgaaattgtcactttactatatggtgtttgtggaatctccaggaagaactacgttttccgtaatttcctcatcatgatgaacgcggtcattggaattttgatcatctcatacacgaaggctacctgtgacatgcttgccggaaagctgtccgtcaaccctaacacgggtgaactttctgatccattcttgtttgataggttgaaaggtgctctgatttgcggccttggtgctttgattatgggtccttttgccgtgttatggaaccgttggttttgcagtaacatttccaagaacgaaaattctgctgtagtcttggttaagcagagcacccacatggccctaatcggtattattggcatggtaatacttttgccatttattcctaaatttccctcccgtgagtctgtggaatccatttcgttgttctataatgacaagagcttttggttctctctactaggctcgattatctttggttccttgccgagcttgatttcgatattagagttgaatcgcaaggcccctgctgagtatttgacgacgtgcaacctgggagctattatctttatggggttagctgagtgggtttgcgaacctacgcaaaccacaattgtgagatgggaagtcataggatacataatgctaacggtaagtttgttggtcctatcagtaacactcggggaaggtaaataccaccattag

SEQ ID NO: 75483 - DNA, 888 bp, Saccharomyces pastorianus
atgctgaagttgtcaagaagtgccaatctaagattggtccaattgccagccgcaagattaagtggcaatggcgctaaattgctcacgcaaaggggattctttactgtaacgcgcttatggcagtcaaatggcaagaaaccattaagcagagtacctgtgggcggtactcccattaaggataacgggaaagtgcgagaaggctcgatcgagttttccacgggaaaggccattgctctattcctagcagtcggtggggcactttcttatttcttcaacagggagaaacgcagattggaaacacagaaggaggctgaagcaaacagaggatacggtaaaccttcacttgggggacccttccatctggaggatatgtatggcaatgagtttacggagaaaaaccttctcggtaagttttctataatatactttgggtttagtaactgtcctgacatctgtcctgatgaactggataagctaggtgtatggcttaatacactctcttcaaagtatggtattactctgcagccattatttataacttgtgatccagcaagagactcccctgctgtattgaaagagtatttgagcgactttcatccctccatcctgggtttgacggggacgttcgatgaggtgaagaacgcatgcaagaagtacagagtatacttttctacgcctccaaacgtcaaaccgggccaagattatttggtagaccattccatcttcttttatctcatggaccctgagggacagtttgttgatgctttgggtagaaattatgatgaaaaaacgggcgtggacaagatcatggaacacgttaagagttatgtgcctgcagagcagcgcgccaagcagaaggaggcatggtactccttcttatttaaataa

SEQ ID NO: 75484 - DNA, 2892 bp, Saccharomyces pastorianus
  modified_base (822)..(853): a, c, g, t, unknown, or other
atgacgagaaacccgtttatggtggaaccttcgaatggctctcctaatagacgtggtgcttcaaacctctccaaattttacgcaaacgctaacagcaactctcggtgggctaatcccagtgaggagagtttagaggatagctatgaccaatctaacgttttccaaggccttccggcatctccttcgagagctgcactaagatactccccagaccgtcgccatagaactcaattttaccgcgatagtgcccataactctccagttgctccaaacaggtatgctgctaatctacaagagtctcccaaaagagcaggcgaggctgtcatacatctaagtgaggggagtaacctttacccccgcgataatgcagatctaccggtagacccctaccatctatcaccccagcaacagcccagtaacaatctgtttggaagtggcagattgtattctcaaagctcgaaatacacgatgtctactacttccacaacggctccctctctggcagaagcagacgatgaaaaggaaaaatacctcacttcgactacttcctatgatgatcagtctacaattttctctgcagacactttcaatgaaacaaaatttgaactgaaccatccaacaagacagcagtatgtaagacgtgccaattctgagagtaagagaagaatggtctcagacttgcctcccccaagcaagaaaaaggcactattgaaactagacaacccgataccaaaaggtctgttggatactttgcctcgtaggaactcccctgagtttacggaaatgaggtatacagcctgcactgtggaacctgacgatttnnnnnnnnnnnnnnnnnnnnnnnnnnnnnnnnagatgaacagagaatgtcaaattgccatttgtattaccatgtacaatgaagataaatattcattggcaagaaccatccactccattatgaagaatgttgctcatctttgtaagcgtgaaaaatctcatgtttggggccccaatggctggaagaaagtctctgtaattctgattagtgacggtagagcaaaagtcaaccaagggtctctcgactatttagctgctttgggtgtttatcaagaagacatggccaaggcgtctgtgaatggtgatccggtaaaagcgcacatttttgaattgacaactcaggtctctatcaacgccgatctggattatgtttcaaaggacattgttcctgtgcaattggttttttgtctaaaagaagaaaataagaaaaagatcaactcccatcgttggctattcaacgcgttttgtcccgttttgcaacctactgtagttactttggttgatgtcggtacacgtttaaacaatacagcaatttacaggttatggaaggtttttgatatggattcgaatgtggctggtgcggctggtcagattaaaactatgaaggggaagtgggggctgaaacttttcaatccattagttgcatcgcaaaattttgaatataaaatctcgaatattttagataaaccattagaaagtgtttttggttacatctctgttcttcctggtgctctgtccgcatataggtatagagccttaaaaaatcatgaagatggcactggccctctcagatcgtatttccttggtgaaactcaagaaggtagagaccatgatgttttcactgcaaatatgtacttggctgaagatagaattctttgttgggaattggtcgccaagcgagatgcaaaatgggttctaaaatatgttaaggaagccactggtgaaacggatgttcctgaagacgtttctgaatttatttctcaaagaagacgttggttaaatggtgcaatgtttgccgcaatttatgctcaattacattcctaccaaatttggaaaactaaacattctgttgtacgcaagttctttcttcatgttgaattcctttatcaatttattcaaatgcttttttcctggttttctattgcaaattttgttcttaccttttattatttagcaggatcaatgaatttagttattaaacatggtgaggccttattcattttctttaaatacctgatcttttgtgacttggcaagtttattcattatttccatgggtaatagaccccagggtgcgaaacatttattcattacctccatggttatactgtctatatgtgccacatattctctaatttgtgggtttgtttttgctttcaagtcgttagcttctggaacggaatcccacaaaatatttgtcgacatcgttatctcattgctctccacctatggcctatactttttctcatcactgatgtacctggatccttggcacatgtttacatcatccatacaatactttttgacacttcccgcctttacatgtactttacagatttttgccttctgtaatacacacgacgtttcctggggtactaaaggttccacacaggaatccaagcaattgtccaaggccattgtcgttcaaggtccagatgggaaacagattgtggaaacagattggcctcaggaagttgataagaagtttttggaaataaaaagtcgtttgaaagaaccagaatttgaagaatcaagcggcaatgaaaaacaatccaaaaatgattattatagagatataagaaccagaattgtgatgatttggatgctatcaaatctaatactgatcatgtctataattcaagtctttacaccacaagatactgacaatggttatttgatattcattttatggtctgtggccgctttagctgcctttagggtggttggttccatggcctttttgttcatgaaatacttgcgtataatagtgagttacagaaataaagttgaaggtagcggctcatgggaagtctctaaattagacttaccaaatgttttctacaaaaagggctaa

SEQ ID NO: 75485 - DNA, 936 bp, Saccharomyces pastorianus
atgttgtcaagaattgtatcaaacaatgcaacacgctccgtaatgtgccaccaagcgcaagtgggtattctttataagaccaacccagtgagaacttatgctactttgaaagaagtggaaatgtgtttgaaatctatcaaaaatattgagaagatcacaaaaactatgaagattgttgcatctacaagattgagtaaagctgaaaaggctaaaatttccgcaaagaagatggatgaagcagagcagttgttttacaagaacgccgaaaccaaaaatttggatgttgaggctactgaaacaggtgctcctaaagagttgattgttgctatcacctctgataaggggttgtgtggttctatccactctcaattggctaaagctgtgagaagacatttgaatgatcaaccaaacgctgatatagtcactattggtgataagattaaaatgcagctattgagaacccatcctaacaacattaaattgtctattaatggaattggtaaagatgccccaactttccaagaatctgctttgattgccgataagttattgagtgtcatgaaggccggcacttacccaaaggtttccattttctacaatgacccggtgtcttccctatcttttgaaccatctgaaaaaccgatctttaacgccaagaccattgaacaatccccatcattcggcaaatttgagatcgacacggacgcaaacgttccaagagatttgtttgaatatactttggctaaccaaatgttgacagcaatggctcaaggttatgctgctgaaatttccgccagaagaaacgctatggataacgcttccaagaatgccggtgatatgatcaatcgttactctatcttgtacaacagaacaagacaagctgtcattactaatgaactggttgatattattactggtgcttcctctttgggatga

SEQ ID NO: 75486 - DNA, 1194 bp, Saccharomyces pastorianus
atgctgcatcaaaaaatagctcataaagttcgaaaggtcgtcgtcccaggtatttctttattgattttcttccagggatgccttattcttttgtttctccaactcacctataagactctttactgtagaaatgatataaggaaacaaattggtctcaataaaacgaaaagattatttattgtcttggtatcatccattttgcatgttgtcgcaccatctgcagtgagaattaccactgaaaattccagtgttcctaaaggtactttttttttagacttgaagaagaaaaggattctttctcatctaaagtccaattcggtggccatttgcaatcaccaaatatacacggattggatatttttatggtggttggcttacacatcgaacttaggggctaatgtcttcattattttaaaaaaatcgttggcttccattcctatcctcggtttcggtatgagaaactataatttcatttttatgagtagaaagtgggcacaagacaaaataaccctaagcaacagccttgctggccttgattcgaatgcaaggggcgccggctcacttgctggaaagtcacctgagcgcataactgaggaaggagagagcatatggaatccggaggttattgatccaaaacaaatccattggccatacaatcttatcctattccctgaaggtacaaatctcagtgctgatactaggcaaaaaagtgctaaatacgctgccaaaataggcaaaaagccattcaagaatgtgctgctgcctcattctacgggcctgagatactcgttacaaaagttgaagccaagtattgaaagtctatatgatattacgatcggctactccggtgtaaaacaggaggaatatggtgagcttatatatgggctgaagagcatatttttagaaggaaaatacccgaagttagtcgatattcacatcagagcatttgatgtcaaagatattcccttagaggacgaaaatgaattttcagaatggctgtataaaatttggagtgagaaggatgctttaatggaaaggtactattccactggatcattcgtaagtgatcccgaaacaaaccattcagttaccgatagtttcaagatcgatcgtattgagttaactgaagtgctaatattaccaactctaacaataatttggttagtttataaactttattgttttattttttaa

SEQ ID NO: 75487 - DNA, 1005 bp, Saccharomyces pastorianus
atgaaatgtactataccagaacagcaaaaagtcattttgattgatgaaattggtggatacgatgttatcaagtatgaggattatcctgtaccatcgatttcggaggaagagttactaatcaaaaataagtacacgggtgttaattacatcgaaagttacttccggaagggtatttatccctgtgaaaaaccatacgtattgggcagggaagcgtcggggaccgttgtagcaaaaggtaaaggggtaactaattttgaaattggagaccaagttgcttatatatctaactcaacttttgcacagtattcaaaaatttcgtcccaaggcccagtcatgaagctgccaaagggaacgagtgacgaagagttgaaactttatgcggctggtttattacaagttctcactgctttatcatttacaaacgaagcgtatcacgtcaaaaagggcgactatgtattactttttgccgcagcgggtggtgtgggattgattttaaatcagctactcaagatgaaaggtgcacatacgattgcagttgcctcaactgatgaaaagcttaaaatagcgaaggaatacggcgccgaatacttgatcaacgcttcgaaagaggatattttaagacaagttttaaaattcactaatggtaagggcgttgatgctagttttgactcggtcggaaaggatacctttgaaatcagcttagccgcactaaaaagaaaaggtgtattcgtttcctttggtaatgcatctggtcttatcccgccattctctattaccagactttccccaaaaaatattactttggtgagacctcaactttacggctatatcgccgatcctgaagaatggaaatattactctgacgagttttttggtctggttaattcaaagaagttgaacatcaaaatatacaaaacttatccattacgggattatagaactgcagctgctgacatagaaagtagaaaaactgttggtaagctagttcttgaaataccacaatag

SEQ ID NO: 75488 - DNA, 528 bp, Saccharomyces pastorianus
atgcttatcaaccacttgagtaagatccgaaccgtaaggcacttttctaatattaaacccgttttatccaaggaagtttcgcgacgagtaattgttgcacctgcatcacacttcaaaacctccagtccaaatgtgaaaagtaacatccctattcatgaatataaacaactaccggaagattctaactacattgaaaagcattataaggaactacaagtatttttgaatgagtttttgattaagaaattaaacaagacctatgcggattttgaaggagatccggacgagttggtatttcaattggaaaaattcattgaactagaagttactccgagatacacaaatcattcagcacctgatggttgtgaagagagattcaaatccatcggagacaggatagtcgttgaccgctatttagattttgtgaaagatgtcagactaacactgctgctaaatggaggacactccttcatatttgatgtcatgctacaagccaaagaagtatttgacaaaatgcagaaagaatga

SEQ ID NO: 75489 - DNA, 351 bp, Saccharomyces pastorianus
atgcacattcttttcttgtttattttccactgtttggcattcaaagacttgattttttttaagcaatacgtaccatttgcagcggcgggaggatatcccatatcgtttctattcatcaaagttctgaccgcctcaacgaatttactactttcttcttcctctggagggtcctggaataagttatccaaagagtcgcaattactcaaagtcattctcacacactttcttgttcctattttttttttcttattccaatatattattttatcagaagacagacagcaagaacgacagcctaagtttcgagacaacgctaaatttgacggacatgcgaagacatgccatatataa

SEQ ID NO: 75490 - DNA, 633 bp, Saccharomyces pastorianus
atgccgaaagtcgctattttgatttactcagtggacgatataattgccacattagcagaaaatgaaaaaaaaggtatagagatagctggtggtgaggctgagattttccaagtgccagacgtcagctataaaactgaatatgcgacagaagaaggaaaagaggcagccaaagtcgccaaaactaatgcagatttttcctataaaatcctaacaagagaaacgttggttgagtacgattactacttattcggaatacctactaagtttggcaacttccccgcggagtggaaaagcttttgggactcgaatactggtgggctttgggcaaagggttctctccatggcaaaattgccggtttgtttgtttcaggcgcaataagcggcaagggtgatacagaaatgtgtatcatgaacgcaatgagtactctggtccatcatggtgtcatttatgtcccattggggtataagaacgcatacaaggaattgaccgacgttgaagatgtgaacgggtcttgcgcctggggcgcaggatgtgtttctggaatcgacggtggcagacctcccagtttatccgagctaagagttcaccaacttcaagggaaggccttttacgaccgtatcaaagatttgtaa

SEQ ID NO: 75491 - DNA, 1077 bp, Saccharomyces pastorianus
atgagtagtgttggcgatttcgaagaaattattttgcatgatttaaaaccttattatcacgttcccggtgccatacatagtgaaggaataaccttcgttaaggaaaccggtacactgttgtgggttgatatttttaaaggagaggttcataaagtcgaagacatagaacagcctgaatccagtcattcttttttttccattagtagagccaattatggcaagaatgcgtcaattgagtaccctcccaatccagatgaattaaaagaacccgtgggctgtatatttccaatacttgatggggcttcacaaaatgaaatcaaacaagtattatttggtagtaaatttggcataggaaaattggattttagcaaaagtgaatgggaatatgtcattttgtattccgaatgtcctgaattgagtacagacagagcatataagttgagatctaatgatgggaacgtttcgccagatggaaaatatatttatgtggggctaatgagcgattttccgtttgatttggaacctattgggtgtttgcttcgtgttgacctattagctcacaagatagagcttgtttggaattgcttgttaattcctaacgcgatccactgggatgaaagtgatcaaaagacgatgtacgtgactgattctttaaacttcattatttggaaatgtcctggtggcgacttgctaaaacgtgacgagttaattgacgtgaagaactccaacaatcaatcttttgagtctcctgaaccagatggaagtgcaatttggtttagcaaagacggaaaacattctgggtttctgtttatcactgtctggtccaccagtaaggttcaaatgttcgacctaactaacggaaaattgctgaaggagttcattttgccggagcagacaccaagagtttcatgttgttgttttgttggtaaagatctcttcgtgaccactgccaatgcagaaatcaacgatgctgtaagaaccaatactgacaagaatggtggctgcatctacagaattccaaacgtgctagacggaaatgttcctctggaatctacaaagcgacaacctctccactag

SEQ ID NO: 75492 - DNA, 1026 bp, Saccharomyces pastorianus
atgtctgattatgttgaactattgaaaaggggtggtaacgaagccatcaaaattaatccaccaaccggtgctgatttccacattacatctcgtggttcagactggcttttcaccgttttttgtattaacctactattcggtgtgatattagtcccactaatgtttagaaaaccagttaaggacagattcgtatattatacggccattgctccaaatttgttcatgtcaattgcttatttcaccatggcttctaacttgggttggatcccagtcagagcaaagtacaaccatgtacaaacttctactcaaaaggagcacccaggttacagacaaattttttacgctagatacgttggctggtttttggctttcccatggccaatcattcaaatgtctctacttggtggtactccattatggcaaattgctttcaatgttggtatgactgaaatatttactgtctgctggttgattgctgcctgtgtccactctacttacaaatggggttactacaccattggtattggtgctgccattgttgtttgtattagtttgatgacaactacattcaacctggtcaaggccagaggtaaggatgtctctaacgttttcgttactttcatgagtgtcatcatgtttttgtggctgattgcttacccaacctgttttggtatcacagatggtggtaacgttttgcaaccagattctgctaccattttctatggtattattgatttattgatcttatctatcttgccagttcttttcatgccattggctaactatttggggattgaaagattaggtttaatcttcgacgaagaacccgctgaacatgttggtccagttgctgaaaagaagatgccatccccagcttctttcaagtcatctgattctgactctagtaccaaggagaagttaaagctaaagaagaagcacaagaaggacaagaagaaggctaagaaggctaagaaggccaagaaggcccaagaagaggaggaggatgtagccaccgactctgagtaa

SEQ ID NO: 75493 - DNA, 2700 bp, Saccharomyces pastorianus
atggagaggccatcttttttggatcaagaaccacctgcaggttacgtaccaggtattggtcgtggagccactggattttcaacaaaagaaaagcaagtggttagtaatgatgacaaaggaagaagaataccgaaaaggtaccgtgaaaatttgaacaaccatcttcaaagccaaccgaaagatgatgaagatgatgaagctgcaaatgtattcaaaacgcttgaattgaaattagcacaaaagaaaaagaaaagagctaatgaaaaggatgatgacaattcagttgattcttcaaacgtgaaacggcaatttgccgatttgaaagaatcattagctgctgtaacggagagtgagtggatggatattccggatgccacagattttacaagaagaaacaagagaaatagaattcaagagcaattaaacagaaaaacttatgctgcaccggattcgctaatacctgggaatgttgatttaaataaattaacggaagaacgagaaaaattattgcaatctcaaatagatgagaatcttgcacaattaacgaagaatgcaagtaatcctatacaggttaataaaccgaacgttgctaccgatgcgctaagttacttaaaggacttagaaaacgatagagtaaactctctctcagacgcaacgttagaagacttacagaaaatgcgcacaattttaaagtcatacagaaaggccgatccaacaaatccacagggttggatagcttctgccagattagaagaaaaggcaagaaaattttcagtagcaaaaaaaataatagaaaatggttgccaagagtgccctcgaagctccgatatttggctagaaaacattagactacacgaatctgatattcactactgtaaaacattagtggcaacggcaataaattttaatccaacgtctccgcttctttggttcaaagccattgatttggaaagcacaacggttaacaaatatagagtagtgagaaaagcactgcaagagattcctcgagatgagggcctatggaagctagctgtcagttttgaagctgacaaagcgcaagttataaaaatgttagagaaagccacacaatttattccacaaagtatggatctcttgactgcatatactaatttgcaaagctatcataatgctaaaatgactttgaattccttcagaaaaatccttccgcaagaaccggaaatttggattatctctacactcttggaagaacgaaataacccagatatacctgtagataaactagttagtttgctcaaggagggtttattggaactctctaaaaatgggtacaaagcgaccttgtcagcgtggttgaaacgtgcagaggctctaaatgatgcgcccaattcaaatttaacctgtcaagccatcgtttacgctatattagaatggttaagagaaagtggcgagtatgagtctgagttgaataatgttgatcagatattagaaaaaatgccacactcaaaggtacaaattgccgtcttaaaaaagcttattcagtgggatccttgtgatacagttctttggtctagactgaaaatggccactgaaagctaccataaaattgaagagttattagcatttttccaggagctgctatttcagaccaagaatagtgatgatatacgagcaaatatgagggagaaaagccctggcttgttaatgatgtatgtaagcgaatattggaaggcccaaaaaggggatactaggcaaacactagttttgattgaccagattatagatttcgccccgcataatttggatttacgctttttcaagataaagttattaggtcgttcactacaacttgatgaattacgagatttttttcagcaaactttctcctctttagaggattttaagatcagtggcacggaaagattatattataaatacgtaaactttctgcggtaccaagatctgaatgaagaggctataaaattcttgaatgagagatgtttgaaatcatttcccatctgccacaaattttttctacagctgggtcaaatttatcattccatgggcaatattgaaatgagtagagaaacctatttgtctggtacaaggttagtgcccaattgccctttattatgggtttccctatcaaaaattgacgagattgatctaaaaaatccagtaagggcaagatcaattttagatagaggattgttaaaaaatcctgacgatgtattattttacattgctaaaatccaaatggaaataagacttggtaacttagatcaggcggagttactcgtcacacaggcattgcaaaagtttccaagcaatgctttactttgggtggagcaaatcaagctgtttaagcatggaaacaaaagttcattaaaaaaaacaatttttcaagatgctttaagaaggacacaaaacgatcatcgcgttcttttggagattggagtatccttttatgcagaagcgcaatatgaaacatcattaaaatggttagaaagagctctgaaaaagtgctcgcgttacggagatacatgggtttggctatttaggacatatgcaaggttaggcaaggatactgttgatctctacaatatgttcgatcaatgtgagcctacttacggacccgaatggatagccgcctctaagaacgtaaaaatgcaatactgcacacctagagagattttattgcgcttgatgaatgacaaataa

SEQ ID NO: 75494 - DNA, 1506 bp, Saccharomyces pastorianus
atgattggctcacttagaaacaaatttgagcatttcaaagtttctgaaaagggaggccaaaatttatctacaacactaccgaaactaccccctgcaaaggaccttgatagatcaactatctacaagtaccgttacaattatggtgtaaacttgggtgcgttatttgtgctcgaaccatggattttttctaaagaaaccatttgtacaatcgatgggaaagaatatgatagcgaatttgatgctatttcccaacaattgaagaagcattcttctgaagacgttgcgaaaatgttaagcgatcactataaaaagtacattgatcgaattgactgggaatggctatctaaagatgcccatattacagcgttacgtattccaattggatattggcatgtcgaagatgggaagcatttagattcgcttccatttgccccattgagaaaagtttatgagttagccaaaccttgggaaaaacttggcgaattaatcaataatgccaagaaaatgagcattggtgtattgatagatttgcatggtctaccaggaggcgctaattgcgactcacacagtggctcgaagagtggtgaagctgcgtttttccacaaggaaaagtacatgaccaaagtctacaaagatattttacctgcaattattaacacaatgactctgggcaacgaaaacatcattggtattcaagtggttaatgaggcatgttttgataataacccaaagggccaaaaattctactattcagaagccattaataccgttgaaaaacttcaaccaggtttacctgtcataatatccgatggttggtggccccaacaatgggcagactgggttaaagaaaaacattttagtgaaatagtggtcattgattctcatgtctaccgctgtttttctgattctgataagtcgaaggatgccaattccattatcaaagatttgccaaatactgtgaattttcctcatgaagatgccgattatactgttggtgaattttctggtgttcttgatggacaaacttggaataaaacttctggcgacagagacgctattgttcaaaaatacgtacaaacccaagcagatgtattttctcatgtagctagttggggttggtttttttggactttgcagtttgaatacggtgatggaggtgaatggggcttagctcccatgatgcagaaaggaaatttaccaaaacgtcctcacggtgatgacttacaagtcgacaagaagaaaatagattcaataatccatgaacacgaggcttattggaacggtaaaggtaaaatttttgaacactggaggtttgaggatggcataaagacagctgttgatgatataattgcctttaggaaatttgacaattcattaattggtagatggcattcatggaagtcgcaaagaagagctgaatacgtttctgtcaaaaaagatagcgaatttatgtgggaatgggatcaaggctaccaacgtgggttagatgagtttaataagtattaa

SEQ ID NO: 75495 - DNA, 201 bp, Saccharomyces pastorianus
atgagacatcaatactatcaaccacaaccgatgtattatcaaccacaaccgcaacctatatacatacaacaagggccgccgccaccaagaaatgattgttgttgttgttgtaactgtggcgattgctgttcagcaattgcgaacgttttatgttgtctgtgtctaattgatctatgttgtagctgcgctggcggcatgtaa

SEQ ID NO: 75496 - DNA, 1101 bp, Saccharomyces pastorianus
atgaattacatggcttatgattatgatccccaacattcgttggaaacgtcctttaacaatttggcatttcatccccaccaacagtcacagcaacaagccctatacgaatctggtgaaagaaacgatgccaggccgggattaatgaacaccttaggtcaggcgagtaaaatgaataattccatgcttcctcaaggttcgtcggctagtcccttaacgggtcaacatagcttgaacagtacaacaaatttcaacatgcccccatcaatgaatacctataattaccagaatgtaccacaagcatctatgagaaatactctcaatcataacaatatcatgaatggggcaactgctaatgattattggctggatccaatgaataatatgacaaataacaaggatactaatgggaatcctaatgactcgatgtcatcaatgtctaatatgaccgctaaaacctcaatcaatagtacggcattcaagaattcatttgttccttttaatcatgtgacagcgctctcaatgaataatgtcaacagcaatgagatgaattcaaataaagatgacagaatggaagcattggaagtagaactacaaataaaggaaagtcaaatcgaatcactcgagaacgaaattcaaaggctaaagaaaattttcaacgaggggctaaactacaagcagaatgagcataagtatgagaaggaaaactgccatataccccaaactttcgaattgccagcttccttggaagtgatattcagaaaactgtcatcgtcactgcatgcaaaggaaaaggagttagcagagacgaaagaaaatctggaaagtatattaactgcactggcgctaaatccaacaaattcagtgactaagtatggcaggtatgatgcagaatcgattgctcacaaaatggtggtaagattagaaaacttaacaaacgagaacaaagaaatggccaagatgttagcatatggcagatcaaaagagacccaaattgaactgcagttggccaaaaaagaaaatctagaattaagagaaaaaatcgcatctttggaagcccatttggcttcaaaggagtcttcaaaggaggacgttgctaattga

SEQ ID NO: 75497 - DNA, 2412 bp, Saccharomyces pastorianus
atggcagtagagatgacagataagttcatccaaaaagagagcccgaagtctttctcacattcagaaatggcagaagcagtactagaaaacgttaacgttcctgcagtcgtttcaaaagatgagtgtatttattgctttgaatccccttataatgaaccattggccctcaatgcatcacctaaacattcattgaatatatgcttaaactgtttccaagctacgtgcaacagacatgtcccactccatacccgagtcacagaatatgcttgcgataccatacattccaattatttaactattgctaaagtggagaaacctaagcaagaaaatgtagaagaaaataataacaacaaaaaaataaagctacaggtaattgagacgtcagaagacgacacccacaacactatttggggtttacaaaggttcaatggtgaaaatgttcccaggaccgtacttttgaagtcgacagactctgacatttcttctacggccttggagaagattgaaaagatattaaaggcgaagtcacaagacttcgaggataagaagaactcctgggtgttagaaatcagcacctgtccacatacagaaaactttcaaattccatctaagcccgaaaatactgtgaatttaaaccaatgctcttcctgtgatttgactcaaaatctctggttatgcctacattgtggtaatatcggatgtggcagggaacaaatcgggattgatggtcactcacatgctttggatcattatcggagtaataataatcacccattagctatcaaattagggtctttaagctcttcaacctatgatctgtattgttacgcatgtgacgacgaaactagatttccagataatgttaatttaggcagtgcactacaaatatacggaattaacatacaagaaaagattgcggatgaaaagactctagttcaattacaagtggaacagaacgaaaattggcaatttagaatggtcgattctagcggtaaagaatttgaaaaattatccgctagtaagaattatggctgtggtctgatcaatttgggtaattcctgttacttaaattcggttatacaaagcttggtgaatggtggcgtcccgaattggtccttggattttctaggaagtaaatttccactggatgttgtatatccggacaataatttaaagtgccaatggatcaagctactcaatgccatgaaatgtgaacccgaactatatccaaatggtatcaaacctactactttcaagaaatgcattgggcaaaatcatcaggaattcagttccaatagacaacaggatgcgatggaatttctaaccttccttttagacttgttagacaagaaatttttttcaagtagttcttcaggtattccaaatcccaacgatttagttagatttatgatggaggataggctccaatgtaacatttgcgggaaggttaaatattcttatgaacccacagaggctatacagattcccttagaggagaatgatgaacctcaagatatgttagagagaatcaaggcgtattttgaagggcagacgattgaatttaaatgtgctaattgtaaggaaaaggttaccgcaaataaaaaacctggtttcaaatctcttcctcaaacacttattttgaacccaataaggattagattacagaactggattcctgttaagacaagtaatgagctttctttaccaggtttaatagacagggatgatatgctagatgtttcgtcttatttatcacaaggatttgatcctcaaactgaaaacttattgcctgatgaggacgaaaaccgtagctcttttacgccaaaccaatgcagtatttctcaattaattgaaatgggctttactcaaaatgctagcgtgcgcgccctatttaacaccggaaaccaagacgctgagagcgctatgaattggctattccagcatatggatgaccctgatttaaatgatccctttgtcccgcctcctaatgtccccaagaaagataagagagaagtggatgaggtatcattgacttcaatgttatccatgggactaaatcccaacttatgtcgtaaagccttgatactcaacaacggagatgttaatcgtagtgttgaatgggtatttaacaacatggatgatgatggaacatttcccgaacctgaagtgccaaatgaagaacagcaacaaaaaaaggatcttggatattcgaccgctaaaccgtacgctttaactgcagttatttgtcataagggaaattctgtccattctggtcactatgttgtttttattcgtaaactagtggcagacaaatggaagtgggttctttataacgatgagaaactagttgctgccgacagcattgaagatatgaaaaaaaatggttatatttatttctatacaagatgctaa

SEQ ID NO: 75498 - DNA, 243 bp, Saccharomyces pastorianus
atgacacaacataaaagctcgatggtgtacatacccaccactaaggaagctaaaagacgtaatgggaaatcagaaggcatactaaatactattgaagaagtggtggaaaagctttattggacctactacatacatttacccttttatttaatggcctcttttgattcattcttcctccatgttttttttctcacaattttcagtttgagtttcttcggtacactaaagtattgcttcctttga

SEQ ID NO: 75499 - DNA, 3327 bp, Saccharomyces pastorianus
atgtcgatcacgaatggtacttctagaagcgtttcggcaatgggccatccggcggtagagaggtacactccaggccatattgtctgcgtaggcacacataaagttgaagtggtaaattatttagcagaaggtggctttgctcaaatttacgtggtgaaattcctagagtatcttaatgaatttgataatacagcaagtgttcccttaaaaattggcgatgtcgcatgtctaaaaagggtattagttcaagatgagaatggattgaacgagatgagaaatgaagtggaggtaatgaagaaattgaaaggggccccaaatatagtacaatacttcgattccaacgcctctcgccgtcgtgatggcgttcaaggatttgaggttcttttgctaatggaattgtgtccaaacaaatctttgctagattatatgaaccaacgattgtcaacgaaactgacagaagctgaaattgtgaaaattatgtatgacgttgctctttctatctctcaaatgcactaccttcctgtgcccttgatccatcgcgatatcaagattgaaaatgtcttggtagatgccaaaaccaatttcaagctagctgattttgggtccacgtcaacatgtttcccaattgtcactactcatcaagatattgctcttttgactcaaaacatctatgtgcatactactccgcagtataggtcccctgaaatgattgacctttacagatgtctgcccattaacgaaaaatcagacatatgggctttgggagttttcctttacaaattattatttttcaccaccccttttgaaatgaccggtcaatttgctatattacattccaaatatgaatttcctgtcaacaaatattcatcaaaactaatcaacttaatcattatcatgttggcggaaaacccaaatttgagaccgaacatttatcaagtattataccatttatgtgagattttaaatgtggaagttccaatcgaggataagtatgcggaaggtgcctataatttttctaaatatacgcagtttcagaataaattacaaaatgttcaattgcaaatgtaccagttacaacaaaagaaaattatgcagaacaataaattgagtgactcagaagaaaacttactgaatgacatgtttctttcttcttttgaaatctcatccaaacttcccatgaatgctagtgacggtcatgccgctgtttctagaataccatctcaaaatgtcggccaagaacttgaagaagagaaagaaagtcaatccgatcagaggaagtctaccctgtccgaagataaatcgtcaagaacgacatcgaatgctaacagttctggtacagccaataatcctcaagaaatcaatacaatccagtctccaggtatagaggacaaatcaatttttgaaaataaaactcctggagagttatattatccaagcgtgagcgaattagatacttatttggacaaagaattggtcaaacaatcaagtgatccgactatttctgaacaaagtcctcgtttgaatacccaatcactaccacagaggcaaaagagcacaagctcttattcttcaggtggcagatcaatgaagagcacatcatatggtgcagcaacgatcgggtcagacgaagccttggcgaacgagaaaactgctggtattaataagatgaaacaacataaatcgaataatccctttccaaaaatgaatgttgcataccattctacgaatgaattgagcaatgacgcaagtaactttttcctggaagaacaacagcaaggccagagatatcagcaagctcaaaatcaaacaggtacacaagggaatacctttccagatgaatctcagtatcaatctagagttgaacaacagcagcaacaacaggaccaacccaaaggacctgctaattatagtcaaagaaatttctacactgggagggatcggtccaataaacctatgcagttgggtggaactattgctggagatagtggtaatagaagagtcaactttcagaatatttctcaaaattacgccacgaactcccagtcaggatatctcccaagtcaaaattccccagcaattccaatggtgagacctgttatttccatgaatcagcagcaagcgcaacagatacaagcccagcaattgcaggcacaacagatgcaggcaaagcaacagatgcaagccaagcagcagatgcaagttcagcaacaactgcaagtccaacagcaaatgcaaattcaaaatgcaaataataatggtacttacgtctctgatagaacaaatcataccacagaagatatgagaaatgctcaggggggtgaacctccaattcttgcaggaaattctgcaaatgaaccaatgcactcatcctctaaaaatgaagctctcttaattgaattatctccattaaaagaagatacaggaaagcaatctttccaagatacaaatgagcctcaaactggcggtatcgaagatgccggcggttcaggaactatcaaaggctcgaacaataatcgaaatggcgttttaaatttaagtttgaatgagatggacttatcaagagatgatactgatgctgctgtctcctccttttcatcgtcttcatcgtctgcatcaattcaacaagctaagctttctggacgcaaaggttcaagtaagagcaacaattattcaacagacgaattgggagatagtatggtctccagcgaaagcattgatattgatttggatgatgcaaggagaggaaaaacagctgaaagaagaccactccataatgaaagaggtcataaagaccaggcaagatcaagtgatgctaggaagtctaatcaattcaaaagcaaggacttcagcagcgtatcaacaaggcaaccgcggcagtcattggatctgaatttccaggaagtaaatctgtcttcaccaacgttaactcaagagcatagaaataaaaacgactcgccagtaccaaattcacattactcgtatagagttccacctcatgcttccaccgcaataactgagaataagcgccacagtactggtcacgaactgtcaacccggtcaaatggcaagcatgaaacacacaggactggttccaagcaaaggcacgatttggaaagataccggcattcgaaggataaggatagcaatagcagcattactattagcacctcaactccatcagagatgagaaaatccttcgctagggcccgtcaatcgcttgatttggaaagggtccgtcgtgaagcgatggcaagtagtgcatccagtagtggtggcagtaacgggaaaaggagatcttttttctcagtctttagaagcgagaaatga

SEQ ID NO: 75500 - DNA, 1863 bp, Saccharomyces pastorianus
atgctaaatggggaagactttgtagagcataatgatatcctatcgtctccggcaaaaagcaggaatgtaaccccaaaaagggttgacccacatggagaaagacaactgagaagaattcattcatcaaagaagaatttattggaaagaatctcgcttgtagacaacgaaaggaaaaatacatctccagatccggcactcaaacctaaaacgccaagtaaagctccccgtaaacgtggaagaccaagaaagatacaggaagaattaactgataggatcaagaaggatgagaaagatacaatttcctctaagaaaaagaggaaattggacaaagatacatcaggtaatgtcaatgaggaaagcaagacttctaacaacaagcaggtgatggaaaagacggggataaaagagaaaagagaacgcgaaaaaatacagatagcgaccacaacatatgaagataatgtgactccacaaactgatgataattttgtatcaaattcacccgagccaccagaacctgcaacaccatctaagaagtctttaaccactaatcatgattttacttcgcccctaaagcagattataatgaataatttaaaagaatataaagactcaacctccccaggtaaattaaccttgagtagaaattttactccaacccctgtaccgaaaaataaaaagctctaccaaacttcggaaaccaagtcagcaagctcgtttttggatacttttgaaggatatttcgaccaaagaaaaattgtcagaactaatgcgaagtcaaggcacaccatgtcaatggcacctgacgttaccagagaagagttttccctagtatcaaactttttcaatgaaaattttcaaaaacgtccaaggcaaaagttatttgaaattcagaaaaaaatgtttccccagtattggtttgaattgactcaaggattctccttattattttatggtgtaggttcgaaacgtaattttttggaagagtttgccattgactacttgtctccgaaaatcgcgtactcgcaactggcttatgagaatgaattgcaacaaaacaaacctgtaaattccatcccatgccttattttaaatggttacaaccctagctgtaactatcgtgacgtcttcaaagagattaccgatcttttggtccccgctgagttgacaagaagcgaaactaagtactggggcaatcatgtgattttgcagatccaaaagatgattgatttctacaaaaatcaacctttagatatcaaattaatacttgtagtgcataatctggatggtcctagcataaggaaaaacacttttcagacgatgctaagcttcctctccgtcatcagacaaatcgccatagtcgcctctacagaccacatttacgctccgctcctctgggacaacatgaaggcccaaaactacaactttgtctttcatgatatttcgaattttgaaccgtcgacagtcgagtctacgttccaagatgtgatgaagatgggtaaaagcgataccagcagtggtgctgaaggtgcgaaatacgtcttacaatcacttactgtgaactccaagaagatgtataagttgcttattgaaacacaaatgcagaatatggggaatctatccgctaacacaggtcctaagcgtggtactcaaaggactggagtagaacttaaacttttcaaccatctctgtgccgctgattttattgcttctaatgagatagctctaaggtcgatgcttagagaattcatagaacataaaatggccaacataactaagaacaattctggaatggaaattatttgggtaccctacacgtatgcggaacttgaaaaacttctgaaaaccgttttaaatactctataa

SEQ ID NO: 75501 - DNA, 933 bp, Saccharomyces pastorianus
atgggtaagagcagcaaagataaaagagatttgtactatagaaaagcaaaagagcagggctatagggctagatctgctttcaaactacttcaactcaatgaccaatttcatttcctggatgatccaaacttaaaaagagttgtagatttgtgtgcagcaccaggttcatggtcacaagtgctctcgagaaaactatttgatgaaagtcccagttcagataaggaggacaggaaaattgtctctgtcgatttacaaccgatgtcccccatacctcatgtgacaacgttgcaagccgatatcactcatcctaaaacattggcgaggattctaaaactgtttggcaacgaaaaggccgattttgtttgtagtgatggtgcacctgatgttactgggctacacgatcttgacgaatatgtgcaacaacagttaattatgagtgcgctgcaacttactgcatgcattctgaaaaaaggtggaacttttgtggcaaagatcttcagaggtcgtgatatagatatgctatattcccaattgggctatctattcgataaaatcgtttgcgcaaagccaagatcatcaagaggtacatctctagaagcgtttattgtttgtttaggctataacccaccatccaattggacaccaaaattagatgtaaatacatccgttgatgaattttttcaaggctgttttttgaataaattgtgtatatcagacaaattgtctcattggaatgaagaggagagaaacatagccgaatttatggcttgtggaagtcttcaaagtttcgactcagatgccacttatcatgacctaccttcttcagttgcaggcacttcatcgtccttagatcctgttcaaagcccgacgaaccctccctacaagaaagctttggaattaaaaaggagcgggaaactcactagatcagtttga

SEQ ID NO: 75502 - DNA, 429 bp, Saccharomyces pastorianus
atggatatggtttcaccagtcttgaacctacaatcatctgttttaggtgagctcgtaggcattactggaaaagtgttctttctcttaatagaagagattaaatacccgataatcacacccagaattattgtggatgcccagatatcttcttggtcattgttttttttcgcttcaatctgtaatctctctgcaaaatttcgggagccaatagtgacaacatcgtcaataataagtttgatggaatcggaaaaagatcttaaaaatgtaaatgagtatttccaaataatgaccaaaatgctctttatattggaaaataaaatatttgtttcgttcttcgtagtatttaacatttccgttcttatcattgtaaagtctgagccatattcatatggaaaagtgctttttaaacctagttcctccatattttag

SEQ ID NO: 75503 - DNA, 1095 bp, Saccharomyces pastorianus
atgaatgatgaaattaatgagtcaccgcccaatatatgtgagcagtgcttaggtgatgaggctaatatacgaatgactaaaattccacaaggctctgaatgtaagatttgtaccttaccgttcaccttataccattttaagacgtctaaacgaagcaataatatcattaaaacattaatatgtgtacggtgcgccactcagagaaacatttgtcaatgctgtatgcttgattcaagatggcacatccctatacaactgcgggatcatttaatatcccttgtgaacggggaaaacgttatgacggaggaagcaaaaaacgacatgatgaaaaggtttctgtcactaaaaaacgtgaaattaggaggagctcagattacgagtgatccgtcagaagcagataatatcgttgataaattgaaaaatatacttctgcgagcaccatcagatggcccaagtactccgttaataaaaaacacaacagcattgtataaaaatgaaaaaggtgcaaatgaggtcaaaaacttggaaaagtacgcgtccgtggacatttctcatattttgaagaaactacccttgaatgaatcgtttttaaagaacccctccaccaaatcattttttctgtataatattgatgcctcaatccctgaatggaaaataactgatacagtttcgcaattattgggtataaagaaatggaaggatggaaattcattgtcattaatagtcaaccacaaggcgaagtgtggtggcctaagatttcaatctagtgaattgggggagcggtttgtcagtaaaataagtgagacacttgtcacaccaaagggcctaaagagaggagttttacttattgaccgttttagaatctttatcattccgtggtcgtctggcttttcagctgcgtcattcggaaccaacactgcagaaaatataaaacttagtttaagtttgaataagcttattcagttggagctagggctttcttttcctacaaaaagcacagataacgcaaagaatgacaagaaaaagacatcaaaaaaagttcataaggccagatcaaagaaatcgaaacctcgcgctaacaagttaacaatatag

SEQ ID NO: 75504 - DNA, 597 bp, Saccharomyces pastorianus
atgtctgtttccaagattgctttcgttttaagtgccattgcctctttggccgtcgctgacaccagcgccgccgaaactgctgaattgcaagctattatcggtgacatcaactctcatctttctgactacttgggtctagaaactggcaacagtggattccaaattccatctgatgtcttgagtgtgtaccaacaagtcatgacttacaccgatgacgcttacactaccttgtttagtgaattggactttgatgccatcactaagacaattgttaaattgccatggtacaccacaagattgagttctgaaatcgctgctgctcttgcctccgtttccccagcttcttccgaggctgcatcttcttccgaagctacatcctctgccgctccatcctcttctgctgccccatcttcttctgctgccccatcatcatctgccgaatcatcttctaaggccgtttcttcttctgtcgctccaactacctcttctgtcagcacttctacagtcgaaactgcttccaatgccggtcaaagagtcaatgcaggcgctgcctctttcggtgctgttgttgcaggtgcagctgctttattgttataa

SEQ ID NO: 75505 - DNA, 714 bp, Saccharomyces pastorianus
atgaaaacggcctacttggtgtcattggtgctcatcgtatcgacagcatatgttattaggttgatagcgattctgccttttttccacactcaagcaggtacagaaaaggatacgaaaaatggagttaacctactgaaaatacgaaaatcgtcaaagaaaccgctcaagatttttgtattcttaggatcgggaggtcatactggtgaaatgatccgtcttctagaaaattaccaggatcttttactgggtaagtcgattgtgtacttgggttattctgatgaggcttccaggcaaagattcgcccactttataaaaaaatttggtcattgcaaagtagaatactatgaattcatgaaagctagggaagttaaagcgactctcctacaaagtgtgaagaccatcattggaacgttggtacaatcttttgtgcacgttgttagaatcagatttgctatgtgtggttctcctcacctgtttttattgaatgggcctggaacatgctgtataatatccctttggttgaaaattatggaacttcttttgcccctgttgggttcctcccatatagtttatgtagaatcgctggcaaggattaatactcctagtctgaccggaaaaatattgtattgggtagtggatgaattcattgtccagtggcaagaattgagggacaattatttaccaagatccaagtggttcggcatccttgtttaa

SEQ ID NO: 75506 - DNA, 639 bp, Saccharomyces pastorianus
atgctaagacgctctaaaaattccagcactaacacaaacgcagacaccaagaaaagacaatccatgcatttaggatccaaaagttcgctaatctcgctgactagcgaatttggccatggacactccaagacgaagcagaaaaaggaggagggcacagctccttctcaattcctgtctcctacgaataagagaagcacatctagtcagtcaaagttaaaaaggagcagcttgttactggacgaaacactgcttaaagactaccactcggccatgaggcacatgcaaacaaacgctgcaaaggaagaaaagctgcggatggctccatcaccaacgcagtcaacgaggagcgaatcagacgccagtctttcctccaccaagagctcgatctcttccatattttcccaagataatgactattccattcacgatttgttgtacgaagatattgaagagatggataaaacaacagacgctctcaaaattaacaacacaatagcaatcgacgattctaaagctctctttgttttctgttcaaacgactcctcctcaaggacagcgtctattgaaacattgcacgaatcaaatttggacaacctggatatgggttccagtagaaggacatcgttggactttttttaa

SEQ ID NO: 75507 - DNA, 645 bp, Saccharomyces pastorianus
atgtcatttaacagtccattttttgatttctttgacaacatcaacaacgaagttgatgcctttaacagattgctgggtgaaggcggcttaagaggctacgcaccaagacgtcagttggcaaacacacccgcaaaggattctactggcaaggaagttgctagaccaaataactatgctggcgctctttattatcccagagatgaaaccttagatgattggttcaacaatgacttgtccctgttcccatctggtttcggtttccctagaagtgtcgcagttccagttgatattttggaccatgacaacaactacgagttgaaagtcgtggttcctggtgtcaaaagcaagaaggacattgatattgagtaccatcaaaacaagaaccaaattttggtttctggtgaaattccatctaccttgaatgaagagagtaaagacaaggtcaaggtcaaggagagcagctctggtaagttcaagagagtcatcactttgccagactacccaggtgtggatgcagacaacattaaagcagactacgcaagtggtgttttaacattaacagttccaaaattgaagcctcagaaggatggtaagaaccacgtcaagaagattgaagtttcttctcaagaatcgtggggtaactaa

SEQ ID NO: 75508 - DNA, 267 bp, Saccharomyces pastorianus
atgcacgtacataagggcctcatcttcctctcctttttttcccccatctacctatcgctgttattgaacggaagcatcttctttttttattatgctcagagggccctacatgacagcttttttttccccaatgagctgctacggtgccagatctgcttatgttcattattttggatggtaaccgttataaatttaaagcgtttcttcgctaggatggtgaatattagtatttatcagccgtctcgtaatcgtttagttcgttactag

SEQ ID NO: 75509 - DNA, 489 bp, Saccharomyces pastorianus
atggtgatgctccattctaaaaacgttaaagggtttctggaaaacactttgaaaccgtatgatttgcattcggtagacttcaagacatcgtctttgcaatcgtctatgattataaccgccactaatgggggtatactgtcctatgcgacgtcaaacaacgatgtaccgaaaaattccataaacgaaataaactcggtcaataacttgaaaatgatgagcttattgattaaggataagtggtcagaggatgaaaacgatactgaggaacagcactccaatagctgttaccctgtggaaatcgactcctttaagacaaaaatatatacttacgaaatggaagatttacatacctgtgtcgcacagatacccaatagcgaccttttgctattgttcattgcggaaggtagcttcccttacggactactggtaattaaaattgaaagagctatgagagagttgactgatttgtttggctacaagctaggttga

SEQ ID NO: 75510 - DNA, 2886 bp, Saccharomyces pastorianus
atggcccccccaccattccgtcctgaaaatgccattaagagagccgatgaacttatttctgttggcgaaaaacaagctgctttacaatctttgcatgatttcataactgccagaagaatccgttgggctacaccttcaactgttgagccagtcgtgtttaaattcttggaaattggtgttgaactaaagaaaggtaagctgctaaaagacggtttgcaccagtacaaaaaattaattcaaggatctaccgaaggtttggtttctgtcggtgccgttgcacgtaaattcattgatttagtcgaatctaaaatcgcttctgaacaaactagagctgacgaacttcaaaagcaagaaatcgatgatgatttggaaggtggtgttaccccagaaaatttgctgatttctgtttacgagtcagatcaatctgtggctggtttcaatgatgaagccattacttcatggttaagatttacttgggaatcatatcgtgcagtcttagatttattgagaaacaacgctttgttggaaattacttattctggtgtcgttaaaaaaactatgcatttctgtttgaagtatcagcgtaaaaacgaattcaagagattagctgaaatgttacgtcaacatttagatgctgctaactaccaacaaagtaaatcaggaaacaatttagttgacttgagcgatgctgataccttgcaacgttatttagatcaacgtttccaacaagtcgatgtttctgtcaagttggaattgtggcacgaggcttatagatccattgaggatgttttccacttaatgaaaatatccaaacgtgctcctaaaccatctactttggctaattactacgagaatctcgtaaaggtcttctttgtttccggtgatccattgttgcacactactgcctggaagaagttttataagttatattctaccaatccaagagccacggaagaagaattcaaaacatattcttctacaattttcctatccgctatttctacccaactagacgaaattccatctattggctacgatcctcatttacgtatgtaccgtttattaaacttggacgccaagccaactagaaaggaaatgttgcaatccattattgaagacgaatccatttacggtaaagttgacgaggaattgaaagaattgtacgatatcattgaagttaactttgatgtcgacacagtgaaacaacagctggaaaatttattagtcaaattgtcttctaaaacctacttcagccaatacatcgcacctttaagagacgtcattatgagaagggtttttgttgctgcctcccaaaaattcactactatctcccagtccgaattatacaagctcgctaccctacctgctccgttagacttatctgcttgggacatcgaaaaatcgctgttacaagctgctgtggaagattatgtttcaattaccatcgatcatgaatctgctaaggttacattcgctaaagatccatttgacattttcgtatcaactgcttctaaaggagtctctgaagaagaaaacacagagccagaagtccaagaagaaaaggaggaaactgacgaagctcttgggccacaagaaactgaagacggtgaagaaaaggaagaagaatctgatcctgttattatccgcaattcttacatccacaacaagttgcttgaattatccaatgtcctacacgatgttgacagtttcaacaatgcttcatacatggaaaaggttagaattgcccgtgaaactttaattaagaagaacaaggatgaccttgaaaagatttccaagattgttgacgaacgtgtcaagagatctcaagagcaaaagcaaaaacatatggaacatgctgccctacatgctgaacaggatgctgaggtcagacaacagcgtattttggaagaaaaagctgctattgaagctaaattggaagaagaggctcaccgtcgcttaattgaaaagaagaaacgtgaatttgaagctatcaaagaaagagaaatcacaaagatgattactgaggtgaatgctaagggacatgtttacattgaccctaacgaagctaaaagcttagatcttgacaccattaaacaggttattatagctgaggtatcaaagaacaagagtgaattggaaagtcgtatggaatatgctatgaagaagttagatcatacggaaagagctttgagaaaggtcgaattgccattgctgcaaaaagaagttgacaagctacaagaaacagacacagcaaattatgaagctatgaagaaaaaaattgtcgacgtcgccaaggccgaatacgaagccagaagggctgatcgtaagaacttggtcatggtctatgatgattatttgaagttcaaggagcatgtttcgggcactaaggaaagcgaattagctgccatccgcaaccaaaagaaggctgaattggaagctgccaaaaaggccagaattgaagaagttcgtaagcgtcgttacgaggaagccattgcaaggcgtaaggaagaaattgcaaatgctgaaagacagaagcgtgctcaagaactcgctgaggctacccgtaaacaaagagaaatcgaagaagctgctgccaagaaatcaactccatactctttccgcgcaggaaacagggaacctccaagtacaccaagcactctaccaaaggcgaccgtttctccagataaagctaaattggatatgatcgctcaaaaacaaagagaaatggaagaagccatcgaacagagactagccggtagaacagctggtgggtcctccccagctactccagcaaccccagcaaccccaactccatcttctggtccaaagaaaatgactatggctgaaaagttgagagccaagagattggccaaggggggcaggtaa

SEQ ID NO: 75511 - DNA, 2277 bp, Saccharomyces pastorianus
atgttcaagatacctggttttggaaaagctgctgcaaatcatactccaccagatatgacaaacgtggatacccgtacacgccatttaaaggtgtcaaactgtccaaataactcctatgcactcgcaaacgtagctgctgtctcaccaaatgatttccctaataacatttatattattatcgataatttatttgttttcacaactagacactccaacgacattccaccgggaaccattggatttaacggtaaccagcgtacctggggtggttggtccctaaatcaagacgtgcaagcaaaagcatttgatttattcaagtattccggtaagcaatcgtatcttggttcaatagatatagatatctcattcagagctagaggtaaggccgtaagcacggtattcgatcaagatgagttagccaaacaatttgttcgttgctacgaatctcaaatattttctcccactcagtaccttatcatggagttccaaggccatttctttgacttaaaaattagaaatgtccaagcaatcgatttgggtgatattgaaccaacctccgctgttgcaactgggatagagacaaagggaattttgacaaaacaaacacaaattaattttttcaaaggaagagatggtttagttaatttgaaatcatcaaattcattaagaccaagatcaaatgctgtgatcagaccggatttcaagtttgaagatttgggtgtcggtggtttggataaagagtttactaaaattttcagaagagcgtttgcaagtcgaatctttcctccttcagttatagaaaaactgggtatttctcatgttaaaggtttgctattgtacggtcctccaggtactggtaagaccttaattgcaagaaagattggtacaatgctgaatgctaaagagcccaaaatcgtcaatggtccagaaattttgagcaagtacgttggttcttcagaagaaaacattcgtaatttatttaaggatgcagaagcagaatatagggccaagggtgaggaatcttccttacatattattattttcgatgagctggattctgttttcaagcagagaggttcaagaggtgatggtactggtgtaggggacaatgtagttaatcaattgttagctaaaatggatggtgttgatcagttgaataatattttggttattggtatgaccaatcgtaaagatttaatagacagtgctcttttgcgtccaggtagatttgaagtccaagttgaaattcatttacccgatgaaaaaggaagactccaaattttcgacattcagacgaagaaaatgagggaaaataatatgatgagcgacgatgttaacttagctgagttagctgcattaacaaaaaacttctctggtgctgagattgagggtttagtgaagagtgcaagttcttttgcaatcaacaaaaccgtcaacatcgggaaaggtgccacaaaacttaacactaaagatatagcaaaacttaaagtaacaagagaagactttttaaatgcactcaacgatgttactcccgcttttgggattagtgaagaagatttgaaaacatgtgtggaaggtggaatgatgctttattccgaacgagttaactcaatattgaagaacggagcccgttacgtccgccaagttcgcgagagtgataaatccaggttagtatctctattaatccacggccctgcagggtccggtaaaacagctttagccgctgaaattgctttaaaatctggattcccattcatcaggttaatttctcccaacgagttgtcaggcatgtcagaaagcgcaaaaattgcctatattgataacactttcagagatgcgtataaatctccactaaacattcttgttattgattcgttagagactctagttgattgggtaccaattggtccaagattctctaataacattttacaaatgctaaaggttgcattgaagcgtaaacccccacaagaccgtcgtttattgatcatgactactacatcagcttattcggtacttcaacaaatggatatcttgagttgcttcgacaatgagatagcagttccaaatatgaccaatttagatgaattgaacaacgtcatgatagaatcaaactttcttgacgatgctggtagagttaaagttattaatgaattatcaaggagctgtcctaacttcaatgtcggtattaaaaagaccttgaccaacattgaaaccgcaaggcacgatgaagatcccgtgaacgagcttgttgagttgatgacccaatccgcataa

SEQ ID NO: 75512 - DNA, 1461 bp, Saccharomyces pastorianus
atgagtcttaaagaagacgactttggcaaggataattctagaaatatagaatcatatactggtagaatttttgacgtatatatacaaaaagattcgtattcacagtcggccttggatgatatgtttccagaagccgtagtttcaaccgccgcttgtgtgaaaaatgaagcggaggataacatcaatctcatagacgcgcatcctcaattcgaactggtaaatactggactgggtgctaaatcggacgatttgaaatctccatcagcaaaggctacgttcactgacaagcagaggaagaatgaagtaccaaatatatctgtgagcaactactttcccggacaaagtagcgaaacgtcgtcaacaacggaatcttggactatcggttgtgataagtggtcagaaaaggtagaagaggcattccttgaggcacttagactgataatgaaaaatgggaccacaaaaataaaaataagaaatgccaattttggaagaaacgagctgatttcattatatatcaagcacaaaaccaacgagttcagaaccaaaaagcaaatttcttcccatattcaagtctggaagaagaccatacaaaacaaaatcaaggactcgctgaccctatcatcaaaggagaaggagcttctacaccttatcgaacatggcgctgaacaaactactgaaaactcaaacctgttttatgacatatttgaagaaattatcgactctctaccttcagtcagtgattctggaagtttaacccctaaaaacctctatgtaagtaataatagcagtggattgtcagtacattcaaaactgcttacgccaatcactgcttccaacgagaaaaaaattgaaaatttcataaaaactaatgctgcatctcaagccaaaacccccctcatttacgctaagcacatttatgaaaacatagacggctacaagtgcgttccgtcaaagaggcctcttgaacaactttcccccacggaactccaccagggagatcgccccaataaggctagcttttccaacaagaaggcaatcctggagagtgcaaaaaaaatcgaaatagagcagagaaagataatcaacaaataccaaagaatttcccgcatacaagaacatgaaagtaatcctgagttcagttccaattccaattccggttcagagtacgaatcggaggaagaagtagtcccaagatcagccacagtcacacaactccaaagcagaccagtgccatactacaagaataatggaatgccctactcactctccaaagtacgaggaaggcccatgtatccaagacctgctgaagatgcttacaatgccaattatattcaaggtctgccccagtaccaaacatcttatttttcgcagctgttattatcatcaccccagcattacgaacattctccacatcaaaggaactttacgccatccaaccaatcgcatgggaacttttattaa

SEQ ID NO: 75513 - DNA, 2928 bp, Saccharomyces pastorianus
atgttgtcgagactatctttattgagtaactcgagggcgttccaacaggccagatggcgcatttaccgcttaaaagtttcgccaactgtgcatgcttcacaataccatattctctctggtaggaaacttgctcaatctattcgagaaaaagccaatgatgagatacaagccattaagctcaagcatcctaatttcaagcctaccttgaaaatcattcaagtcggggccagaccagactcatctacgtacgtgaggatgaaattgaaagcttcaaaggacagcaatgtagactgtatcatagagaagttaccagcagaaatcactgaagttgagcttttgaagaaaattagtgacatcaatgatgatgactctatccatgggttgctaattcaactacctctaccgcgtcacttggatgaaaccacgattacaaacgctgtggactttaaaaaggacgttgatgggttccacagatataatgctggtgaattggctaaaaaaggagggaaaccatacttcataccatgtactccttatggttgcatgaaattacttgaagaagctcatgttaagttagatggtaagaacgccgtcgtgttaggcagatcaagtatcgtcggaaatccaattgcttcgttgttgaaaaatgcgaatgccactgttactgtctgtcatagtcatacaaggaacattgcagaagtggtctcccaagctgatatagttatcgcagcttgcggtattcctcaatacgttaaatcagactggattaaagaaggcgccgtggttattgatgtaggtatcaactacgtacctgatatcagtaagaaaagtgggcaaaaattagttggtgatgttgattttgattctgtaaaggaaaagacatcttatattacccctgttcctggtggagtgggtccaatgactgtcgctatgcttgtttccaatgtactattagctgctaaaaggcaattcgtggaatctgaaaagcttccagttatcaaacctcttccattacacttagaaagtccagtgccttcagatattgatatatcaagagctcagagtcctaagcatatcaagcaagttgccgaggagttgggaatccactctcacgaattagaattatacggccactataaggcaaaaatttctccaaatatttttaaaagattagaatctagagaaaacggtaagtacgtccttgttgcaggtattactccgactccattgggtgaaggtaaatccactacgactatggggttggtgcaggctttatccgctcatttagggaaaccatccatcgcgaacgttagacaaccatctcttggcccaaccctgggtgtcaaaggtggtgctgctggtggtggttatgcccaagttattcctatggacgagttcaatttacatttgaccggggatattcatgctatcagcgctgcgaacaatcttcttgcagcagctatcgacactagaatgttccatgaagccactcagaagaatgatagtacattttacaagagactagttccaagaaaaaaaggcatcagaaagtttaccccatccatgcagagaaggcttaaaagattgggtattgaaaaagaagaccctgatgctttaacacctgaagaagtcaaaagatttgctagattgaacataaatcccgatactatcactatcagaagagttgtcgacatcaatgacaggatgttaagacaaattaccattggcgaagccgctacggagaagggttttacaaggaccactggattcgatatcactgttgcctctgaattaatggccattttagctctatctaaaagcttacacgagatgaaggaacgtattggacgcatggttattggtgctgattatgataacaaaccagtaacagtagaagatattggctgtaccggtgctctgactgcattattacgtgacgctataaagcctaacttaatgcaaactttggaagggacccccgtaatggttcacgctggtcctttcgccaacatctccatcggcgcatcatcagtaattgcagacttaatggcattgaagcttgttggttcagaaaagaacccgttaaatgacaagaacatccatgaacctggttatgtagttactgaagcaggattcgattttgccatgggtggtgaaagattctttgatatcaaatgtcgttcctctggattggtgccagatgcagttgtcttagtcgcaaccgtaagagctttgaaatctcatggaggtgctccaaatgttaagcccggacaatcattaccaaaagaatacacagaggaaaacatcgattttgttgccaagggtgttagtaatttggttaagcagattgaaaacatcaaaacgtttggaataccagtcgttgtagcaatcaacagatttgaaacagactcacaggcagagattgaggtaatcaagaaagcagccttgaatgctggcgcatctcatgccgttacttctaatcactggatggaaggtggtaaaggtgcagtagaattagcacatgctgtggtagatgcaacgaaagaaccaaagaactttaactttttgtacgacgtcaatagctccatcgaggacaagcttaccagcatcgtccaaaaaatgtatggtggggcaaaaatcgaagtatcaccagaagcccaaaaaaagatagacacctacaaaaaacaaggcttcggtaatcttcccatctgtattgctaagacacaatattcattatcccatgatccatcattaaagggtgttcctagaggttttacgttccccatcagggatgtgagagcttcaataggtgcaggttatttatacgcattggctgcagaaattcaaaccataccgggtctatcgacatatgctggttacatggcagtagaagtcgacgacgacggtgaaattgaaggtctattttaa

SEQ ID NO: 75514 - DNA, 924 bp, Saccharomyces pastorianus
atgagtagcgacgctaagcaacaagaaacaaactttgccattaatttcttaatgggtggtgtgagtgcggccatcgctaaaactgctgcctcaccaatcgaaagagtcaagatcttgatccaaaatcaagatgaaatgatcaagcaaggaactttagataaaaagtattccggtatcgtggattgtttcaagagaactgcaaagcaagagggactaatatccttttggcgaggaaatactgccaatgttattcgttattttcccactcaagctttgaacttcgccttcaaagataagattaagttgatgtttggtttcaagaaagaggaaggctatggtaaatggtttgcaggtaatctggcttctggtggtgcagctggtgctctttcgttactatttgtttattctttagattttgccagaaccagacttgctgctgatgcaaaatcgtcgaaaaagggtggcgctcgccaattcaatgggttgactgatgtttataaaaagaccttgaaatcggatggtatcgcaggattatacagaggattcatgccatcagtagtgggtatcgtggtttatagaggactatatttcggtatgtttgattctctcaagccactggtgctaactggttcattagatggttcattcttggcttcatttttattgggatgggtggtcactacaggtgcctcaacatgttcttatccattagacacagtgagaagaagaatgatgatgacttcaggtcaagcagtaaagtacaacggtgctatagattgtctcaaaaaaatcgtagcttctgaaggtgtagggtcattgttcaaaggctgcggggcaaatatcttgagaagtgttgctggagctggtgttatttccatgtatgaccagttgcaaatgatattgttcggtaaaaaattcaaatga

SEQ ID NO: 75515 - DNA, 258 bp, Saccharomyces pastorianus
atgtcatctgctctatacaaacaaagcacaaattttactcattctaccggttctttcttgcaaagcgcacctgttgaactgacgacagtcagtgggtaccaggagtttttgaagaagcaagagaaaaagaactatgaaattcaaacagttttaagcgaggataaatcacatggttatgtgctaaaggacggcgaagtcatcgctaatatcattggtgaggccaaagattatcttttggatttggccggccaggcttga

SEQ ID NO: 75516 - DNA, 2838 bp, Saccharomyces pastorianus
atgtcgcagacaattacatctctagatccgaattgtgttattgtattcaataaaacttcgagtgcaaacgagaagagtttgaatgtcgaattcaaacgtttgaatatacattctattatcgaacctggccatgatctgcaaacaagctatgcgtttattagaatccatcaggataatgcgaaaccgcttttttcatttttgcagaatctggacttcattgaatccatcataccatatcatgatactgaattgtccgatgatttgcataaactgatttctatcagcaaatcaaaaatactggaggctccaaaacagtatgagttgtacaacctatcgaatttgaccaataatcccaaacaatccttatattttgcattcttacagaactatataaaatggttgattcccttctccttttttggattatcaattagatttttatctaattttacgtatgaattcaattccacatactcgctgttcgccatcctatggacattgtcatttacagccttttggctttataaatatgaaccattttggtctgatagactgagtaaatactcatcattttctaccattgagtttcttcaagataaacagaaagcccaaaaaaaagctagttcggttatcatgttgaagaaatgttgttttattcctgtggctttgttgtttggcgcaatattactatcattccagctatattgttttgcgttggaaattttcatcaagcaaatttataacggcccaatgatttccatcttatcttttttgcctactatacttatttgcacgtttactccggttttaactgtgatttacaacaaatatttcgtagaaccaatgacaaagtgggaaaatcatagcagtgttgtgagtgcaaagaaatctaaggaagctaagaactttgttattatttttctatccagttacgttcccctattaattacactatttctttatctcccaatggggcatttgttgaccgcagaaataagaactaaggttttcaatgccttttcaatattggcccgtttacctacccatgattcagattttattattgatacaaagcgctatgaagatcaatttttctactttattgttatcaaccaactgattcaatttagcatggaaaactttgttccaagccttgttagcattgctcagcagaaaattaatggaccaaatcctaactttgtcaaagctgagagtgaaatcggtaaagctcaactcagctcatcagatatgaaaatttggtcaaaggttaagtcgtaccaaacagacccctggggagcaacatttgatttggacgccaacttcaaaaagcttcttctacaattcgggtatcttgttatgttttctacaatttggccactagctccatttatctgtttgatagtcaatttgattgtttaccaagtcgatttgaggaaagctgtgctttatagtaaacctgagtatttttcatttccaatctacgataagccatcctctgtgtctaatacccaaaaactgacggttggtctatggaactctgtcttagttatgttctccatcttaggttgtgttatcactgctactttgacctatatgtaccagagctgtaatataccaggtgtcggcgctcatacttccatccatacgaataaagcttggtacctagcaaatccaataaaccactcgtggataaatattgtactatatgctgtttttattgagcatgttagtgttgctattttcttccttttctctagtattttgaaatcttcccatgatgacgttgcaaatggcattgtgccaaagcatgtagttaacgtgcaaaacccaccaaaacaagaagtctttgaaaaaattccctcccctgaatttaattcgaataacgaaaaagaactagttcaaagaaaagggtctgcgaatgagaagttgcaccaagaactcggtgagaaacagcctgcctcttctgccaatggatatgaggcacatgctgccactcatgccaacaatgatcggtcttctttatcctcagcctcctcgccttcattatcttcttcttcttctagcagcaaaaccggtgtagtcaaagctgttgataacgatacagccggatctgctggtaaaaagccattggccacagaaagtactgaaaaaagaaattctttgatgaaggtgcctaccgttggctcatatggtgttgcgggcgccactttaccagaaacaattccaacatctaaaaattactacttaaggtttgatgaggacggtaaatccattagggatgcgaaatctagtgcagaatcttccaacgccaccaataacaataccttaggcacggaaagtaagcttttgccagatggtgacgccgttgatgcactaagtagaaaaattgatcaaatacccaaaattgctgttactggtggcgaaaataacgaaaatacccaggccaaagacgatgctgccactaagactccactaattaaagatgcaaatattaagcctgttgtcaacgcagctgttaacgataaccaatcgaaggtttcagtggctactgaacaaacaaaaaagactgaagtaagcacgaaaaatggcccatcaagatctatttccacgaaggaaactaaggattctgcgagaccatctaataacaatactactactactactacagatgctactcagccccaccaccatcatcaccaccaccgccatcgtgatgctggagtgaagaatgtcacgaacaattctaagacaaccgaatcctcttcctcttcatcggcggcaaaggaaaaaccaaaacataaaaaggggctattgcataagctgaaaaagaagctttaa

SEQ ID NO: 75517 - DNA, 1065 bp, Saccharomyces pastorianus
atgtcattgtgggtagataaatacagacctaagtccttgaatgctctttcacataatgaagagttgacaaattttctaaaatcgttatctgatcagcctcgtgatttacctcatcttttactgtatggaccaaatggtacaggtaagaaaacgcgttgtatggcattattggagtccatatttggacctggagtctatagattgaaaattgatgtcagacaatttgtcactgcttcgaacagaaaactagaactgaatgtggtcagctcgccataccatttagagatcacgccaagtgatatgggtaacaatgatagaattgtcatccaagaactattgaaagaagtggctcaaatggaacaagtggactttcaagattctaaggatgggcttgcccatagatataagtgtgttattatcaacgaggcgaactcgttaacaaaagatgctcaagctgctttaagacgtaccatggaaaaatactccaaaaacattaggttgataatggtctgcgattcgatgtcgcctataattgctcctatcaaatcccgttgtctgttgattcgttgtcctgcaccaagcgatagcgaaatttcaactattttgtctgatgtggtgacaaatgaaagaatacaactagaaacaaaggatattttaaaaagaattgctcaggcatcgaatggaaacttgcgagtctccctattaatgcttgaatctatggcactaaacaacgaattagcattgaaaagcagtagccctataataaaaccagattggattatagtgatccataaattaacgaggaaaatcgttaaagagagatctgtcaactctttaatcgagtgcagagctgtcctatacgatttactagctcattgtatacctgccaatatcatcttaaaggaactaacgttttctttgttggatgtggaaaccctgaataccacgaataaatcgtccataattgaatactcaagtgtttttgacgaaagattatcacttggaaacaaagcaatattccatttggaagggttcatagcaaaagtcatgtgctgtttagattaa

SEQ ID NO: 75518 - DNA, 777 bp, Saccharomyces pastorianus
atgttagaagcaaaatttgaagaagcatcccttttcaagagaataattgatggtttcaaagattgtgtccagttggtcaatttccaatgtaaagaagatggtatcattgcacaagctgtcgatgactcaagagttctattggtctccttggaaataggtgtcgaagccttccaagaatatagatgtgaccatcctgttacgttaggtatggatctaacctcactaagtaaaatcctacgttgtggtaacaacaccgatacattaacactaattgctgacaacacaccggattccatcatcttattatttgaggataccaagaaagaccgtatagccgaatactctctgaaattgatggatatcgatgctgatttcttaaagattgaagaattacagtacgactccaccctgtcattgccatcttccgaattctctaaaattgttcgtgacttgtcccaattgagtgattctattaatatcatgatcaccaaagaaacaataaagtttgtagctgacggtgatatcggatcaggttcagtcataataaaaccattcgtggatatggaacatcctgaaacaagcatcaaacttgaaatggatcaacctgtcgacttgacgttcggagctaaatatttattggacatcattaagggctcctccctttctgatagagttggtatcaggctctccagcgaagctcctgctttattccaatttgatttgaagagtgggttcctacagtttttcttggctcctaaatttaatgacgaagaataa

SEQ ID NO: 75519 - DNA, 600 bp, Saccharomyces pastorianus
atgcttgtttcaggatgttccatatccacgaatggttttattatgactgaacctgatccgatatcaccgtcagctacaaactttattgtttctttggtgatcatgatattaatagaatcactcaattgggacaagtcacgaacaattttagagaattcggaagatggcaatgacagggtggagtcgtactgtaattcttcaatctttaagaaatcagcatcgatatccatcaatttcagagagtattcggctatacggtctttcttggtatcctcaaataataagatgatggaatccggtgtgttgtcagcaattagtgttaatgtatcggtgttgttaccacaacgtaggattttacttagtgaggttagatccatacctaacgtaacaggatggtcacatctatattcttggaaggcttcgacacctatttccaaggagaccaatagaactcttgagtcatcgacagcttgtgcaatgataccatcttctttacattggaaattgaccaactggacacaatctttgaaaccatcaattattctcttgaaaagggatgcttcttcaaattttgcttctaacattttttctctcttttga

SEQ ID NO: 75520 - DNA, 300 bp, Saccharomyces pastorianus
atggccgcaactaaagaagcaaagcaaccaaaggaaccaaagaagaggaccaccaggagaaagaaggatcctaacgcccctaagaggggcttgtcagcttatatgttctttgctaatgaaaacagagacattgtccgttccgagaatcctgacgtaacttttggccaagtaggcagaatattgggtgagaggtggaaggccttaactgctgaagaaaagcaaccctatgaatctaaggctcaagcagacaagaagagatacgaatctgaaaaggaattgtacaatgctacacgtgcttga

SEQ ID NO: 75521 - DNA, 330 bp, Saccharomyces pastorianus
atgtcgttctttttaaatagtctaaggggcaaccaggaggtctcgcaagagaagctagacgttgcaggagtgcaattcgatgcgatgtgctcgactttcaacaatatcctcagtacgtgtcttgagaaatgtattccgcatgagggctttggtgagcctgatctaacgaaaggtgagcaatgctgcatagacagatgtgtggcaaagatgcattacagcaatcgcctcattggaggatttgtacaaacacgaggtttcgggccagagaatcagctacgacattattcgcgatttgtggccaaagaaatagctgatgattccaaaaaatag

SEQ ID NO: 75522 - DNA, 1404 bp, Saccharomyces pastorianus
atgtttaaatctgttgtttattcaattttagccgcttctttggccaatgcaggtaccattcccttaggcaaactagccgatgtcgacaagattggtacccaaaaagatatcttcccatttttgggtggtgccggaccatactactctttccctggcgactatggtatttctcgtgatttgcctgaaggttgtgaaatgaagcaactgcaaatggttggtagacatggtgaaagataccctactgtcagtctggctaagactatcaagagtacatggtataagttgagcaattacactcgtcaattcaacggctcattgtcattcttgaacgatgattacgagtttttcatccgtgatgacgatgatttggaaatggaaaccacttttgccaactcggacgatgttttgaacccatacactggtgaaatgaacgccaagagacatgctcgtgacttcttggctcaatacggttacatggtcgaaaaccaaaccagtttcgccgtttttacctctaattctaagagatgtcatgacactgctcaatatttcattgatggtttaggtgaccaattcaacatcaccttgcagactgtcagtgaagctgaatccgctggtgccaacactttgagtgcttgtaactcatgtcctgcctgggactacgatgccaatgatgacattgtaaatgaatacgacacaacctacttggatgacattgccaagagattgaacaaggaaaacaagggtttgaacttgacctcaactgacgctagtactttattctcgtggtgtgcatttgaagtgaacgccaaaggttacagtgatgtctgtgatattttcaccaaggatgaattagtccattactcctactaccaagacttgcacacctattaccatgaaggtccaggttacgatattatcaagtctgtcggttccaacttgttcaatgcctcagtcaaattattaaagcaaagtgagattcaagaccaaaaggtttggttgagttttacccacgataccgatatcctaaactttttgaccaccgctggtataattgacgacaaaaacaacttaactgccgaatacgttccattcatgggcaacactttccacagatcctggtacgttcctcaaggtgctcgtgtctacaccgaaaaattccaatgttctaacgacacctacgtcagatacgtcattaacgatgctgtcgttccaattgaaacctgttccactggtccagggttctcttgtgaaatcaatgacttctacgactatgctgaaaagagagtagccggtactgacttcctaaaggtctgtaacgtcagcagtgtcagtaacgtcaccgaattgaccttctactgggactggaatactactcactacaatgataccctattaaaacaataa

SEQ ID NO: 75523 - DNA, 1362 bp, Saccharomyces pastorianus
atgacagcatctcctgcaaaaaagaggttgagaaacaaatatctcagctgttgcttcttgttgatcgagatgactattaggagtagtatgaaaaacaacgcagaattggaaagcaagagtgtgttagctaatgaatcgaatataattagcacatttactagaaggataataaaggaaaaaagcggtaactatcaggtactgaaaagatcccttgatggaaaactaatctatcctgaggccactggcatatcctctaacagaggtaacaaacttttgcagagaagcgaagtagtaacaagaagagacttgaacaattctaagccaatgattgagcaaactgtgttctataacggttcggagcatcgccttctgcaaacaaatattgtcactgatagtagacgcaaaagaataaaattcacacctgacatcaacgtcgagcctgttttagtcggtgatgaaaacgacatcgatggtagtgagaaggaagacgaaaatatcactgatgagtattacggcgaagaagacgatgacgacctatcaaaactagtgaatgtaaaggagattttgactcccattctttccctaggggatataataaatcataaaactatctcaaggacattttcaagcccaattttgaaaaatttagccttgcaaataattctaatgattgaaaaagaacagatgtcagttgttagatattcccagtttttggaggtttttttaggagatcatcctgaaccaatttatgaatctaacttgaacctaccatcttataatcacaatttgacccttccagaggatagaggggcaagcgacgaggatgacattaacaacaaaaacaatatcaacgaggttaactcgaatagtttgtctactgaagctggtcatatcaataatggcatggaagaatttggagaggaagatcctttttttgcattgccaaggttggaacaatctaatgcgctgttatcgttgctgccatcttcttccggttctgcttctatatcaacattaacagcggccgaacaacaacagttaaatgaggaaattgagtctgcccgacagctgtcgcagattgcactacagaggaataaagaattcataagaaacttacaaaaaatcagaaaatctgtaataaaagccaatagaataagaggtaggattttaaattggagtcgggaatatttgggtatatctgacgatgatattactatcccggtggctctacgtgttgtgaagagaggtctgatcagtgctacaacaaataagacaacaaatttcgaggaagaaattgaaaataccatggaagacggtgttgtagacgataatgaaccagatgaagaagctaatagagcctaa

SEQ ID NO: 75524 - DNA, 693 bp, Saccharomyces pastorianus
atgggtgtttgcactatttttaggtggctctttgctgcttacttgctctcttcatataagtcgcttcctggggcatattttgttaggttttattattatgttattcaaaacttgttcttgcctatgtttacagggtttgaaaccgagaatattaagaaacttgagaaaaatgaatatggctgtttctcgtacaccagcctagatacctatgcctctccattcgaatgtgacttctactttcataagagcaatagcacctattttgcggaattggacatttcaagaggtaatctcatgtgcaagatttttcaaaaattgatgctgaattccaagcattatccatatattccagttgcgaacgttttcactaatttcttgaaggaaatcaagccttttcaaaagtactcggtttcatcaaggattatctgttgggatgagaaatggatttacgtcatgagtagattcacaattaaaaagggcaccgtcttatgctcattatcattgaccaaatacgtccttaaggacggtagaaagaccatcaaaccaaaggatgctcttgaatactgtggtttatataatgagaaggtcgccaaaatttctgaggacaatctaaagcttttaaccgagcgttgtggcttccacgagacagtaccattggaaaacttgagccaagagtactgttcagaaatctaa

SEQ ID NO: 75525 - DNA, 384 bp, Saccharomyces pastorianus
atgcgctgttttccaattaatgacactaggttcggcagagaattaataaactccatatgtgaatttacagtatgtattttgacatgccattctctatcaatgaagcgcaatcgttgctctaaatcaaatttttttatccctaattttccaacttggcttgattttttacttctcggtcttaaagcttcttctgttcctgacaatcgttgttctaccctagctttgtacttttcattttctaattggaaaatagctcttttgagtttatttatatcgcttagtataagaatcacatgttttccattctttgagaaaaatcgtatcttcctatataattctttcttttgtgaagtgtattgttcaaaaaattcttgcgcatcataa

SEQ ID NO: 75526 - DNA, 873 bp, Saccharomyces pastorianus
atggaaaagctattacagtggtctattgcaaattctcaaggggacaaagaagctatggctagggccggccaacctgatcctaaattgctacagcagttattcggtggtggtggtcctgacgatccaaccctaatgaaagaatccatggctgttattatgaatccggaggttgacttagaaacaaaacttgttgcatttgacaactttgaaatgttgattgagaacttagataatgctaataatatcgaaaatttaaaactgtgggagccattgttggatgttcttgttcagacgaaggatgaagaactacgtgctgctgctttatccattattggtacggctgtgcaaaataacttggattcgcaaaataatttcatgaaatacgacaatggtctgcgaagccttatcgaaatagctagtgacaagacaaagccactcgacgtgagaacaaaagctttttacgcactatctaatctaataagaaaccataaagatatctcagaaaagttttttaaattaaatgggctcgactgcatagcacctgtattaagtgataacaccgccaaaccaaaactgaaaatgagagccattgccttattgaccgcatatttgtcatctgttaagattgatgaaaatataatcagtgtgctgagaaaggatggagtaattgaaagtacgattgagtgcttgtctgacgagagtaacttgaacatcatagatagagttctgtcttttctctctcacctgatatcttccggaataaaatttaatgaacaggaattgcacaaattgaacgaaggttacaaacatattgagcctctaaaggacagacttaatgaagacgattatttagccgtaaagtatgtattatga

SEQ ID NO: 75527 - DNA, 2262 bp, Saccharomyces pastorianus
atggttgagttttctttgaagaaggccagaaacaattggaagcatgtaaagaagtctgcaagctctcctgctaagcaaaagacacctccatcgcctgctaagcctaaacaaaaaacaaaaaagaacccttatagtgatctcaaggatccggctaccagttatacgctaccaacaatcaatgcaagggagagaagtagggtagcaacttcaatgcagagaagactatcaattcataatacaaattatgctccacctacactagattactcaatgcccctacctgatatgccaaacatgatagttcccaatgataatgtggatagtagtcataataatagtagtttcaccactgagaacgaatcgttaagctctaaaggcccttccaacagtttaaatctttcaactgccgatctctccctgaacgacagctcctataataaagtgcctgctagatcagcaatgcgaaatactgtcaatccttccggcagtaatgatcctttcaataatagcacgtcgctaagaaagatgttggcaaacccgcattttaatgctaaagattttgttcatgataaactaggcaatgcgagtgccattactattgataaatttacctcaaatttaacagatttatcgatacaggtccaagaagaagtaaagttaaatatcaataaatcatataacgaaatcatgacggtaaacaacgacctaaatgttgctatgttggagcttaaaagggttagagcaaatataaatgatttaaacgaggttttggatcagtgcaccaaaatagctgaaaaaaggttacaattgcaggatcaaatagatcaagagagacaaggcaattttaacaatgttgaaagtcattctaatagtccagcgttacttccgcctttgaaagcaggacaaaatgggaatctcatgaggagggacagatcgagcgtcttgatattagagaaattttgggatacggaactggatcagctgtttaagaacgttgaaggtgctcagaagtttatcaattctacgaaaggaagacatattttaatgaatagtgccaattggatggaattaaatactaccactggtaaacccttgcagatggtacagattttcattttgaatgatttggtacttatcgccgataaatcaagagataagcaaaatgactttatagtaagccagtgctatcctttaaaggatgtcactgtcacgcaagaggaattttccactaagaggctacttttcaagtttagcaattcgaattcaagtttgtatgaatgtagagacgcagacgaatgctctaggttgttggacgttataagaaaggctaaggatgatttgtgcgacatattccatgtagaagaggagaactctaaacgtattagagagtcctttagatatttgcaatctacgcaacaaaccccaggtagagaaaacaacagaagccctaacaaaaacaaaagacgtagtatggggggttcaatcactcctggccgaaatgtaacaggcgcaatggatcaatatcttttgcagaacctaactctatcaatgcattcgaggccaaggtccagagatatgagttcaaccgcccagaggcttaaattcctggatgaaggcgtggaagagatagatattgaattagctaggcttaggtttgaaagtgccgtggaaacattattggatattgaatcacaattggaggatctttctgaaagaatttctgatgaagagttaatgttacttaacctgatatctttaaaaatcgaacaaagaagagaggccatttctagcaaactttctcagagcattttatcatcgaatgaaatagtgcatttgaaaagcggtactgaaaatatgattaagttaggattaccagagcaagctcttgacctattcttacagaatagatctaatttcattcaagatttgattctacagattggatcagtggacaatcctacgaactatttgactcaattggctgttatcaggttccaaaccattaaaaaaacagtggaggacttccaggatattttcaaagaactcggggctaagatttcttccatcctagtagattggtgtagcgacgaagtggataatcacttcaaattgatagacaagcaattactgaatgatgaaatgttatccccagggtccattaagtcatccagaaaacagatagatggattgaaggccgtaggtttggattttgtctacaaattggacgagtttatcaaaaagaacagtgataaaattcgctaa

SEQ ID NO: 75528 - DNA, 144 bp, Saccharomyces pastorianus
atgactcttcgagattcctgcacaacgtcactcaaaggcggcccgcggcgttttccattgcgaaatttttcacttttcaccttttgtaaacaaagaaataacaataagaatgataaaattcatctgtttatgtactgtacctag

SEQ ID NO: 75529 - DNA, 990 bp, Saccharomyces pastorianus
atgagtgaagaatttcctacgccgcagcttttggatgaattggaagatcaacagaaagttaccacgccgaatgagaagagagagttaagttctaatcgtgtgttgaaggatatttttgcgggtaccatcggtggtattgcacaagttcttgtagggcaaccgtttgatacaacaaaagttaggcttcaaacagccaccacaagaacaacaacgttggaggtattgcgtaacttggtaaagaatgagggtgtgtttgcattctacaaaggtgcgttaacaccgttattgggtgttggtatatgtgtctcagtacaatttggtgtgaatgaggcgatgaaaagatttttccaaaattacaacgcttctaagaacccgaatatgagctcacaggacgtagatctttcacgttcaaatactctgccactatcccagtactacgtttgtgggttgacaggtggtgtagtcaattcattcttggcatcgcccattgaacaaataagaattcgtttgcagacgcaaacatctaatggtggagacagagaattcaaaggtccttgggactgtattaaaaaattgaaagctcaaggtggattgatgaggggtttatttcccacaatgataagagccggacatgggcttggtacatattttcttgtctacgaagcattggttgccagagaaattggtacgggactaacaagaaacgaaattcctccttggaaattatgcttatttggtgcattttccgggacaatgttgtggttgacagtatacccattggacgttgtgaaatccattatacaaaacgatgatttacgaaaacctaaatacaagaattccatttcttacgtagcaaagaccatttatgcaaaagaaggtatcagagcctttttcaaagggtttgggccaacaatggttaggtccgcgcccgttaatggtgcgacattcctgacgtttgaattagtcatgagatttctgggggaagagtag

SEQ ID NO: 75530 - DNA, 1089 bp, Saccharomyces pastorianus
atgatcaataatcctaaggtagacagtgtagcggagaaacccaaagctgtgacatcaaagcagtcggagcaagcggcttcgccagaaccaacaccagccccccctgtttctagaaatcagtatccgatcacgttcaacttgacttcaaccgcaccctttcatcttcatgaccgtcatcgctacttacaagagcaagatctttacaagtgcgcttctagggattcgttgtcttccctgcagcaactcgcccatacacctaatgggtcgacaaggaagaaatatattgttgaggaccaatctccctatagttcggaaaatccagtcattgtgacctcttcctataaccatacggtttgcacaaactacttaagaccaagaatgcagtttacagggtaccagatatcaggatacaaacgctatcaggtaacagttaacttaaagactgtagatttgccaaagaaagattgcacgtcgctgtcccctcatttatctggatttttgtcgataagaggactcacgaaccaacacccggaaatcagtacatattttgaagcctacgcggtaaaccacaaggaattagggttcttgtcctctagttggaaagatgaacctgttttaaacgaattcaaagccacagaccaaacagacttagaacactggataaatttcccctcctttagacagcttttcctgatgagccaaaaaaacggtctcaactcaactgacgacaatggcactacaaatgcagccaagaagttgcctccacagcagcttcctactacaccaagcgcagacgctggtaacatatcaagaatttttagccaagagaaacaatttgacaactacttgaacgaacggtttatatttatgaaatggaaggaaaaatttttggtaccagatgccctattaatggaaggtgtagacggcgcatcttatgatgggttttattacattgtccatgatcaagttaccgggaacattcaagggttttactatcatcaagatgctgaaaagttccaacagctggaattagtaccatctttgaaaaataaagtcgagtccagtgattgttcttttgagtttgcttga

SEQ ID NO: 75531 - DNA, 567 bp, Saccharomyces pastorianus
atgaatcctcaagtcagtaacatcatcatcatgttggtcatgatgcaactctcccgtcgcattgacatggaggacccaaccatcatcatgtacattagaattttatactgttcttccatcggtatctcttggatcatctaccaaatggccagaaagagaattgttgctaaaaacgacatgactaccatgaagtacgtcgaacctggtaatgctatgtccggcgaaggtgagaaactgcaagttactaccgtcagagactacgatttgaaggaaatagacagtgctatcaagtctatctacactggtatggctatgatgggtttcatgcatttgtacttgaaatacaccaacccattgttcatgcaatccatttctccagtgaaaagtgctctggaacacaacgaagtgaaaattcacctcttcggtaagcctgcaaccggcgatttgaagagaccattcaaggctccatctttgtttggtggtatgggtcaaactggtccaaagaccgacaagaaatctatcgaagaagctgaaagagccggtaacgctggtgttaaggctgaatga

SEQ ID NO: 75532 - DNA, 738 bp, Saccharomyces pastorianus
atgccttatacttggaagtttttaggaatcagcaagcaacttccactggaaaatggtatagcacagttgaaccaattgctaaacctggaagtagatttagacattcaaaccattcgagtacccagtgatcctgatggtggtaccgccgctgacgagtatttccgttacgaaatgaggttggacatctctaatttggatgagggcacttactctaagttcattttcttggggaactcaaaaatggaggtgccgatgtttctgtgctattgtgggacagataaccgcaatgaagtggtattgcagtggctgaaggcagagtacggtgtcattatgtggccgataaaatttgaacagaagaccatgataaagttagctgacgccagcattgtgcacgtgacgaaagagaacgtcgaacaaattacctggtttagctcaaagttatattttgaaccagaaacacaagacaaaaacttgcggcaattcagtatagaaataccgagagagagctgcgagggtttggctcttggctatggtaatactatgcacccgtataacgatgcaattgtaccctacatttataatgaaacggggatggcggtggaaagattaccgttgacttccgtcatattggcagggcacacgaaaataatgagagaatccattgtcacttcaacacgaagtctcaggaacagagttctagcagttgtactccaatcgattcagtttaccagcgagtaa

SEQ ID NO: 75533 - DNA, 444 bp, Saccharomyces pastorianus
atgtcctccaatcttaccgaagaacaaattgctgaattcaaagaagcctttgccctctttgataaagataacaatggctctatctcatcaagtgaattggccactgtgatgaggtcattgggtctttcgcccagtgaagcagaagtaaatgatttgatgaacgaaatagatgttgatggtaaccatcaaatcgaatttagtgaatttttggctctgatgtctcgtcaactcaaatcaaatgactctgaacaagaactattagaagcttttaaagtattcgataagaacggtgatggtttaatctccgccgctgagttgaaacacgtgctaacatccattggtgaaaaattgactgatgccgaagtagatgatatgctaagagaggttagtgatggatcaggcgagatcaacattcaacaattcgctgctttgttatctaaatag

SEQ ID NO: 75534 - DNA, 1350 bp, Saccharomyces pastorianus
atgtttttggaaattcctcggtggttacttgccttaataatattatatctttccataccgttagtggtttattatgttataccctacttgttttatggcaacaagtcgaccaaaaaaaggatcatcatatttgtgctgggtgatgtaggacactctccaaggatatgctatcacgccataagtttcagtaagttaggttggcaagtcgagctatgcggttacgtggaggacactctacccaaaattatttccagtgatccaaatatcaccgtccatcatatgtcaaacttgaaaagaaagggaggcggaacatcagttatatttatggtaaagaaggtgctttttcaagtcttaagtattttcaaattactttgggaattgagaggaagcgattacatactagttcaaaatccaccgagcatacccattcttccgattgctgtgctatacaagttgaccggttgtaaactaattattgattggcacaatctagcatattcgatattgcaactaaaatttaaaggaaacttttaccatcctttagtgttgatatcttacatggtagagatgatattcagcaaatttgctgattataacttgactgttactgaagcaatgaggaaatatttaattcaaagctttcacttgaatccaaagagatgtgctgttctctacgaccgcccggcttcccaatttcaacctttggcaggtgacatttctcgtcaaaaagccctaactaccaaagcctttataaaggattatattcgcgatgattttgatacagaaaaaggcgataaaatcattgtgacttcaacatcattcactcctgatgaagatattggtattttattaggtgccctaaagatttacgaaaactcttatgtcaaatttgattcaagtttgcctaagatcttgtgttttataacgggtaaaggaccactaaaggagaaatatatgaagcaagtagaagaatatgactggaagcgctgtcaaatcgaatttgtgtggttgtcagcagaggattacccaaagttattacaattatgcgattacggagtttccctgcatacttcaagttcagggttggacctgccaatgaaaattttagatatgtttggctcaggtcttcctgttattgcaatgaactatccagtgcttgacgaattagtacaacacaatgtaaatgggttaaaatttgttgatagaagggagcttcatgaatctctgatttttgctatgaaagatgctgatttataccaaaaattgaagaaaaatgtaacgcaggaagctgagaacagatggcaatcaaattgggaacgaacaatgagaggcttgaagctaattcattga

SEQ ID NO: 75535 - DNA, 696 bp, Saccharomyces pastorianus
atgtttttgagaaacggtagacttatttccctcaattcaaggagactatttagaaccatgagcaccgtcaagggtaaaccagaagatgctaaaataattgaaacccgtcacgttaaagaaacatctgactgcaagtggatcggtttacaaaaaattatctacaaagatcccaacgggaaggaaagggaatgggatagcgcagtccgcaccactagaagttccggtggtgtagacggcattggtatcttaaccattctaaaatacaaagatggaaaacctgatgaaattttgctacaaaagcagtttcgccctcccgttgagggcgtatgcattgagatgccagccggtttgatagatgcgggtgaagatattgacactgctgccttaagagaattaaaagaagagactggttacagtggtaaaataatttctaaaagcccaacagtttttaacgatcctggtttcacaaacaccaacctctgtctggttactgtcgaagttgttatgagtttacctgaaaaccaaaaaccagttactcaattggaagataatgaatttatcgaatgctttagcgtcgagttgcacaagtttcctgatgaaatggttaagttggatcaacaaggctacaagttggatgcacgtgttcaaaacgtagctcaaggtatcctcatggccaagcaataccacatcaaatag

SEQ ID NO: 75536 - DNA, 4179 bp, Saccharomyces pastorianus
atgactaacgaaaaggtctggatagagaagttggataatccaactctttcagtgttaccacatgactttttacgcccacaacaagaaccttatacgaaacaagctacatattcgttacagctacctcagctcgatgtgcctcatgatagtttttctaacaaatacgctgtcgctttgagtgtatgggctgcattgatatatagagtaaccggtgacgatgatattgttctttatattgcgaataacaaaatcttaagattcaatattcaaccaacgtggtcatttaatgagctgtattctacaattaacaatgagttgaaccagctcaattctattgaggccaatttttcctttgacgagctagctgaaaaaattcaaagttgccaagatttggaaaggacccctcagttgttccgtttggcctttttggaaaaccaagatttcaaattagacgagttcaagcatcatttagtggactttgctttgaatttggatactagtaataatgcgcatgttttgaacttaatttataacagcttactgtattcgaatgaaagagtaaccattgttgcggaccaatttactcaatatttgactgctgcgctaagcgatccatccaattgcataactaaaatctctctgatcaccgcatcatccaaggatagtttacctgatccaactaagaacttgggctggtgcgatttcgtggggtgtattcacgacattttccaggacaatgctgaagccttcccagagagaacctgtgttgtggagactccaacactaaattccgacaagtcccgttctttcacttatcaggatatcaaccgcacgtctaacatagttgctcattatttgattaaaacgggtatcaaaagaggtgatgtagtgatgatctattcttctaggggtgtggatttgatggtatgtgtgatgggtgtcttgaaagccggcgcaaccttttcagttatcgaccctgcatatcccccagccagacaaaccatttacttaggtgttgctaaaccacgtgggttgattgttattagagctgctggacaattggatcaactagtggaagattacatcaatgatgaattggagattgtttcaagaatcaattccatcgctattcaagaaaatggtaccattgaaggtggcaaattggacaatggcgaggatgttttggctccatatgttcactacaaagataccagaacaggtgttgtagttggaccagattccaacccaaccctatctttcacatctggttccgaaggtattcctaagggtgttcttggtagacatttttccttggcttattatttcaattggatgtccaaaaggttcaacttaacagaaaatgataaattcacaatgctgagcggtattgcacatgatccaattcaaagagatatgtttacaccattatttttaggtgcccaattgtatgtccctactcaagatgatattggtacaccgggccgtttagcggaatggatgagtaagtatggttgcacagttacccatttaacacctgccatgggtcaattacttactgcccaagctactacaccattccctaagttacatcatgcgttctttgtgggggacattttaacaaaacgtgattgtctgaggttacaaaccttggcagaaaattgccgtattgttaatatgtacggtaccactgaaacacagcgtgcagtttcttatttcgaagttaaatcaaaaaatgacgatccaaactttttgaaaaaattgaaagatgtcatgcctgctggtaaaggtatgttgaacgttcagctactagttgttaacaggaacgatcgtactcaaatatgtggtattggcgaaataggtgagatttatgttcgtgcaggtggtttggcagaaggttatagaggattaccagaattgaataaagaaaaatttgtgaacaactggtttgttgaaaaagatcactggaattatttggataaggataatggtgaaccttggagacaattctggttaggtccaagagatagattgtacagaaccggtgatttaggtcgttatctaccaaacggtgactgtgaatgttgcggtagggctgatgatcaagttaaaattcgtgggttcagaatcgaattaggagaaatagatacgcacatttcccaacatccattggtaagagaaaacattactttagttcgcaaaaatgccgacaatgagccaacattgatcacatttatggtcccaagatttgacaagccagatgacttgtctaagttccaaagtgatgttccaaaggaggttgaaactgaccctatagttaagggcttaatcggttaccatcttttatccaaggacatcaggactttcttaaagaaaagattggctagctatgctatgccttccttgattgtggttatggataaactaccattgaatccaaatggtaaagttgataagcctaaacttcaattcccaactcccaagcaattaaatttggtagctgaaaatacagtttctgaaactgacgactctcagtttaccaatgttgagcgcgaggttagagacttatggttaagtatattacctaccaagccagcatctgtatcaccagatgattcgtttttcgatttaggtggtcattctatcttggctaccaaaatgatttttaccttaaagaaaaagctgcaagttgatttaccattgggcacaattttcaagtatccaacgataaaggcctttgccgcggaaattgacagaattaaatcatcgggtggatcatctcaaggtgaggtcgtcgaaaatgtcactgcaaattatgcggaagacgccaagaaattggttgagacgctaccaagttcgtacccctctcgagaatattttgttgaacctaatagtgccgaaggaaaaacaacaattaatgtgtttgtcaccggtgtcacaggatttctgggctcctacatccttgcagatttgttaggacgttctccaaagaactacagtttcaaagtgtttgcccacgtcagggccaaggatgaagaagctgcatttgcaagattgcaaaaggcaggtatcacctatggtacttggaacgaaaaatttgcctcaaatattaaagttgtattaggcgatttatctaaaagccaatttggtctttcagatgagaagtggatggatttggcaaacacagttgatataattatccataatggtgcgttagttcactgggtttatccatatgccaaattgagggatccaaatgttatttcaactatcaatgttatgagcttagccgccgtcggcaagccaaagttctttgacttcgtttcctccacttctactcttgacacagaatactactttaatttgtcagataaacttgttagcgaagggaaaccaggcattttagaatcagacgatttaatgaactctgcaagcgggctcactggtggatatggtcagtccaaatgggctgctgagtacatcattagacgtgcaggtgaaaggggcctacgtgggtgtattgtcagaccaggttacgtaacaggtgcctctaccaatggttcttcaaacacagatgatttcttattgagatttttgaaaggttcagtccaattaggtaagattccagatatcgaaaattccgtgaatatggttccagtagatcatgttgctcgtgttgttgttgctacgtctttgaatcctcccaaagaaaatgaattggccgttgctcaagtaacgggtcacccaagaatattattcaaagactacttgtatactttgcacgattatggttacgatgtcgaaatcgaaagctattctaaatggaagaaatcattggaggcgtctgttattgacaggaatgaagaaaatgcgttatatcctttgctacacatggtcttagacaacttacctgaaagtaccaaagctccggaactagacgataggaacgccgtggcatctttaaagaaagacaccgcatggacaggtgttgattggtctaatggaataggtgttactccagaagaggttggtatatatattgcatttttaaacaaggttggatttttacctccaccaactcataatgacaaacttccactgccaagtatagaattaactcaagcgcaaataagtctagttgcttcaggtgctggtgctcgtgggagctccgcagcagcttaa

SEQ ID NO: 75537 - DNA, 528 bp, Saccharomyces pastorianus
atgcagccaaaaaattgtacgatactaaaaaaatcaaagcaagagttgtttccctgccagacttttatacttttgacaggcaaagtgaagaatacagattctctgttctaccagacggtgttccgatcatgtcctttgaagtattggctacttcaagctggggtaagtatgctcatcaatcgttcggactcgacgaatttggtcgttcaggcaaggggcctgaaatttacaaattgttcgatttcacagcggacggtgttgcgtcaagggctgaaaagacaatcaattactacaaaggaaagcagttgctttctcctatgggaagagctttctaagtctgaagaagtaaacagttctttgctatttcacacttcctggttgatggtcacttgctgcctgaaatatatatatatgtatgtcatatgtacttgttttcttttttgtgcctttgttacgtctatattcattgaaactgattattcgattttcttcttgctgaccgcttctagaggcatcgcacagttttag

SEQ ID NO: 75538 - DNA, 1377 bp, Saccharomyces pastorianus
atgggtaaagagaagtctcacattaacgttgtcgttatcggtcatgtcgattctggtaagtctaccactaccggtcatttgatttacaagtgtggtggtattgacaagagaaccatcgaaaagttcgaaaaggaagccgctgaattaggtaagggttctttcaagtacgcttgggttttggataagttaaaggctgaaagagaaagaggtatcactatcgatattgctttgtggaagttcgaaactccaaagtaccaagttaccgttattgatgctccaggtcacagagatttcatcaagaacatgattactggtacttctcaagctgactgtgctatcttgattattgctggtggtgtcggtgaattcgaagccggtatctctaaggatggtcaaaccagagaacacgctttgttggctttcaccttgggtgttagacaattgattgttgctgtcaacaagatggactccgtcaaatgggacgaatccagattccaagaaattgtcaaggaaacctccaactttatcaagaaggttggttacaacccaaagactgttccattcgtcccaatctctggttggaacggtgacaacatgattgaagctaccaccaacgctccatggtacaagggttgggaaaaggaaaccaaggccggtgtcgtcaagggtaagactttgttggaagccattgacgccattgaacaaccatctagaccaactgacaagccattgagattgccattgcaagatgtttacaagattggtggtattggtactgtgccagtcggtagagttgaaaccggtgtcatcaagccaggtatggttgttacttttgccccagctggtgttaccactgaagtcaagtccgttgaaatgcatcacgaacaattggaacaaggtgttccaggtgacaacgttggtttcaacgtcaagaacgtttccgttaaggaaatcagaagaggtaacgtctgtggtgacgctaagaacgatccaccaaagggttgcgcttctttcaacgctaccgtcattgttttgaaccatccaggtcaaatctctgctggttactctccagttttggattgtcacactgctcacattgcttgtagattcgacgaattgttggaaaagaacgacagaagatctggtaagaagttggaagaccatccaaagttcttgaagtccggtgacgctgctttggtcaagttcgttccatctaagccaatgtgtgttgaagctttcagtgaatacccaccattaggtagattcgctgtcagagacatgagacaaactgtcgctgtcggtgttatcaagtctgttgacaagactgaaaaggccgctaaggttaccaaggctgctcaaaaggctgctaagaaataa

SEQ ID NO: 75539 - DNA, 2004 bp, Saccharomyces pastorianus
atgagtgtagaagatatcaagaaggctagagccgctgttccatttaacagagaacagctagaaagtgttttgagaggaagatttttttatgccccagcttttgacttgtacggtggagtttctggtttatatgactatggtccaccaggttgtgcattccaaaacaacatcattgacgcctggagaaagcattttattttggaagaagatatgttggaagttgattgtactatgttaactccatatgaggttttgaagacctcaggtcatgttgacaaattttctgattggatgtgtagagatttgaagactggtgagattttcagagctgaccatttagtcgaagaagttttggaagctcgcttaaagggtgaccaagaagctagaggtttagtcgaggatgctaatgccgctgctaaggacgatgccgaaaagaagaagagaaagaaaaaagttaaacaaattaaagcagtcaaattggatgacgacgttgtcaaagaatatgaagaaattttggctaaaatagatggttattccggcccagaattaggtgaattgatggaaaaatacgatatcggtaacccagtcaccggagaaactttagaatctccaagggcttttaacctgatgtttgaaacggctattggcccatctggtcaattaaagggttacttgaggccagaaactgcccaaggtcaattcttgaattttaacaagttgttagaatttaacaacagtaagaccccttttgcctcagcctctatcggtaaatcatttagaaatgagatttccccaagggccggtttattaagagtccgtgaatttttgatggcagagattgaacatttcgttgacccattggacaaatctcatccaaaatttaatgaaatcaaagacatcaagctttcctttttgcctcgtgatgttcaagaagctggttctactgaaccaattgtcaagacagttggtgaagcagtcgcttcaagaatggtcgataatgaaactttgggttactttattgccagaatttaccaatttttgatgaaaattggtgttgatgagtccaaattgagattccgtcaacatatggctaatgaaatggcacattatgctgctgactgttgggatggtgaattgaagacatcttatgggtggattgaatgtgtcggatgtgctgatagatctgcctatgatttgaccgttcattccaaaaagaccaaagaaaaattggttgttagacaaaaattagataatccaattgaagtcaccaagtgggaaattgatttgacgaaaaaattgtgcggtccaaaattcagaaaagatgcaccaaaagttgaatctcatctattgaatatgtctcaagatgacttggcttccaaggccgagttattgaaggcaaatggcaagtttactataaaggttgatggtgttgatggcgaagtcgagttggacgataaattggttaaaatcgaacaaagaacaaaggttgaacacgttagagaatatgttcctagtgtcattgaaccatctttcggtattggccgtatcatctactccgtttttgagcactctttctggaacagaccagaagacaatgccagaagtgttctttccttcccacctttggttgctccaacaaaggttcttttagttcctctatctaaccacaaagatttagttcctgttactactgaagttgccaaaattttaagaaagtctcaaatcccatttaagattgatgattctggagtttccattggtaaaagatatgcccgtaatgacgaattaggtactccattcggtgtcaccattgactttgaatctgccaaagaccattctgtcactttgagagaaagagattccaccaagcaagttagaggttccgtcgaagatgtcatcaaggctatccgcgatatcacttacaatggtgcttcttgggaagaaggtaccaaggatttgactccttttattgcccaagctgaagctgaagctgaaactgactaa

SEQ ID NO: 75540 - DNA, 159 bp, Saccharomyces pastorianus
atgaaatcaaagacatcaagctttcctttttgcctcgtgatgttcaagaagctggttctactgaaccaattgtcaagacagttggtgaagcagtcgcttcaagaatggtcgataatgaaactttgggttactttattgccagaatttaccaatttttga

SEQ ID NO: 75541 - DNA, 360 bp, Saccharomyces pastorianus
atgcccccacacatttttatagccttctgtatactagagtgttttgtggagacattaagtggcaattctaaacttggaattctgggcaggtctaacgtaaattcatctgctattaacggtggggcctggtccgcgctagaatctggaattgatgaaagtgtagcaagaggctcctccactggcattttcacgatttggaagatattttcgctcttgaaagctatagagatcaattatgtttttcccttggtataccttttctgtgttgtctttcagttcctgtctttaggatgttatttatcgatctttttcagaaagaccaaaagcgaagaagcgaagaagaggacttctctgtactaa

SEQ ID NO: 75542 - DNA, 1488 bp, Saccharomyces pastorianus
atgactacggataacgctaaggcgcaactgacctcgtcttcagggggtaacattattgtggtgtccaacaggcttcccgtgacaatcactaaaaacagcagtacgggacagtacgagtacgcaatgtcgtccggagggctggtcacggcgttggaagggttgaagaagacgtacactttcaagtggttcggatggcctgggctagagattcctgacgatgagaaggatcaggtgaggaaggacttgctggaaaagtttaatgccgtacccatcttcctgagcgatgaaatcgcagacttacactacaacgggttcagtaattctattctatggccgttattccattaccatcctggtgagatcaatttcgacgagaatgcgtggttggcatacaacgaggcaaaccagacgttcaccaacgagattgctaagactatgaaccataacgatttaatctgggtgcatgattaccatttgatgttggttccggaaatgttgagagtcaagattcacgagaagcaactgcaaaacgttaaggtcgggtggttcctgcacacaccattcccttcgagtgaaatttacagaattttacctgtcagacaagagattttgaaaggtgttttgagttgtgatttagtcgggttccacacatacgattatgcaagacatttcttgtcttctgtgcaaagggtgcttaacgtgaatacattgcctaatggggtggaataccagggcagattcgttaacgtaggggccttccctatcggtatcgacgtggacaagttcaccgatgggttgaaaaaggaatccgtacaaaagagaatccaacaattgaaggaaactttcaagggctgcaagatcatagttggtgtcgacaggctggattacatcaaaggtgtgcctcagaagttgcacgccatggaagtgtttctgaacgagcatccagaatggaggggcaaggttgttctggtacaggttgcagtgccaagtcgtggagatgtggaagagtaccaatatttaagatctgtggtcaatgagttggtcggtagaatcaacggtcagttcggtactgtggaattcgtccccatccatttcatgcacaagtctataccatttgaagagctgatttcgttatatgctgtgagcgatgtctgcttggtctcgtccactcgtgatggtatgaacttggtttcctacgaatatattgcttgccaagaagaaaagaaaggttccttaatcctgagtgagttcacaggtgccgcacaatccttgaatggtgctattattgtaaatccttggaacaccgatgatctttctgatgccatcaacgaggccttgactttgcccgatgtaaagaaagaagttaactgggaaaaactttacaaatacatctctaaatacacttctgccttctggggtgaaaatttcgtccatgaattatacagtacatcatcaagctcaacaagctcctctgccaccaaaaactga

SEQ ID NO: 75543 - DNA, 207 bp, Saccharomyces pastorianus
atggctatcacccctgacaaacagaagaaagaacaacagcatcaaccacagaacggaccgctcgactatgctctgatatgcaagtgtattgcaatgttctttgtcgttgcgggcgtggtgctgatgttcttcgagaccgggttggacccagaacaaaaagagcaaatcaagcgtctccaccagttggacggcattcctcacgcttga

SEQ ID NO: 75544 - DNA, 144 bp, Saccharomyces pastorianus
atgcaagtgtattgcaatgttctttgtcgttgcgggcgtggtgctgatgttcttcgagaccgggttggacccagaacaaaaagagcaaatcaagcgtctccaccagttggacggcattcctcacgcttgatgtgcccagggtga

SEQ ID NO: 75545 - DNA, 1554 bp, Saccharomyces pastorianus
atggttttgtctgataaggagttgtttgccataaataagaaagccgtcgaacaaggtttcaatgtgaagcctagattgaactataatacggtcagtggtgtgaacggtccattagtcattttggaaaaggtcaagttcccacgttacaacgaaattgttaatttgacattgccagatggaaccgtgagacaaggtcaagttttggaaattagaggagatagagccattgtgcaagtgtttgaaggtacatctggtattgatgtcaagaagactaccgtggaattcactggtgagagtttgagaattcctgtgtctgaagacatgttgggtagaatttttgacggttctggtagacccattgacaacggtcctaaagttttcgcagaggattacttggacattaacggttctcctatcaacccatatgctcgtatttatccagaagaaatgatttctactggtgtttctgctattgacacaatgaactccattgccagaggtcaaaagatcccaattttctccgcatcaggtttaccacacaacgaaattgcagcacaaatttgtagacaggctggtttggtgagacctaccaaggatgttcatgatggtcatgaagaaaatttctccatcgtttttgctgccatgggtgtcaacttggaaaccgctagatttttcaaacaggatttcgaagaaaatgggtctttggaaagaacttcattatttttgaacttggctaatgaccctaccattgaaagaattatcactccaagattggccttgaccaccgctgaatacctggcttaccaaacggaacgtcatgtgttgaccatcttgaccgatatgtcatcgtatgctgatgctcttagagaagtttccgctgctagagaagaagttccaggtagaagaggttatcctggttacatgtatacagatttgtccacaatttatgaaagagcaggtagagtagagggtcgtaacgggtccatcactcaaatacctatcttgacaatgcctaacgatgatattacgcatccaattccggatttgaccggttatattaccgagggtcaaatcttcgttgaccgtcaattacataacaagggtatctacccaccaatcaacgtcttgccttcgttgagtagattgatgaaatctgccatcggtgaaggtatgaccagaaaggaccacggtgacgtttctaaccaattgtatgccaagtacgccatcggtaaggacgctgctgctatgaaggccgttgtcggtgaagaggcgttatccatcgaagataagttatctttggaatttttggaaaaattcgaaaagacctttatcacacaaggcgcctacgaggacagaaccgttttcgaaagtttggaccaggcatggagtttgctaagaatctaccctaaggagatgttgaatagaatctccccaaagattcttgatgaattttacgatagagccagagacgatgccgacgaagatgaagaagatcccgacacaagaagctccggtaagaagaaggacgccagccaagaagaatctctaatctaa

SEQ ID NO: 75546 - DNA, 1035 bp, Saccharomyces pastorianus
atgcattgcccaatttgccaccatagagcgcatgtagtgtactgtgcacattgtatcaatacgagcccaagtctgctactgaagctaaaactagatttaattttattaaaggatgagaataaagaacttaacgggaaagtcgaacaaatattaaacgaggccatgaactatgaccagttagatatcaagaggatggagaaaaagaaagatcccctgatgaatagtctcatgaagttagatgttttaggaatgaaaaagaataataacctgattaggcacaggatagaacagctaaatgagcggatttatagtaaaaggaatcacatcagcgaattgaaagtagaaattgacaattataaatgttataaggtgggtactggtacggacaaattaagagagcaagtggaaattagtgatgcaaaaaataagctggcacaagtatcgaagatttgtgaatcggctagagattacaagctcaatctactaaataattggtttgtgatccagaagctgcaagataatttccaaatacctttcgctatagcttttcagccactaatatctttgaaaaacttccgtgttttacctcttgctataacaaacgattccatcaacatcatgtggaagtatattagcttcttctcagacattcttatgattaaacttccctacacaaataaaatctgtgaacaacccatgtttgagttttccgatagcatacagacagtagtacaaaggttgatcaagcttatcataaatattttacagatatgtagacatttgaaactcgtaccttcaacacccatggatatcccatggctactggaccagtacgatgtggatgggctgttctataatatggtgaaacggaacaagatgaagtgtaggtccgtctcgctatattggacttttgggatgttgtactcgatggttttggataacatgaataatccacaaagaggacatcctgcaaggcggaccgcaccacctccaacagtcacaggatctcatgaccgatggtacgtggtaggctag

SEQ ID NO: 75547 - DNA, 987 bp, Saccharomyces pastorianus
atgatagcaggtgcgactgctccgtcaagtcagcatgaaattttgatcgcatcgaatctcatcaagaagccatcaacgtctcaaaataaaacgccgacagctcaatccagttcaggtaacaatggagctgctgatggtgcaccgcagggttaccatcatcaccatcatcaccatcgtcatttatggtggcctcggacaacagaccatcaatattggtgtgtcttgaggaagaaccaatttgcctattacaaaactcgggatgaaagagaggctataagtgtcataccgagatttgacatacttaattttaagataagcgagctcgatggtatattaactgtttatactccatccaaggatttaatattcaaatttccacgagggcaaaatgagaaggttggtatggagctgatgcataattggaaaattgcccttgaaaaattcctctctagtcctagtggcaacgaaagtgtcactacaggtagtgattatgatgaagaagaggatgatgatgatttaattgtagttgacgaaaaggcgggtccttctagcagcaagcattcttgcagtttgacgatggatgagcaactgtctcgtgaagataaagaattttataggatgttcgatccaagaaatgcagagcaccaggtttgttctgggattctttacacaaaagtgaaaaagaagaaactgttcaatagggctaaatggcaaaagttcaatgtggaattgactaatacttcgttcaatttatactctttcaagactgggaagttaaagaaaagcattaaattggataaaattatcgattgtattgaacttgataataattcgaagatgaaaaatgacgacactaattttgcgctaattacatttgatgaaaggttatcttttaaagccgctaacgatcaagatatggtggattggataataaatttcaagagtggaattttgataagaaaaaaattaaaggccgaaaatatataa

SEQ ID NO: 75548 - DNA, 1278 bp, Saccharomyces pastorianus
atgtcggaccaggataatacccagacttcttcaagcaagttggcacctcaccataatatttttatggcaaacttggaaagttcccccacaaaagatagaaatacctccagccaaaatgcctcatcttcgagagtcattgaatcactgcatgaccagattgatatgctgacaaaaacaaatctacaattgactacgcaatctcaaaatttattgagtaaattggaattagcacaatccaaagaatcaaaactactggaaaatttaaatctgctgaagaacgagaacgaaaatctcaactcgatatttgaaagaaagaacaagaagctaaaggagctagagaaagattatagcgaattgagtaaccgttacaatgaacaaaaggagaaaatggatcaattgagtaaattggcgaaaaattctagtgccattgaacaatcttgctctgaaaaattgcaaaatatggaagttaactataattcattattggagtcacaaaatctttacagagaccactattctgatgaaatttccaaattaaatgaaaaaatcggtttgttggagttagagttaagtaatcaaaatttaaattatggttcagatactagttcaaattcagatatagaattgaatttaaataaattcaatgactctgtgaaagatttgaaatctctggaaacagaaaaggattcaaaattaagcaagataatcactcactctttagatgagttaaatctacaaagctggctaaatctgtaccagacgaacgaaaatctgatatcaacttttgctgaaaagatggatttgaaagacgtcttgaaaagaaacgatgagaagattagtaataaaggcgcggtagtacaaaccttgaagaagaacgtacaaacccaggtggaaagcaacaacgctgacgctttgagtagcaataatgcacaggatatgcttcctattaagatggtcaaattaagaaagacgccgaacacaaacgattcatcctccaatggtaatagcagtaacaataaaagaagaagtttctatactgcgtcgcctttgctgtcatcgggttctattccaaaatctgcatccccggttttgcctggtgttaaaagaactgcctcagtaagaaaaccaagctcgagcagtagtaaaacaaatgtaacgcataataacgatccaagtacatctcccacaatctcagtgcctcccggtgttacaagaactgtttcctccactcataagaaaaagagaaatagtatggttgttcacggggcccaatcctag

SEQ ID NO: 75549 - DNA, 2115 bp, Saccharomyces pastorianus
atgagactacactatattacggtttttgatccatcaagatctaccaacgaaaatgacactttcaagcagttgctgctgttccattattttggcactactgattcaataccctctttaaacgaaaaactgtccatcataggagtaatacagggcatttggtcacttacgagttcatgcgtaaacaaggacggcgaagatttagagaaaattattgagctgaacaatgatattattttttgtattaaggtggaatcaagatttttcatcagtctagcaatttcgaatatcagcgacgatcagagtgccatacctttacagtatctcagtgcttacttatggcttagttacaggttcttcaagctactcaatgggtcattcagcggatttaacaaggacttccgcaaactcacggatttgttgaacgaattcgttattccgttctggaatgatatttatttgaatctagaaactgtaacgaatagatcatttactgtaatgtggcctggtttttataaaagggcaaattttcaacattcctcttataatcctggagaaaaaaataatgtcgaagagtcatgggacgctataatcttgcagaatattcttttagataaaaagagttatctaggactaaaggacattttggtttaccacctaccaaagcgcaccaaagcggctaatagggagtctatgggaacaaaaacttatggactagtaaggaactttaccagtgacctgaacacattaccagatatctcaaattggctatatcatttgcactgcacctatggtgaactatcaagtcatatattaacaggaaatgtccattttaaagaggagctacaagtagaagaagaacaagagcgaagtcgtgatacaaacggaagagacgaagaggaatcacaggagcaacagcgacgggagcaccaagagactacgcaaaacaatacaagcgaactctctctatcggaaagagtgatacacaacgtaacactccccatttcttttgcatacgacgctatacatgaagtgagtaccacgactggtgtttcgggtagcttatccatgataatggactatgtaccgaagccccattggccgttcatttcatcctctaacaaaagtgccgacaaaaataattactcaaatagcaatgataacgcaaattcgaatgccccactgatgacgcaatcagaggctgttggagggacgataggcaactcgagatttggtttcctaatatccccattgaattcagacctgttgccatcatcataccaagccctgaaactgaatttgaactttgaaaactccaaagacaaggaggatttttataactgcctattttggtactttgatgattttttaattgtaattgtctgtgatccggacttcaacaagatttgtgaaagggactatctaaaggacttgagtttccaattgtgtcagagtatggaatgtctaaacaatgagattttaaactctcaaaattgcgataacgtggaatccttcgcttatgtgatcagagataatgccaccaaagaaatcgactcgtccgttccatttgggtctccaaaatttacttcggatgaaagcatttcaactttacaactagcaatcaacggtatagatcagttcattaacgataattcaaattccctatcgcttgctaattggaatccaataactattatgggtggctcaaatgctatcagcaaaaaaaatactacagaaggatttgggaacggggtaaacgataagactcaaaaatttaaaagaaaatatctgaatttcttaaatttaatgagcgcagaaaagttatgggacttacaggttgacgtcttacaattcttgactagtttacagaactcaaaaagagacccagaatattttcaggaggagaggttgttaaaattgaacaatggtgttttatgctatatcaaagaaaacaattcaaacttaattattattattaaaaactggtttcaaaataacggcacgtcaaaggctgcaaaacaaaggaaccgttttcgttcagattcctctaagggaagttcattgtttcaaagtttaggtcgtgacgtgactgactggtgggaatccagggaaatttaa

SEQ ID NO: 75550 - DNA, 1791 bp, Saccharomyces pastorianus
atgacaaaggaacgtatgaccatcgactacgaaaatgacggtgattttgagtacgataagaataaatacaagacaataaccactcgaataaagagtatcgaacctagtgagggatggttggaaccttctgggtcagtgggtcacataaacacgatacccgaagcgggcgatgttcacgtggatgaacatgaggatagagggtcttctattgatgatgactcaaggacttacctgctatattccacagaaactcgacgtaaactagaaaacaggcacgtccagttgattgctatttccggtgtcattggtacggcgctattcgtggcgatcggaaaagctttataccgtggagggcccgcctctttattattggcatttgctctttggtgtgttccaatactttgcattactgtgtctacagcggaaatggtctgctttttccctgtaagttccccctttttgagattagcaacgaagtgcgttgacgattcattggcactcatggctagctggaatttctggtttctagaatgcgtacagatccctttcgagattgtttctgttaatacaattatacattattggagagatgattattctgctggtattccgctcgccgttcaagtagttttgtatctgcttatttcaatttgtgcagtcaaatattacggtgaaatggaattttggttggcttctttcaaaattatccttgcactcggcctatttacattcacgttcattaccatgttgggtggaaatcctgaacatgatcgttacgggtttcgtaattatggtgaaagtccattcaagaaatactttcccgatggcaatgatgtggggaagtcttcgggctacttccaggggtttctcgcttgcttgattcaggcatcgtttaccatagctggtggcgagtatatttctatgttagcgggagaggtcaaacggccaagaaaagtattacccaaggcgtttaagcaggtgtttgtgagattaacatttttgtttttagggagttgtctgtgtgttgggattgtttgttcgccaaatgatcctgacttgacagcagcaattaatgaagcaaggcctggcgccgggtcttcaccttatgtcattgcaatgaataatctgaaaattagaatattacctgacattgttaatatagctttaattacagccgccttttctgctggtaacgcttacacttattgctcatccagaacattttatggtatggcattagatggctacgcgccaaaaatcttcactagatgcaataggcatggtgtgcccatttactctgtggccatatctttggtatgggctttagtgagccttttgcaactgaattctaatagtgcggtcgtattgaattggttaattaacttgattactgcctctcaattgattaattttgtcgtcctttgtatcgtctatttatttttcagaagggcttaccatgtccaacaagattcgttacccaagttgccattccgttcgtggggtcagccatacactgctattatcggccttgtttcatgttccgcaatgattttaatacagggctacaccgttttctttcccaaattatggaacacacaagattttttgttttcgtatttaatggtgtttatcaacatcggtatatatgtgggctacaaatttgtttggaaacgtggtaaagatcacttcaaaaacccacatgaaattgacttttctaaagagctaacagaaattgaaaaccatgagattgaaagctccttcgaaaaatttcaatattatagcaaagcataa

SEQ ID NO: 75551 - DNA, 2484 bp, Saccharomyces pastorianus
atgcatagcaacgtatttgttggtgtcaaaccaggctttaatcataaacagcacagcaaaaagtcacgtttcctagaaaatgtctctagtcattcaccagaactgcctagtaactatgattacgttttgcttcctataacaacgccaagatataaggaaatagttgggcaagttttcaaagatttccaaagacaatccatacagaactggaaaccgcttcaaattcctgaaccgcagttgcaggatatctgtatacccccgttcaacgtcaagaagctagacaatgacgatacgccgtcttacatagggctgttatcctcctggctggagctggagagtcgcgatccaaatgtaagagatcttggcttaaaggtccttctaaacgaatgtaagtacgcgaggtttgttggaatcaataagctaatattggcgcctccacgggacctgtccaacctgcaattgtatggacagatgatttacaggctcctgcaaaatcgcatcgtctttgctgcgcctgcgttaaccatatccatttctctgccactttacgaagacagcgatccattggccacttgggaactgtggaataccgtgcggaaacaatgcgaatatcatccctctttgactatctctttggctttgccaagaaccaggactccttcgtatgtgctgaatagatggttagccgaacccgtctcgtgtcttttggtatcttcatccatctttgccagtaatcagtacgattatcccgttttacacaagtttaaccagaatttgattttaaagttccaaaaggttaatggagattcacaaattttgggtaatgaattatgcgtgatattgcatgggatggagaaatatgccaataatgttaagggcggagaatctgcctatttggaatatataaactacttattgaaaaagggcgacaaagtattaaattccaatagtaatcaccaatttttgctccaagaggagtctcggataatgccgcctctgaaacctcattcagataatttattaaattccacatatttgacttttgaaaaagatttggtgaagtacgatctttacgaatctgccatattagaagcgcttcaagatcttgctcctcgagcgagtgccaagagaccgttggtgatcctagtagccggtgcgggaagaggacctttagtggatcgaacttttaagataatatcaatgttgtttatggatagtaaggtttctataattgccattgaaaaaaatccacaggcatatctgtacttgcaaaaaagaaatttcgactgttgggataatagagtgaaattaatcaaggaggatatgaccaaatggcaaatcaacgagccgtcggaaaagcgtattcagatagatctgtgcataagtgaactgctgggttcgttcggttgcaatgaattatcaccagaatgtctctggtctattgaaaaatatcattcccataatgacacaattttcataccgaggtcatactcttcatacatagcacccatttcgtcaccattattctaccaaaaactctcacaaacaaatcgctcgttggaggcgccctggatagtccatagagtgccatactgtatattatcctcaagggtaaatgaagtgtggcggttcgagcatcccatggcccaaaaagatactgcccaagacgaagatgattttacagttgaattttctcaaagttcattaaatgagttcaagataaagcaccgcggcgaaatccatggctttatcggattcttctcggcaaacttatataacaatatattcttgtcaactttgcccaatgacagcacagtccgtttaaaatttagcgaagaaacgttgatgaataccagacgagaagaaaatctaatcaagaaatgtgaccatacaccaaatatgacctcgtggtctccaattatctttcctttgaagcaaccaatatcctttatagatgactccgaactttctgtgttgatgtcacggatacactccaatacagaacaaaaagtttggtatgaatggtctttggagagtttcatataccttatgttgtcaaattatacttcggcggtaactgctgcaagcatgactattccgaggtctatagttacagatgacactaaaactttagcccataatcgacattattcagcgactaccaatcaaaagctagataatcaaattgatcttgaccaagacattgaaaacgaagaagaacagggattcttatccaatctagaaactggttggcaaagcgtacaagatattcacggactcagcaaaaccgccaaaccagaccatttagattctatcaataagcctatgtttgatctcaaatctactaaagcgcttgaaccctctaacgaattgccaaggcacgaagacctcgaggaagatgttccagaagttcatgtcagagtcaagactagtgtttccacgctacataatgtctgtggcagagccttttccctgcctctgtga

SEQ ID NO: 75552 - DNA, 480 bp, Saccharomyces pastorianus
atgtaccatcactatcacgccttccaaggcagaaagcttactgaccaagaaagagcacgcgtgttggagtttcaagattccattcactattctccgcggtactcagacgataactatgagtacaggcatgtgatgttacctaaggccatgctaaaagttatcccatctgattacttcaattcggaagtggggaccctgcgtatattaacagaagacgaatggagaggcctcggcatcacacagtctttggggtgggaacattatgaatgccatgcgccagaaccacacattttgctattcaaaaggccgctgaactacgaggccgagctgagggcagcgaccgctgctgctcaacagcaacagcaacagcagcaacagcagcaacagcagcaacaacaacaacagcagcaacaacaacaacagcaacatcaaacacaatcgatttcgaacgatatgcaagttccaccccaaatctcctag

SEQ ID NO: 75553 - DNA, 540 bp, Saccharomyces pastorianus
atggtggttttagacaagaagttgttggaaagattgacttctcgtaaggttcccttagaagagctcgaagatatggaaaaacgatgctttttgtctacttttacatatcaagatgcctttgatttggggacttacataagaaatgcagttaaagaaaacttccccgaaaaaccagttgcaattgatatctccttaccaaatgggcattgcttgtttcgcacagtgacctacggtggcagtgcattggacaatgatttttggatccagagaaagaagaagacagcgcttcgatttggtcattcaagtttctatatgggctgtaagaaaggtgatacaacaccggaggaaaagttccttgtggactcaaaagaatacgctttccatggaggtgctgtcctaatacaatctgagagaagtgactacccctatgcctgcttaactataagtggattgaagcaggaagaagaccatttaatggcagtcagctctttaattgcatttgctaatgaaagtctagaagaagatttgaatttggattga

SEQ ID NO: 75554 - DNA, 1575 bp, Saccharomyces pastorianus
atggagaaagatcaaatccaccctagggtgttggagtcagtagacacaaactcattatccttgctttcgtccaataccagctcaaatatgaatagcaacaccaacaataaactcagtataattgctagtgatatttctacaggatccgtactttccaggcccttgactcctccagtcgttcaggatatagagaataactccatgttgcaatggcaatttgaaaagaaggaatttatcttcgatagtaacagcactccttcgaagcaggcaaaaccattgcagagaacttctccataccaaggcaatagtcaaagtgaaaatcagaaccaacagttattgaatgtaagaaagcgtcgctcacaattgataggtgccaagcctaaaattccatccaaattgtatcaatctgtttccaaattagatctaattgatgacaagagctttacgtctttgccaattgcgcctccatgcaatatcgaaactaatgaagatgatagtggaaacaacgaatacaacaacaataaaaaacgacccaggttgaatcctgtaaatgaactgcgagtgcataacaacaaacgtaataggtacgtcagttatgggccgagtttagatacaaaaaactacgagctaacagaaaatacttctcaggatataccaccgctagtcctggttgaagactacataccgtatacccaaagtaaatcaacaaaaaaaatggtatctatttcagatttgaaatcaaaactaagtaaaagaagagataatcatatcccgctgagagtaaaaaattcatattctgaaattaataaggaaaccaatagaaatagctttgaaccgaattcactaacactgataccccatatattaaggaatactgaagaaaatagggacgaaagtaacaaccccttagattttatcaaagaggaaattgaaataagtgatatttccataccaaattccattgaaaatatggtggttaacttggttaatattccatcttccaataaaagttacgatgatctttatctatcggaattaaatgttcattcccaactgaggaaatgtgtcatctgcgaaaaggccctatatgaaattagctcgagacttttaaattcaggatactataaagaaattgtatgtgagcaatgcacagttagatatgaagaagccgctaaaatctttgagaactgcgagttcgaatcatctatggatgaatcaaatctaagcagcggtacttttagtgatcttgagaattcagcggaaccgtttcatttatcgacagatgttccaaaaaaaataaataggcacatagaagataacaagatcgaccttaaaaaggaaacatcaaaaaaaaaggacagcttctctaaggaactaatagaacgattgcagttgcaattgctagaaaatgataagtcaatcaaacatcattttaataaagatgcaatgggctctaaatcaatgaattggtttttggaagcaagaagaaaattgaagtggaagtggagaataaatggtttacttccgcatttcttacgcaatcaaaatagtgatcgtttaaattttcaaccttga

SEQ ID NO: 75555 - DNA, 1014 bp, Saccharomyces pastorianus
atgcattcaagaaagtcgaagagtattacgggcaagaggaagcaagtaggaagtaacgtgacgagagtaatcaagccacagaagacaagaaggataataagaagattccaccatttaattaataagcgtcaatcgatatgcaagtttttatgccttaaggaaaacctagatgattccaacgaggagaagaatgacaaaattatcaggttaagtattaaaggtaatgtaagactgggcaagtactatgaagacggcaaatcgcagtccttcaatgatgctatggaatcacaactactgaggctgcactcattaattaaaaatgaatccaaatcaaaggatacttctgacttggctgtgatgtacacattacttggttacataatgaatcagattaataaattgggaggactagaaacttaccaaattgccagtcaaaatgggcaattgaaggaacgaggaggagacacgtccaagttgctcgagaaatggatcaggtcctcatttgaaaatcgtcctggagtaatggcattagaaattggttcattaagctccggaaatcgcatatcccgttgtgcactttttagaaaggtggttcgtatagatttagaggaacatgaaggcgttatcaagcaggattttatggaaagaccgctaccgagaaatgaaaacgacaaattcgacctgatatcatgctctctagtgctaaattttgtcaaaaatcacagggatcgcggtgcaatgtgccatcgcatggtcaaatttctcaagccgcaaggctacatctttattgttctgccacaagcctgtgtgacgcactcaagatactgcgacaaaacactgttacaaaacctcctctgctctatcgggctcataatgcttaatagccatcaaagtaataagttgtactattgtttgtatcaattgcaggtagttccaccgcagccgagtagcttttccaaaagaatcaaggttaacgacggccctgggttgaacaattttggtattaccctctaa

SEQ ID NO: 75556 - DNA, 96 bp, Saccharomyces pastorianus
atgagcccgatagagcagaggaggttttgtaacagtgttttgtcgcagtatcttgagtgcgtcacacaggcttgtggcagaacaataaagatgtag

SEQ ID NO: 75557 - DNA, 2322 bp, Saccharomyces pastorianus
atgggtaagaaaagggctcctcaaaaaggaaaaacggtcacaaagccacaggagataattgtagatgaatccaaattgaactggaaaccagtagatattccggacactttagatgactttggtggattttatggcttggaagaaattgacggagtggacgttaaagtcgtggatggtaaagtaactttcgtcaccaaaaaagattcaaaagtgttaaaagatagcaataaggaaaaagtcggagatgatcaggaatctgtggaaaatgaatcagggtcagattcggagtccgagctccttgaattcaagaacttggacgatattaaagaaggagagttgagtgcagcatcttattcatcatccgacgaggatgagcaaggtaatattgagagttcaaagttaaccgatcccagtgaggatgtggatgaggatgtggatgaggatgttttgaaagaaaacgtctttaacaaagacattaatatcgatgatatttctcctgtaaatttacctgaatggacgaatcttgcacctctctcaatgactattttgcagagcttgcagaatttaaattttctcagacctacagaaattcaaaaaaagtctattccagttattatgcaaggcgtagacgtcatggggaaagcctctacaggttcaggtaaaactttagcctatggtattccaattgtagagaaactggtcagtaacttctctcagaaaaacaagaaaccaatatcgttaatctttactcctacaagagaactggcgcatcaagtcacagaccacttaaaaaagatctgtgagcctgttctagcgaaatctcagtactcgatattatctttgacaggtggactctctatccaaaaacaacaacgtctattaaagtacgataatagtggccaaattgtcatcgcaacaccaggtagatttttggaactgttggaaaaagacaacactttaatcaaaagattctcgaaagtagatacgctaatccttgatgaggctgataggctgttacaagacggtcatttcgacgagttcgaaaaaatcattaaacatttattagtagaaagaaggaaaaacagagaaaactccgagggcagtagcaaaatttggcaaactttgatcttttctgcaacattctccatcgacttgtttgataagctatcttcttcccgtcaagttaaggatagaaggtttaaaaacaacgaagatgagctaaatgccgtaatacaacacttaatgagcaagattcacttcaactcaaagccggttataatagatacaaatcctgagtcaaaagtgagctctcaaatcaaagaatccttaattgaatgtcctccattagaacgtgacctatactgctattactttttaaccatgttcccaggtacaactttgatcttttgtaatgccattgactccgtgaagaaattgaccgtatacttaaataacctaggcatcccagcttttcaaattcattcttccatgacacaaaagaaccgtttgaaaagcttagaaaggttcaagcaacaaagcgctaaacagaaaacaataaatcattcgaatccggattccgttcaactctcaacagtattgattgcaagtgatgttgctgctagaggtttagatattccgggtgttcaacacgttattcattaccacttaccaagatctactgatatttatattcatagatcaggcagaactgcaagagcaggttctgaaggtgtctctgccatgatatgctcacctcaagaatctatgggcccattaagaaagttaagaaaaactctcgctacaaaaaatagtgtttcgacggatttgaactctagatcaactaacagaaaacccatcaagtggcaaaacactgtgcctttgttaccaattgaaaccgatatactttcacaactcagagaaagaagtagattagcaggcgaactggctgatcatgaaattgcttctaattccctaagaaaagatgacaattggttaaaaaaggctgctgatgaattaggtattgacgttgattccgacgaagatgatatatcaaagagtaattcggacactttcttactaaaaaataaaaataaaaaaatgcagaagactataaataaggacaaggtaaaagccatgagagctacgttgaacgaattgttatcagtgcctatacgtaaagatagaagacagaaatatttgacaggtgggctagtgaatttagctgataacttggtcaaaaaaagaggtcataattctatcattggtcatgaaaagacaaacgccttagaaactttgaagaaaaagaaaaagagaaataattaa

SEQ ID NO: 75558 - DNA, 1314 bp, Saccharomyces pastorianus
atggataacgaggttgaaaaaaatattgagatctggaaggtcaagaagttggtccaatctttagaaaaggctagaggtaatggtacttctatgatttccttagttattcctcctaagggtcaaattccactgtaccaaaaaatgttaacagatgaatatggtactgcctcgaatattaaatctagggttaatcgtctttccgttttatctgctatcacttccacccaacaaaagttgaagctatataatactttgcccaagaacggtttagttttatattgtggtgatatcatcactgaagatggtaaagaaaaaaaggtcacttttgacatcgaaccttacaaacctatcaacacatccttatatttgtgtgataacaaatttcatacagaagttctttcggaattgcttcaagctgacgacaagttcggttttatagtcatggacggtcaaggtactttgtttggttctgtgtccggtaatacgagaactgttttacataaatttactgtcgatctgccaaaaaagcatggtagaggtggtcaatctgcgcttcgttttgctcgtttaagagaagaaaaaagacataattatgtgagaaaggtcgccgaagttgctgttcaaaattttattactaatgacaaagtcaatgttaagggtttaattttagctggttctgctgactttaagaccgatttggctaaatctgaattattcgatccaagactagcatgtaaggttatttccatcgtggatgtttcttatggtggtgaaaacggtttcaaccaggctatcgaactttctgccgaagcgttggccaatgtcaagtatgttcaagaaaagaaattattggaggcatattttgacgaaatttcccaggacactggtaaattctgttatggtatagatgatactttaaaggcattggatttaggtgcagtcgaaaaattaattgttttcgaaaatttggaaactatcagatatacatttaaagatgccgaggataatgaggttataaaattcgctgaaccagaagccaaggacaagtcgtttgctattgacaaagctaccggccaagaaatggacgttgtctccgaagaacctttaattgaatggctagcagctaactacaaaaacttcggtgctaccttggaattcatcacagacaaatcttcagaaggtgcccaatttgtcacaggttttggtggtattggtgccatgctgcgttacaaagttaattttgaacaactagttgatgaatctgaggatgaatattatgacgaagatgaaggatccgactatgatttcatttaa

SEQ ID NO: 75559 - DNA, 1056 bp, Saccharomyces pastorianus
atgccttcgcaagtcattcctgaaaaacaaaaggctattgtcttttatgagacagatggaaaattggaatataaagacgtcacagttccggaacctaagcctaacgaaattttagtccacgttaaatattctggtgtttgtcatagtgacttgcacgcgtggcacggtgattggccatttcaattgaaatttccattaatcggtggtcacgaaggtgctggtgttgttgttaagttgggatctaacgttaagggctggaaagtcggtgattttgcaggtataaaatggttgaatgggacttgcatgtcctgtgaatattgtgaagtaggtaatgaatctcaatgtccttatttggatggtactggcttcacacatgatggtacttttcaagaatacgcaactgccgatgccgttcaagctgcccatattccaccaaacgtcaatcttgctgaagttgccccaatcttgtgtgcaggtatcactgtttataaggcgttgaaaagagccaatgtgataccaggccaatgggtcactatatccggtgcatgcggtggcttgggttctctggcaatccaatacgcccttgctatgggttacagggtcattggtatcgatggtggtaatgccaagcgaaagttatttgaacaattaggcggagaaatattcatcgatttcacggaagaaaaagacattgttggtgctataataaaggccactaatggcggttctcatggagttattaatgtgtctgtttctgaagcagctatcgaggcttctacgaggtattgtaggcccaatggtactgtcgtcctggttggtatgccagctcatgcttactgcaattccgatgttttcaatcaagttgtaaaatcaatctccatcgttggatcttgtgttggaaatagagctgatacaagggaggctttagatttcttcgccagaggtttgatcaaatctccgatccacttagctggcctatcggacgttcctgaaatttttgcaaagatggagaagggtgaaattgttggtagatatgttgttgagacttctaaatga

SEQ ID NO: 75560 - DNA, 837 bp, Saccharomyces pastorianus
atgttttcaaggctttctttgtttcgaagggcagctctggctcctgcccctatgagaatgtcttttaggactatttatcaaaaaaccgaggatgaattgcccagaaggatcgtcccaaagctagccacattttattcggcgaatcctaaccatgaagatcgtattaatcgactcgaaagacttctaaggaaatacataaaactgccatctcagaacaacaatgaagcacaacaaacaaaagctccttggatttcttttgatgagtacgctttaattggcggtggtacgagattaaagcctacgcaatatactcagctactgtatatgttgaataaacttcacaacattgatcctcaacttactaatgatgaaatcacatccgaactatcccaatattataaaaaaagttcaatgctttccaataatatcaaaatcaaaactttagatgagtttggaagaagtatagccgttggaaagaggaaaagttccactgcgaaagtattcgttgttagaggtacaggtgagatattagttaatggtcgacaattgaatgattacttccttaagatgaaagacagagaatcaatcatgtatccacttcaagtgatcgaatcagttggaaagtacaatatttttgcgacaacgtctggaggcggacctacgggtcaggctgaatcaatcatgcacgccattgcgaaagctttggttgtgttcaatccattattaaaatccagactacataaagctggcgtcttaacaagagattacaggcacgtcgaaagaaagaagccaggaaaaaagaaggcaagaaagatgccaacatgggtcaagagatag

SEQ ID NO: 75561 - DNA, 924 bp, Saccharomyces pastorianus
atgaagctgatcccaattattttgaatgctaagaatctcagtgggatggctggatccatatcaatatgctgttggattgttgtgtttgtaccacagatttatgaaaacttccgaagacagtctgcggagggattatcactgcttttcattgtgttgtggctattaggtgatatatttaacgtcatgggagctatgatgcaaaatttactcccaaccatgataattttagctgcttactatacattggcagatttaattttgttaatacagtgcatgtggtatgacaaggagaagaagagcattttacaagaagtcaagaaaaatgttgatcctgtgcatttgtctccagcaaaccccataaatgagactgtcttacaagacgtttttaatgaatatgagccacttttgccaaggatagaagaagaagatagccaatcgtatagctcgcttgagcttggcagaacaatagtcgtaaaggaaagagagaattttttcaatgacttcttaattgtttcaggtgtacttattgccggaattttgtcatggtatatatcttactgttccggcctagataacggtattcctaaaaaaaaacctgcgttcgaacagattaatttacctgcacaaattttagggtatttaagtgcgatactgtacttgggctctaggatccctcagattgttcttaacttcaaaagaaaatcatgcgaaggagtctcattcctattctttttatttgcatgcttagggaacacttctttcataatctcagtgctctcagtctcaatggaccccgaatatttaattttgaacgcatcttggcttatcggtagcgctggtacgctgttgatggacttcacagtttttattcaatttttcctttacgccaaacctaaatacgagaaaatactaatagataattaa

SEQ ID NO: 75562 - DNA, 951 bp, Saccharomyces pastorianus
atggcttttttgaatattttcaagcaaaaacgtggtgatgaagcttcacaactgagcgcaaagggacgggaggaaatttctcaatcgattaagatatgcaaaagtgacgatgctgctaacgaacatagctgctctggtgattgcaaaacagaaattgaagaaggagagcaggcttttgcgaaactaaagatcgaacatgaaactcctttgttgaactcttctaaaacgccaaaaattcacttcgttgtccccacctctcaaatcgattggcagcatgatgcctgcctcgaggacccaaagtcagtacagtataaaatttcccagtggtgtgataagaattcagctaaattttccaacgtgggcacaggcaagacactaaactgtgcagtttcatctttacctaaagatattatggatattgatgttatgcggggaaccaagaataatgtacttatgttgccttacttcatttggctgaacgaccttagatcagatgacgtcgaagcaacgctggatggtttagttcctgatttattagacgagaatatttcaagagagaaattgctagaaacacgaccaaatgttgccgttgcacgtgaacgtgcatttgtatttatatgttcacatactacgagggataaacgatgcgggattacggcaccctatttaaagaaagtttttgacagtaaattacaggaacatgggctgtatagggacaattcggattacagggcagagggtgtcaaaattgcatttgttaatcatgttggtggtcacaaatttgctgcaaatgttcaaatttatttacgaaatccaaataccttaatttggttgggaagagtaactccaaccatagttccttctattgtcgaacatctgattgttcctgaagaaccaacgttgccgtttcccgaaaaagttcgctgtattaagaaatatcaaagctggtaa

SEQ ID NO: 75563 - DNA, 876 bp, Saccharomyces pastorianus
atgagttttagacatttcaagaggagacttgacacaagttcagcagatgaaagctcttcggcggatgaagagcatccagaccaaaacgtatctctaacagaaaaatcagcctcattaagccatagtgatttgggcggcgaaattttaaatggtacaggaaagaaccgcacccccaatgatggccaagaatcaaatgaaagtgatgggagtcccgaaagtgatgagagtcccgaaagtgaagaaagtagcgacaacagtgattcgagcgatagtgacgatatgagacctttaccgaggccattatttatgaagaaaaaggccaataatttgcagaaagctaccaagatagatcaaccgtggaatacccaagatgacgcacgagttctgcaaacaaagaaggaaaatatgataaaaaacatcgacaaagctaatcaagtggcaaagaactacgaaacgatgaagctgagacttaacaccaattacagcaccaacgaagaattgatcaagcagtgcatgctcttagatgataacgatgaagtcgattcagaaaaggagaggcagaaatggtttgaaaggcagaacgaacgaaagcaaaagcatagaagaatacaacttgcgaaacaaagagaatcagaagaatatgaggcaaaacgatttgaagcgatgcaaaaaggcaaagatgggaataccaaatacgacgttatcttggacaaggagaaagagaaacttgatcacaaaaaacaaagatcggctgaaaaagtggaaaaatctcacaataacaaccgttacaagattacaagaactaaaaatgttgaatttggtgacctaggcaagaatagtagagattacgaagaaactgaatattcggttatataa

SEQ ID NO: 75564 - DNA, 735 bp, Saccharomyces pastorianus
atgtctttgacaccactgtgtgaagatttaccacaatttctgcgaaactatctaccgaatgctggtcaaacggaaaataccattgtgccctttgtcacattaacttatgctcaatcgctcgacgcgagagtatctaagggccctggagtgaggactataatttcacatcccgatactaaaacaatgacgcattatttgagacatcatcacgatggaatactcgtaggaagtggaacagtgctagctgataatcctggattgaattgtaaatggggtcccgatccggctgcaaattccccaaggccaataataatagatacaaagcaaaagtggcgatttgatggttcaaaaatgcaagaactttttattaaacgacagggtaagccgccaatcgttgttgtcacaagtgagcccattataaaagaacaacatgtagactacgcaatttgtccaataaatgatactacgaaattggtcgattggaagaaattgtttgagatattaaaagaagaattcaatataaggtcagtaatggttgaaggaggtgccaatgtaataaatcagttgttgctgaggagcgatattgtcaacagtcttataataactattggatcaacatttctgggtagctcaggcaccgaagttagcccaccccaaacagtaaatttaaaggatatgtcatggtggaagggcattaccgatgtggtgctttgtgcgagactggccgatgactaa

SEQ ID NO: 75565 - DNA, 648 bp, Saccharomyces pastorianus
atggaccaagaaaatgaaagaaacatctcaagattatggagagcattcagaacagtaaaagaaatggttaaggacaggggttattttatcactcaagaggaagtcgaattgccattggaagatttcaaggccaagtattgtgactccatgggcagaccacaacgtaaaatgatgtccttccaggcaaatccaacagaagaatctatatcaaagttcccagacatgggctccttatgggtagaattttgtgatgagccttccgttggtgtaaagacaatgaagacttttgttatacatattcaagaaaaaaatttccaaacaggtatctttgtttaccaaaataatattacaccaagtgcaatgaaattggtgccttctataccaccagccaccattgaaacttttaatgaagctgccttagtggttaatattactcaccacgaattggttccaaagcatatcagattgagtagtgatgagaaaagagagcttttaaaaaggtatagattgaaggaatcccaattgccaagaattcaaagagctgatcctgtagccttatacttggggttgaaaagaggcgaagtagttaaaatcataagaaaaagtgaaacctctggtcgttatgccagttacagaatctgtatgtag

SEQ ID NO: 75566 - DNA, 1158 bp, Saccharomyces pastorianus
atgagctccgttaacgcaaatggaggatataccaaaccacaaaaatatgtgccagggccaggtgatcctgaacttccaccccaactatccgaatttaaagataaaacatcggatgaaatcttgaaagaaatgaacagaatgccttttttcatgaccaagttggatgaaacagacggtgcaggtggtgaaaacgtggagttagaagctttaaaggcattagcttatgaaggcgaaccacacgaaatcgctgaaaatttcaagaagcaaggtaacgaactatacaaagcaaaaagattcaaggatgcaagggaactttactcaaagggcttggctgtagaatgcgaagataaatcaataaatgagtcactatatgccaatagagcggcatgtgagttagagctgaaaaattacaggaggtgtatcgaggactgcagtaaagctctaactattaaccccaagaatgttaagtgctactatcgtacaagcaaggcttttttccaattaaacaagttggaggaggccaaatcagccgcaacatttgccaatcaaaggattgacccagagaacaaatcaattttgaatatgttatcagtgattgatagaaaagaacaagaattgaaagcaaaagaagaaaaacagcaaagagaagctcaggaacgtgaaaacaagaaaattatgttagagagcgcaatgacgctgagaaacataactaacatcaaaactcactctccagtagagttacttaatgagggtaaaataaggctagaagacccaatggattttgaatctcaattgatctatcccgcattaattatgtaccccacgcaagatgaatttgattttgtaggtgaagtaagtgagttaactactgtgcaagaacttgttgacctagttttggaagggccgcaagaacgcttcaaaaaagaaggtaaggaaaacttcacaccaaagaaagtgttggtgttcatggaaacaaaggcaggtggtttgagtaaagctggtaagaaactgacatttcacgatatcttgaagaaagagtcgccagatgtaccattgttcgataacgctttgaaaatatatattgtgccaaaggtagaaagtgaagggtggatttccaagtgggataagcaaaaagccttagaaagaagatctgtgtga

SEQ ID NO: 75567 - DNA, 2097 bp, Saccharomyces pastorianus
atggactgggcaatcaaagcagctaggaagaaaactcaaaggaagccaggctctacccgttcaatcatagaaaccctcgatgatctaaataatctaacaacagatgcacattcagaaataaatcaacgattgtacgaaagtagtgaatggttaagaaataatgtttatatgaatacactcaagtatgaagacaaaaagatggaagagtctttaattagccccgaaaatacgcataacaaaatggatgtcgaatttcctaaaatgaaaggagaatatgaactttctaactcccagaatgatgccgcaaaagacgttactaagacacccagaaatggattacataacgataaaagtatcacgcctaaatcactccgcaggaaggaagtcaccgaaggaatgaatagatttagtatacatgataccaataaaagcccggttgagccattgaatagcgttaaagtcgacgccaatgaaagcgaaaaatcctcaccatggtcaccttacaaagttgaaaaggttctaagagaatcctccaagacttcggagtctccgattaatacaaaacgcttcgataatcaaacatgggcggctaaggaagaaatggagaatgaacctatacttcaagctttaaagaaagctgaatcagtaaaggtgaaaccaccaccgaattctgggatagcgagatctcaaagaaggtcgaatatgtttgttccactgccgaataaagatcctcttattattcaacacattccaccaacaaaatcttcaggatcaataccaaaagtacgaacagtaaaggaatcaccaatcgcatttaaaaaaaaatctacgataaatagtcctgctataagagctgtggaaaacagtgataccgcgggatctacaaaagcatccagtgttttcgataggctatcatctattccaacaaaatcatttgaaaacaaaatttcccgtggaaacgttggtcacaaatactcctcttcatcaatcgatttaacaggctcccccatgaaaaaagtttctcaaaagtttaagtcaataaactccacggatactgatatgcaagaagcgttaagagatatattctcagtaaaaaataaaataaccaaaaataattcacccaaaggaaaaaactctcgaaaatcctctattccgaggtttgataagacttctttgaagctaacgacacacaaaaagctagcaatcattgcagaacagaaaaagaagtccaaacactctagtgatgttcataaaactggttcaagaccgcacagtatttctccaacaaaaataagtgtcgattcaagctcgccatctaaagaagttaaaaattattaccaaagccctgtaagaggttatttgagaccaacaaaaacgtctatttcgcctaataaaaataaaaatttaacaacgtcgcaaacgccacatcgtttgaaaattaaagagaaaacattaagaaaactttctccgaatattgctgacatctccaagccagagtctcgtaaatccaaaaattatcggcttacaaaccttcaattacttccaccagcagaggcagaacgagatgacttaaaaaaaaagtttgataaaaggttatcaggaattatgaggtctcaacaggaacatcatcggcgtaaacaagagaaacaaaaaaggatgtcgcatttggaacaagatctaaaaaagcaaacaagctttagtaatgactacaaggacatacgtctaaaagaatctttggctcctttcgataatcatgtgcgagataccatcaacaaatatactgcatttagtaccgacaatgtattggccacaataaatacagttgaccatcgagaaataatcggaaatgtgaccccaaagatagcctctgtcaatgattctttaccagagataaatactgattctgaagatgaggctagcgtaactttagcggcatgggctaaatccccgtatttgcaagagcaattgataagacagcaagatataaatccacaaactatctttggaccaattccgcctttgcacaccgatgaaattttcccaaatcctaggctaaacaggttgaaaccgcgtcaaattgtgcccaaaaggtcttga

SEQ ID NO: 75568 - DNA, 1650 bp, Saccharomyces pastorianus
atgaaactagaacgcgtaagcagcaatggctccttcaaaagaggtagagatatccagtcacttgaatctccgtgtactagaccgctgaaaaaaatgtcacctagtccatctttcacatctcttaaaatggagaagcctttcaaagatattgtaaggaagtatggaggtcatcttcatcaaagtagttacaatcccggctcaagcaaagtggagttagtaagaccagatttgtctttaaaaacagatcaaagttttcttcaaagtagtgtgcaaactacgcctaataagaaaagctgcaatgagtatctttcaactccagaggccacaccattaaaaaatacggctacagaaaatgcatgggcaacctctcgagttgtttctgcatccagtctttctatagtgacaccaacggaaattaaaaacattcttgttgatgaattctctgaattgaagttagggcaacctttgactgctcaacatcagcgaagtcatgcggtctttgaaattcctgagattgtggaaaatatcataaaaatgatagtttctctagaatctgcaaatataccaaaggaaagaccatgcttaagaagaaatccacaatcttatgagcactctctgcttatgtacaaagacgaagagagagcaaaaaaagcatggtcagcagcccagcagctacgagacccaccattagtcggacacaaggagaagaagcaaggggccttatttagttgtatgatggttaacaggttatggcttaacgtaacaaggccttttcttttcaaaagcttgcactttaagagcgtccataattttaaggagtttttacgaacttcccaggagacgacacaagtaatgagaccgtctcattttatattgcacaaattacatcaagtaacacaaccagatatagaaaggctttccagaatggagtgtcaaaatttgaaatggttagaattttacgtttgccctagaataactcccccattaagctggtttgataacctccataaacttgaaaagcttattattccaggcaataaaaacatagatgataactttttactcagactatcacagagcataccaaatttaaagcacttagatttaagagcatgtgataatgtcagtgattcaggtgttgtttgcattgctttgaattgcccgaaattaaaaacatttaacattggcagacataggcgtggaaatttaattaccagtgtctcactggtcgcgctaggcaaatacacacaggtggaaactgtggggtttgccggttgtgatgttgatgatgccggtatttgggaatttgctcgattaaatggcaaaaatgttgaaagattgtctttaaattcctgtcgtcttttgactgattactctctacccattctttttgctttaaactcatttccaaatctggctgttttagagatcagaaatttagataaaataactgatgtgaggcatttcgtgaagtacaacttgtggaaaaaatcattggatgcccccattctaatcgaagcatgtgaacgtattacgaaactaatcgatcaagaagaaaatagagttaagaggattaactccttggttgccttaaaagatatgacagcttgggttaatgcagacgacgaaatagagaataatgtggactag

SEQ ID NO: 75569 - DNA, 897 bp, Saccharomyces pastorianus
atgagcggtgaattagcaaattacaaaagacttgagaaagtcggtgaaggtacatacggtgttgtttataaagcgttagacttaagaccaggccaaggtcaaagagtagtcgcattgaagaaaataagactagagagtgaagacgagggtgttcccagtacagccatcagagaaatctcattattgaaggaattaaaagacgataatattgtcagattatacgatattgttcactctgatgcacacaagctatatcttgtttttgagttcctcgatttggacctgaaaagatatatggagggtattccaaaggaccaaccgttaggagctgatattgttaagaagtttatgatgcaactttgtaagggtattgcatactgccactcacaccgtattctgcatcgtgatttaaaaccgcagaacttattgattaacaaagatgggaatctaaaactaggtgattttggcttagcgcgtgcttttggtgttccgttgagagcttacacacatgaaattgttactctatggtatagagctccggaggtattactgggtggaaaacaatatagtacaggtgtcgatacatggtccatcggctgtatatttgccgaaatgtgtaacaggaaaccaatcttcagtggcgatagtgagatcgatcagattttcaagatattcagagtattgggaacgccgaatgaagctatatggccagatattgtctacttgcctgatttcaagccaagctttcctcaatggcgcagaaaagacctatcacaagtggtaccaagtctagatccacgcggtattgatttgttggacaaactcctcgcgtatgaccctattaaccggattagcgccagaagagcagccatccacccctacttccaagaatcataa

SEQ ID NO: 75570 - DNA, 1131 bp, Saccharomyces pastorianus
atgaagaaggagttgaaaattcttataatagcgaacattgcattacttatctctataatacattacacatttgatttgttgacgttatgtatagatgatacttccaaagatgcgctaacagatgaacagctgaaccctcccaatggcttcaattcaacattctatgagtctcctcctcaactcataccgaaaatcattcatcaaacctacaaaacaaacgatatcccagaacagtgggtaaaaggaaggcagaagtgcattgatttacatccggattacacttacattttatggacggatgaaatgtctgatactttcattaaacaggaatacccgtggtttcttgacacctttaggagttatgaatatccaattgagagggcggatgcaatacggtatttcatcctttcgcattatggtggtatttacattgacttggatgatggttgtgaaagaaggctagaccctttgttgaaagtaccagcatttctaaggaaaacttcgcctacaggagtgtcaaatgatgtgatgggctctgttccaaggcaccccttcttcttgaaggtcatcaaatcgttgaaacactataagaaaaactggtacattccatatatgacaatcatgggctctacgggccccttattcattagtgtggtttggaagcaatataagagatggtctaatacggccgaaaatggtgcggtaagaattttacaacctgcagattataaaatgcataataattcttttttctcaatatctaaaggttcctcctggcatacgggtgatgccaattttatgaaaactctagagaatcatatcttgtcttgcgtggttaccggattcatttttggctttttcatattatacggtgaatttacattttatacttggctgtgctcgggaccatttaacaacaaacgctattacattcagtggttgagtgacaagttcaagttacacaagtggaaactaacatcgtcctacaagaataaggaaaagaggcggaatcctactcgtcacgaatataattcgaggggtaagagattaagaaaagattctaatatcccctacgacagcgttttccttgatatagaaaagaatcacgcaaaatttaccgacttaacctaa

SEQ ID NO: 75571 - DNA, 1368 bp, Saccharomyces pastorianus
atgttacaaaagctttccatcaccgcattagtcggtttgttttcttcagttgtgtcactcgtgaacgctgattgtacttactctggcggtaattactattgtgctcaaaccgatgccatcatttactctaacgtcggtttatctgctacctaccaagatgtcaccaatatggatgaatcttcttgtgcttgtacccaagctgatttcactgcttctggtagcttggctcccttcaacgaggaactatctgttcatttcaggggcccgatcgagttactacaatttggtgtttactacccaaatggtgaatctaatgctttgaagaaaagatcagagaaacaatcaatcgagtcctgtaaggaaggtgaagctgttgtctccagacataagcatcagcacaagagggatgttgctgttgaatatgttcaagttacttccactgtttacgtcgacagtaatggtcaaacagtcacagccgattccaccaataccgttgtcggtcctgctgttccttcttcttacactaaagtctctactgttttgtccagcagtgctcaagcagttgaaacgagtgaaagccagtcttccatctcttcctctaaaaccacctcttctgctgctgctgcttcatcatcttcgtcatcatcttctaacactaacggtgactggtccagaggttcctactttgtcccaggctctactagcaactgtacattcatgaacaaccaaggggggactgccggttctggtgtctggtcgagttgtttcggtaactccatctcttttgctgcttcagatggtgtttctggtgctgcctccgctcaagcttttggtgatgtcaccattaaatctggtaatgaattcatgattttctctggtgaagaatgttccggtaataacggcgattgtggttattacagagaaggtattcctgcctatcatgggtttggtggggctgataaaattttcgtcttcgaattttctatgccaagtgacaccagcggttctgcctacaatcaagatatgccagctatttggttattgaatgcaaaaatcccaagaaccttgcaatatggtgatgcatcttgttcttgttggaaaactggctgtggtgaaatggatttgttcgaaattttgaccgctggttctgataaattaatctcacacatccatgacggccaagatggtggtactcaagattacttcgagagaccaactgatggtactttaaaggctgccgtaatctttaattcgagtgataaaactattcacattatcgaagtcgacgaaagctttgatgctactttaagcgatgatgtcgttgaccaatggttgagcaagtccggttcttctgcggccttgccatag

SEQ ID NO: 75572 - DNA, 198 bp, Saccharomyces pastorianus
atggccgtacagacaccaaaacaaagactggctaatgccaagtttaacaagaataacgaaaagtatagaaaatacggtaagaagaaggagggcaaaactgagaaaaccgcacctgtgatatccaaaacttggttgggtattcttctgtttcttctcgtaggtggtggtgttttgcaactaatcagctatatcctatga

SEQ ID NO: 75573 - DNA, 1758 bp, Saccharomyces pastorianus
atgctgggccggacactaatcaacaagcatggatttttaattcatcctaggagatttgtacatttaaacgataagtcccttgatggaacatttatactaccttcgaagaaaaatcatatgtatgatgttccaactaatgatccaagcggtatcctgaatgcctcggatatcgatagaatcaataatttgccatttttcgataacaccagtccgacaaaagagacaaatactaaggaaggagcattgttgagcgaaaaattggccagcgttaaagaattatttggagaagaccctgaaaatccttcgtttatcaattacagattccccagaggtctagaaaatccctattttgacattcaagtaaatcagctaaagaaaaaacgattatccgtcacacaattatgcactacgcagaattggtgcgagttaaggaatttctacgacttttattctcaaaatttgtctaaccaactactgaacttaaaatttcaggtgcagaaaggtaaaaagattcataaatcactagaggacgaaacgcatcctgaattaaatcagtataaaagctttacccacaatttccttgcactgacaaaattatctatggatattgataatgatatggatgccctgctagataactggttcaactctatcaatagattggtctctttattcaccaaaggtgacggtcatgcaagagaaatagtttgtcatggcttcattaacttagaagatggcaaactggtagagcatttgctgaacagtgatagcaagacaaaggaaaatgtgattatatcaggtgttattgaccacttaactcttagaaataagcacaatcatcaagtacagaaaggtgcagctcatcttgatacggaatatcagagctggggtaatatcctcactaatttactatcaaatctaaaagaactgaagtcgaataacgagatagttatctctgatatcaaaactaggtcagtaccaaaaataccatctattgagtccgttatagaatcctctaaattacagacaatgtattataagttttttttttcccaccttagtcaagacatgacacaaacctaccatagctttttaatcaatgccaagagaagagggctcgacgttgatgcgcccataaatcctaccaagattttaacattcatactaacaaacccactcttcgctaatgatgtgaagaacctcctgtacggactaccgataaatcatactgctttcgataacgacgccaaaggctctaatacatttgatatggccgcgttcaatgatttgctggatagaggtcccacatcttttaacgttccgattgagcaagacgaagatagttcggagtcaacaaaatgtgtatctttgcgagattatggacatttttatacgaaatggaagacacctctaactttgaaatactttgcggcaaggttatcacagatctattttattgtgggtaatctcgtttcgaatgatttaatgatagaatattattaccataacgataatttccacaatatcatcttcccatatgataccttgaaactgggaacccatgcccatgattctgcaatggtttggtttggtggcagagatatgcatccaattgagcctactcaaaaaaacttcaacacatactgtaagttttgtgactacagacacgtttgttcttggaaaaataaaaatgaattgaaacttattgatctagggaaagaattaaaaaaaattattcttgaatcaagtatgaagtaa

SEQ ID NO: 75574 - DNA, 552 bp, Saccharomyces pastorianus
atgggtaacatttttagttcgatgtttgacaaactatggggttcaaacaaagaattgcgtatattgattctgggtttggatggtgcaggtaaaactaccatcttatatcgtttacaaattggcgaagtagtcactacaaagccaaccattggtttcaatgtagagacgctaagttataaaaacttaaaattgaacgtctgggatcttggtggtcaaacaagtatcaggccctactggaggtgttattatgcagacactgctgcagttattttcgttgttgattcgactgataaagatcgtatgtctacagcctctaaggaacttcatttgatgttacaggaagaagaattgcaagatgcagcactgctggtttttgcaaataaacaagaccaaccgggtgcattaagtgccagtgaagtctccaaagaactgaatcttgtagaattgaaggacagaagttggtctatcgtagcatccagtgcaattaaaggcgaaggtattaccgaaggtttagattggttgattgatgttataaaagaggaacagttatag

SEQ ID NO: 75575 - DNA, 834 bp, Saccharomyces pastorianus
atggcttactctttaacaaggaaattgctgaaggattggaaatattttatgcgccatcctgagaagacccaaggtctttttcatgtaaggccacatgattcagacttacatctttggcacgtggtaatgtacgagcccaggacttctttggaagtatatctactactttatattggcggaaacgaccaggatccatatatcatcatgaaatgcctgtctccaaattgttgctttccaattaacagaacggtttcgatgacacacttaaactatcttttattgaaagacttgggattacaggatttacttttccacatatggcaaccgctttttcatattcaagcaacggaagacttacagtattcaccgtcaacggtaaaattcaacagggcgtggaataggattatatataaggactttaaatcttattttccggaactgataggtacactacaaccaggtgattactctatagtaaagagctattccaaaaatcataatatcagcaatagtaatggtggcagtgtcaatgaatttatgtcctcttacaatgctcaaagccacacctttcacgcacaagacaacagcaagaacccttatactaacagtagcataggaaagtctagtatgttatctactctcaacaataataacgttaacaaaaggacacatgactacaatgctatcgactttatgaccaaaaacttacttgcatgtgatgatgacagtattcatccggtcgtaagttctaaaaggtcaagaacgttggcatgtccagatgaaacgaacgataatcgcggtagtgagcattacacaaagaggaaaaaaatctaa

SEQ ID NO: 75576 - DNA, 1359 bp, Saccharomyces pastorianus
atggtatcagaggataagattgagcaatggaaagccacaaaagtcattggtataattggtctgggtgatatgggcctattatacgctaataaatttacagatgctggatggagtgttatatgttgtgatagggaagaatattatgatgaactgaaagaaaaatatgcctcagctaaattcgaactggtgaaaaatggtcatttggtatccaggcaaagcgactatattatctatagtgttgaagcatccaatattagtaagatcgtcgcaacgtatggaccatcttctaaggttggaacaattgttgggggtcaaacgagttgtaagctgccggaaatcgaggctttcgaaaagtatttacccaaggactgcgacatcattaccgtgcattcccttcatgggcctaaagttaatactgaaggccaaccactagttattatcaatcacagatcacagtacccagaatcttttgagttcgttaattctgttatggcatgtttgaaaagtaagcaagtttatttgacatatgaagagcatgacaagattaccgctgatacacaagctgtgacacatgctgctttcttaagtatgggatctgcgtgggcaaagataaagatttatccttggactctgggtgtaaacaaatggtacggtggcctagaaaatgtgaaagttaatatatcactaagaatctattcgaacaagtggcatgtttacgcaggattagccataacaaacccaagtgcacatcagcaaattcttcaatatgcaaccagtgcaacagaactatttagtttaatgatagataacaaagaacaagaacttactgatagactattaaaagctaagcaatttgtatttggaaagcatactggtctcttactattggatgacacgattttagagaaatattcgctatcaaaaagcagcattggtaacagcaacaattgcaagccagtgccgaattcacatttatcattgttggcgattgttgattcgtggtttcaacttggtattgatccatatgatcatatgatttgttcgacgccattattcagaatattcctgggtgtgtccgaatatctttttttaaaacctggcttattagaacagacaattgatgcagctatccatgataaatcattcataaaagatgatttagaatttgttatttcggctagagaatggagctcggttgtttcttttgccaattttgatatatacaaaaagcaatttcagagtgttcaaaagttctttgagccaatgcttccagaggctaatctcattggcaacgagatgataaaaaccattctgagtcattctagtgaccgttcggccgctgaacaaagaaatacataa

SEQ ID NO: 75577 - DNA, 1242 bp, Saccharomyces pastorianus
atggacacaaattctaaaaccaaagtacaaactgaaaataaaaaaattaaggcgaaatttatacataatcatgggcaaaagccctctcttatccaaattacacctccaatgatttccagcactctgtttcacgcatatccactactactaatattcgacaatgccttagcgaatataatgtggctgtccgacgataaatgtttaacattcatttatctaacgagcatatggctgaccataagtttttttatccccgttgaaacagaggctagccattttctgccatttacaaagattttgagactatggttaggcattataagcggggcatttctattcttatcattcatgtattatattgtttcattgatagcttcgttaagagacacggaacctcctacattggatgaaattgtcgtgctactagagtctgtgttggataaactggaagtactgagaaacgagctgaatgtttggaaaaaattaaagctttcatttgatggcgtcaataaggagtgttctggcaagaggttgttttgcagattattcttattcggtacaatttttcaaattattatcatgagatacatatcaccgggaacttatactagattttttattattaccggcttgatatacaatacgagtagttttcaagctaccttaaggctactttggaggtttactgctgttaggaatttctattatttggggattgaaagttttaaaatttcgagtttcttaccaaaacacttaaagatggaacaaattattcctttatctcaaggacgtgcaatcacggtgccactggtagaggtattgcctaaactacttcgggacaagaagggtgatgaccacattcatattctacagcttctacttaatgagcaaaaagataactttggtaatgaagaccttaaaatactagaaattgaagtatacgaaaatcaaagaaggtggtatcaaaataaaaattggagtacaaaattactgccgtacgaaagacaaaactactgcatagaaattaaaaacactgatggaactttaaccatgaggagttgtttgcccccagatgaacttggtgaagaagaattacccaataattggcattggatcaatgataattgggacggaactgattggatatattcagattcagcatggaaagaaattggacaatacagttctttggaaagttttaccaggtcaagaaaatggaaacgacgcctcttccatttgtaa

SEQ ID NO: 75578 - DNA, 2082 bp, Saccharomyces pastorianus
atgagcactccatttggcttagatttaggtaacaataactcagtactggcagttgccagaaataggggtattgatgtcgttgtcaatgaagtttctaataggtctacaccatccttggtcggctttggccccagaaataggtacttaggtgaatctggtaaaactaagcaaacatcgaatgttaaaaacactgtggaaaacttgaaaagaattattggactaaagttcaaagaccctgaatttgatatcgagaataagttcttcacttcgaaattggtacagctaaaaaatggtaaagttggtgtggaagtcgagttcggcggtaaaacacacgtattttcagctactcaactgactgctatgttcattgataaggtgaagcacaccgttcaagaggaaacgaagtcatcaattaccgatgtctgcctcgcagttcctgtatggtattcggaagaacaacgttataacatagctgatgctgccagaattgcaggattaaatcctgtaaggattgtcaacgatgtgactgcagccgctgtttcgtacggcgtcttcaagaatgatctgcctggttttgaagaaaagccaagaatcattggcttagtggacattgggcattctacctacacctgttctattatggctttccgcaaaggcgaaatgaaagtattaggtactgcttatgacaagcactttggtggtagagatttcgatcgcgcaatcacagaacattttgctgatcagtttaaggacaagtacaagattgacattaggaaaaatccgaaagcttataacagaattttaatcgctgctgaaaaattaaaaaaagtgctttctgcgaacactactgcccccttctccgttgaatctgttatggatgatatcgacgtttcctctcaattgagccgtgaagagctggaagaattagtagagcccttgttgaagcgtgtgacgtatccaatcaccaatgcattggctcaagctaaattaactgtcaatgatattgacttcgtagaaataattggtggtacaacacgtatcccagttttaaagaagtcaatttctgatgtttttggaaaacctttgtcatctactttaaatcaagacgaagctgtggccaagggggccgctttcatatgtgccattcactctccaactttaagggtcaggccgtttaaatttgaagatattgatccgtattcagtgtcatacacttgggataagcaggtcgatgacgaagaccgtttggaagtattccctgctaattcatcatatccatcaactaaactaattactttacatcgtactggagatttcagcatgaaagcggtgtacactcatccttcgaaactgccaaaaggtacttccaccactattgcaaaatggagcttcactggggtcaaggttcctaaagatcaagattttattcctgtaaaggtccagttaagatgcgatccttccggcttgcatattatcgagaacgcttacacaacggaagatattacggttcaagagccagtgcctttaccggaagacgcaccagaagatgccgagccccagtttaaagaagttactaaaacaattaagaaagatgtgctaggtatgactgcaaaaacattcgcgctaaacccggttgagttgaacgatctaattgaaaaagagaatgaattaagaaaccaggataagttagttgccgaaaccgaggatcgcaaaaatgcccttgaagagtatatttatacccttcgtgccaaactcgatgatgaatactccgattttgcgtctgacgcagaaaaagaaaagctaaaaaacatgttagccactactgaaaattggttatatggtgatggtgacgattctaccaaggcaaaatacattgctaaatatgaggagctggcatcgttggggaatattattagaggtagatatttagcaaaggaggaagaaaaaagacaagcactcagagcgaatcaagaaacttctaaaatgaatgatattgctgaaaaattggctgagcaaagaagggcacgcgctgcaagtgatgatagcgatgacaacaatgatgaaaacatagaccttgattaa

SEQ ID NO: 75579 - DNA, 1743 bp, Saccharomyces pastorianus
atgcttatcagatttagatcaaaaaacggtacacacagggtttcttgtcaagaaaacgaccttttcggaacggtcattgaaaagttggtgggtaatctggaccccaatgccgatgtcgacacatttactgtttgtgagaagcccggtcaaggtattcatgctgtttctgaactagctgatcgaacagtgatggatctaggactaaagcacggtgacatgctgatccttaactattcggacaagcccgctaatgagaaagatggtgtcaatgttgaaatcggatccgtaggtattgacagcaagggaattcgtcaacacaggtacggtccactaaggatcaaagaactcgctgtagatgaggaactagagaaagaggacggattaattcctcgtcaaaaatcaaaactatgcaagcacggtgatagaggtatgtgtgaatactgctcgcctttacctccttgggacaaagaatatcatgagaagaataagatcaaacatatatcgtttcattcatatcttaaaaagctaaatgaaaatgctaataagaaggagaacggcagctcttatatttcccctctttcagaacctgattttagaatcaataagcgttgccataatggccatgaaccatggcctcgggggatatgttctaaatgtcaaccatcggcgattacattacaacagcaagaatttagaatggttgaccacgttgaatttcagaagagtgaaataattaatgaatttattcaggcgtggaggtacacgggtatgcaaagatttggctatatgtacggatcttattctaagtatgataacacacctttaggtataaaggccgtcgttgaggcgatatacgagccccctcagcatgatgagcaagacggtttaaccatggacgtagaacaggtcaagaatgaaatgctacagattgatagacaggctcaagaaatggggctttcgcgaattggcctaatatttacagatttatctgacgcgggagctggggatgggtctgttttttgcaaaagacataaggattcgttttttctttcatcattagaagttattatggctgctaggcatcaaacagggcatcctaatgtaagcaagtatagtgaacaaggttttttctcttccaagtttgtaacttgcgttatatcaggtaatttggaaggtgaaattgatatttcgagctaccaagtatccacagaagctgaagcattggttactgcagatatgataagtgggtccacatttccttcaatggcatatattaatgacactacagatgaaagatatgtacctgagatattttacatgaagtcgaatgaatatggtataacagtgaaggaaaatgcgaagcctgcatttccagtagactatcttttagtgacgctgactcatgggttcccgaataccgatacggaaaccaactcgaaattcgttagttccaccggatttccatggagcaatcgacaagctatggggcaatctcaagattatcaagaattaaaaaagtatttattcaatgtggcttcaagtggagatttcaatcttttgcatgaaaaaatctcgaactttcatttactattatacataaattctctgcagatactctctccagacgaatggaagttactaatagaatctgccgtgaaaaatgaatgggaagaatctctactaaaacttgtctcatcggctggttggcaaacgttagtcatgatccttcaggaaagcggctag

SEQ ID NO: 75580 - DNA, 621 bp, Saccharomyces pastorianus
atgtccgaatttaatgaaacaaaattctccaacaacgggacgttttttgaaacggaagagccaattgtggagacgaaatcaatctccgtttataccccactcatatatgtctttattctggtggtgtcccttgtgatgtttgcttcaagctacagaaagaagcaggccaaaaaaattagtgagcaaccatccatatttgacgaaaacgatgcccatgatctgtatttccaaataaaggaaatgagtgaaaatgaaaaaattcacgagaaggtgttgaaggccgctttattgaacagaggagcagaatctgttagacgatcattaaagttaaaagagttggctcctcagataaaccttctatataaaaatggctctattggggaggattactggaagagatttgaaactgaagttaaattaattgaattggaatttaaagatactttacaagaagctgaaagattgcaaccgggctgggttcaattgttcgttatggtttgtaaagaaatttgctttaatcaagctctctctagacgttatcaatcaatcttgaaacggaaagaagtgtgtattaaagagtgggagctgaagataaataatgatggaagattagtcaattag

SEQ ID NO: 75581 - DNA, 2373 bp, Saccharomyces pastorianus
atgggccttttaaaacttttcacaatactacaaataccgacacacgcagttcagtggcctctccgagttcatcatttccattcgtactccttgagcttttaccttccttcctcctcccctatatactcaacttctcagcccacatcaataatgatagcaccagactcacaaagattattcggttcctttgatgaacagttcaaggacttaaaactagattcagtcgatacagaaaacaataacacacacggtgtttctactatcctggattcctcccctgcgagcgttaataacaatacaaacggtactgttgctgcaagcgtgaatacagtccctggatctacgtttagatccaatacacctcttttaggaggtcgacatccactcagtaggacgtcttccttaatcgattctattggtatacagcgtgcggcgtcaccattttcttctatgaaagagccttttattcctcaaagttcgggagtaatgagttcctctttttggcacggcgaccatcctgaatcacgggttagtacgcctgttcagcagcatccactattgcaaagaaacgagtcctcctcctcctttagttatgccgcaaatcttggagtgaatctgagtacacattcattggcggtagatattactccagtaggtacaccaactgctgcccaatctcatgtcaatttgtttccgtcctctgatattcctccaaatatgagcatgaacggaatgtcacaactcccagcaccagtttcagttgaatccagttggagatacatagacacgcagggacagatacatggtccatttactacccaaatgatgtcacaatggtacataggtggctattttgcttcaacccttcagatttcaagattgggaagcactccagaaacgctaggaataaacgatattttcatcacacttggtgagttaatgactaagctcgagaagtatgagacggatccattcactacttttgacaaacttcacgttcaaacaaccagctctggttctatcaacttgaatctagctccttacgcaagcggtgttgccgctactggcactattaaagctactgaaaacgatattttcaagccattgacacatgacaatatctgggatatggatggaggtaccacctccaaaggagtcgatattaaattagcctcagcaaccaccattagtcaaacagatgaatctcacaagcaagaatacaaatcgaccactatgctggaaaaagggaagaaggaaaaatcagaatctgtagcaaaagcgttattggatgaacaagagaaacggaacagagaactcaaaaggaaggaagaagctcgcttatcgaagaaacaaaagcaaaaagaggatgatttattgaagaaacaaaaggaacaaaaggaacaaaaggaaaaagaagctttggaagcagaaaagcaaaaaaaatcagaaaagacaaaaaaggacatacaaacacaaacagaaggctttaagacatcaaaagatttgccttcattaaattcctcaagcgcgaatccggcaccatgggcctcaaaagtcaaagttaataatgcaatcgaaacttcaatcaaaaatggtgtaagtggcactggaaagaagaaaggagaacccttaggtctacaacagaggaacagcaaagaagaaaagcaaaaggaggaactaaaatccgtgcttaactgggctaacaagtccagcctaccatcgaatcaaactattgatattaaatctcagtttcaaaaaagcccaaaagggatgaaagagtcgtctccgttaaaggagttggaagatccaaatttcatagaagagcagaaaaaactatgggaaaaggttcagagttcttccaaacaagtaaagtccgcaccctctgcatctactaccacatcttcttggactacggtgacttctaaagggaaagcacctataggaaccgttgtctccccatattcaaaaaccaataccagtttaaattcttcattaacggcaaaaactagcacaacttctaccaccactacctttgctagcatgaacaatgtttctccccggcaagaatttatcaaatggtgtaaatcacagatgaaattaaattctggaataacaaataacaatgtcttagaactattattgagtttacctacggggccagaatctaaagaattgattcaagaaacaatttatgccaatagtgacgttatggatggtagaagatttgccactgaatttattaaaagacgtgttgcgtgcgaaaaacaaggtgatgatccactaagttggaatgaagcgctagctctatcaggcaatgatgacgacggctgggaattccaagtagtgagcaagaagaagggtagaaaacactga

SEQ ID NO: 75582 - DNA, 315 bp, Saccharomyces pastorianus
atgatttccacagaaaaatcatccgatgcagtagctatgcactgtccatctggagaccagcataactctgagaaaggcctggcatgtgatgtgactagtgtttgtgatacagttcgtctgttaatgtcgtatatcaggatgttaagtccttgtgttatagcaagaaactgcccatcaggagaaattttcgcacaggtagctttcaatccattctgtgtttccacaggagtaacaaactggaacatgctagcatataatggccacttgcaaatgaatgtgcctacgctcaaactttccaatatctaccgccagtga

SEQ ID NO: 75583 - DNA, 948 bp, Saccharomyces pastorianus
atgttccagtttgttactcctgtggaaacacagaatggattgaaagctacctgtgcgaaaatttctcctgatgggcagtttcttgctataacacaaggacttaacatcctgatatacgacattaacagacgaactgtatcacaaacactagtcacatcacatgccaggcctttctcagagttatgctggtctccagatggacagtgcatagctactgcatcggatgatttttctgtggaaatcattcatttatcttatgggctgctgcacacttttatcggccatacagcgccagtgatatctctgacattcaatagaaaggggaacttgctgtttacatcctcaatggacgaaagtatcaaaatatgggacacactgaacgggtctttgatgaaaacgatatctgcacactcagaagcagttgtgtcggtggacgtacccatgaatgattcatccattctgagttcaggttcatatgacgggctcatacggatctttgatgcagagacgggccattgtttgaagacattgacctatgacaaggattggaaaagagaaaatggtgtggtacccatctcccaagttaagttttctgagaatgcaagatatctcctggtgaaatcgctggacggtgtagtgaaaatatgggattgcatcgggggttgtgtagttcgtactttccaggttcagccccttgaaaagggcgtactgcatcattcctgcggtatggacttcttaaatcctgaagatggatccactcctttggtgatcagcggttatgaaaatggcgatatatattgttggaattctgatacaaaaagcctcttacagttgctcgatggttctttatatcatcacaacagccctgtaatgagcatacattgcttcggtaatataatgtgttcccttgcattgaatggagattgctgtttatggagatgggtttaa

SEQ ID NO: 75584 - DNA, 939 bp, Saccharomyces pastorianus
atgaatataatgaaaagacaattatgcacctcctctaagcgatttttttctacagcaaaaaacgttgtcaaatataatacgattcaggatatcaggaacaaatatgttactggtacgcctttgtcgatgtgtactgcgtatgacttcattactgcaacatgggttaacaaggctaattgtgatttactcttaatcggagattctttggcgatgacttcattggggtacgatagcacaattacactatccttgaatgagtttaaacatcatgttgcctctgtgtgcagagctgaaggttcttccatggtagtggtagacatgccattcggtacgtttgaatcgggcatatctgatggcttgaagaatgccatagatatcatgaaattggacagtaaagtcacctcagtcaaagttgaagtcggttcttacaccaaagacaaatatgcaatgaaatttattgaagaactgtgctcccggggtatacctgttatggctcatataggactaactccccaaaaagttcattcacttggaggttataaagtgcaaggtagcaaaagtctattacaaatgcaggagctgtatgaaaccgccatgcaactacaaaaaattggctgttggtctatcctgattgaatgtgtcccccataagatggctcagttcataacatctaaactttcagtaccaacaataggtatcggtgcaggtaacggtaccagtggacaagttctagttatatctgaccttctcgggatgcaaggcgattctgtcccaaaatttgtgaagcaagctgtaaatatgacagatattgccactcagggcttgaaggagtacattgcaagtgtagaggataggacatttcctgagagaggtactcatactttcaaagttaaggaggacttatggaatgaattcctctcttcaattaacgaaaagtaa

SEQ ID NO: 75585 - DNA, 1356 bp, Saccharomyces pastorianus
atgtcagaagtttccaaatggccagcaattaacccattccattggggatacaatggtacagtttcgcatattgtcggtgaaaatggttccattaaactccatttaaaagacaacaaggagcaagttgattttgacgagttcgctaacaaatatgtcccaacgttgaagaatggtgcccaattcaaattgagtccttacttgttcacaggtattttgcaaactttgtacttaggtgctgctgatttctctaagaaatttcctgtattctacggcagggaaattgtcaaattctcggatggtggagtttgcaccgctgactggctcatagattcatggaaaaaggattataaattcgatcaaagtactacgagctttgataaaaaaaaatttgatgaagacgagaaggcgacacatccagaaggatggcctcgtttacaaccacgtacaaggtacctgaaagataatgagttggaagaactacgggaggttgatctacccctagtagttattctacatggtcttgctggtggtagtcatgagccgattataagatctcttgctgaaaacctgtctcgcagtgggagatttcaagtagtcgtcctaaataccagaggttgtgcacgttccaaaattaccaccagaaatttatttacggcttatcacacaatggatattcgcgagtttttgcaaagagaaaagcaaagacatccagatagaaaactatacgctgtgggatgctcttttggtgctacgatgctggcaaactatctgggagaagagggcgataaatcacctttatccgcagctgctactttgtgcaatccttgggatcttctcctttcagcaattaggatgagccaggattggtggtcaagaactttattttccaaaaatattgcgcaattcttaacaagaaccgttcaggttaatatgggtgaattaggagttccaaatggctctctccccgatcatcctcccacagtcaagaatccatctttctatatgttcacgcctgaaaatctaataaaggcaaagagctttaaatcgacccgggaatttgatgaagtgtatactgcgcctgctttaggcttcccaaatgctatggagtattataaagcggccagctcaataaacagagttgatacaattcaggttcctacccttgttatcaattccagggatgatcctgttgtcggcccagatcaaccatactcaatcgtggaaaagaatcctcgtattttgtattgtagaaccgatttaggtggtcatttagcttacctagataaagacaacaactcgtgggctaccaaggcaattgcagaatttttcactaagtttgatgaattagtcgtatga

SEQ ID NO: 75586 - DNA, 2568 bp, Saccharomyces pastorianus
atgtctgaaggaaaacaacaattcaaagacagcaataaaccgcacaaggactccacagatcaggacgatgatgccgccacaatagtaccacaaactcttacttactcacgcaacgaaggtcattttttaggcagtaatttccatggagtaactgatgaccgtaccactttgtttgatggtgaagaggggcgtagggaggatgatttgttgccctcattgcgttcctccaactcaaaagcacacttaatttcttcacaacttagccagtggaattataacaacaatagagtacttttaaaaagatctatattaaagacacaagcttttatggatcaacttcaagaagaaaataatattcgcccgatttttattgctgcaaatgatgaacgggaaaaattacatgttctacaactgaatatcaagctagatggtcagtacaataccaaagaaaagaacggtttcaacattgagaaaaaagctttatcaaaattatttcactctcagatcgtatcagtgacaaatcatttaaacgctttgaaaaaaagagtggatgacgtttcatctaaagtattcatcacaggtgatgtaaatactggtaaatcagctctttgcaactctctattaaagcagcgtttgctacctgaggatcagctaccatgtaccaatgtattttccgaaatactagaggctcgggaaaatgacggcatagaggaggttcatgccataccactaaacattgctccgacgctcaaggaagccattgatatgtattcaatacaaaatccgaaaacttatgaaatacacactttgaaagaacttcccgatttggttccccaaaacggaaaatatgctttactgaagatttacataaaggacgataaaaggcctgcctctactagtctattaaggaatggtactgttgatatttcattgattgactcccctgggttgaacatggactcgttacaaaccgccgaagtaatgtcccgacaagaagaaatcgacttagttatatttgttgtcaacgcagagaaccagctaacactatctgccaaggagtttatttctttagcatctcgtgagaaaaaattaatgttttttgttgtgaaaaaatttgacaaaatcagggacaaacaacgttgtaaggagttgatcctaaagcaaatccgtgacctgtccccagaaacatataaacgtgcagctgattttgtccactttgtttccaaaaacggagatgaattgccacattatcataatgaaaatgacaatgaagatcatggtgacggaaaacctgacgacgacccatattctagcagcgatcccgatccggattttgacagtctggaagattctctacgcaattttgttttgaagaaaagatcactttctaaattgttacctgccaagacttatctatcgaaattattaagcgatataataatgatctccaaatctaatatgaaaatgtatagtgaagaagaaataaaaattaacgaacaactggaaacattgagacctgaaattttgagcgctagagcaaagtgcaatgatttaacaacttccgttgatcaaatggccgagcaaacaattacaatgacttataacaatactaaagaagcacttctcaatgcgttggatgttccgctacacgaatatccgaaatatcagggcctcggtcaaatatatgacttcatattttcaacagaagcattcatagcaaatcagattgatgagtcaataggatcaagtgaattatttgccaagcaaaagacagatttactggtaaaaaaaatttatgagattggaaaaaatgaacttggtgatgatttcatgtgtgaacgtgttttcagaagcgaactaatgtttagaaaaaggaagcatttgataggaaaaaggcttaaagtatctttgtcaataactgatttgtttgctccaacttggaaaggctttttgtcttacttaagctggcagaaacctgtcacagaaccactgccggatatagaaggacaaactaacgagggtcagattggcctaatgaagtatttgggtttgaaaaattatcctttgacacaatattggtcaagaccatcattgctcttcacatcaaaaattcccactctaacgctgtactttctaggaagtacaaaggtagtagggaacattatattaaacggcattaaattatcgtcgtggagctcactcaagaagttatcagttccggttatagtggtaggttccttgttgggacttacgtatttaatccatgacctcccccgtgccttaccaatgaatctttccattaaatacaaaagaaagttgcaagaactggattacattcatcttaacgctcaaagaacctcaaatgaagtacgtgatgttttgcgtgtacctacacgtgaaattctaaggtcgtgtgaaataattatggataaaaaacaaatcactaagaaagaattggaaaacaaaaaagaaagtaacttgttgtcaatcaaattcttccaatctctatacgaaggaaccgtggctcaaaaattgatggtggaagaaataaatttagacatcgattag

SEQ ID NO: 75587 - DNA, 1719 bp, Saccharomyces pastorianus
atgggaagtgaaccgtttcagaaaaagaatttgggtctgcaaattaattcgcaagaaagtggaacaacccgctcaacatttcattcgctagaagatttaggagatgatgtaattaatgaaagctgggatcgtgtgaaccaaaagagagccaatacagatcatgatgtctttcatgagcaccctgactcttccccatcattatcagcacagaaagcaaaaacaaaagaagaggaagttgctgtaaagtcatcgaactcccagtcaagagacccttctcctgatactcaagcacatattccatatacttatttttccaaggatcaaagactaatcatttttggaattatcatttttataggatttttgggcccgatgtctggaaacatatatataccggctttaccattgctgcaaagggaatatgatgtaagtgcaacaacaataaacgctacagtttctgtatttatggctgttttttccgttggtccattgttttggggctcactggcggattttggtggaaggaaattcttatatatggtgtcgttatcactaatgttaattgttaatatacttttggccgctgtaccagtcaatattgctgccctttttgttttaagaattttccaagctttcgcttccagctctgtgatttctctgggagctggcactgtaacagacgttgttcctccaaaacacaggggaaaggccatagcgtatttcatgatgggtccaaacatgggtcctattatagcacccattgttgctgggcttattttaatgaaaggaaattactggagatggctttttggtttcacttctatcatgacaggaatagcattgatcttggttactgctttacttccagaaacgctacgttgtataattggtaatggagaccctaaatggggtggcaaaaaagatgaacgtgaaaataacgaatctccattcttcgaaggtaataaaatatcacatcggcgtctgttcccagacattggtattcgtaaaccagtcaataatgatgctttcttccaagaaaattttccaaagccgcctaaagcaggtttgacactatattggaaaatgattaaatgtcctccaataataatcacatctgtcagtactgcactcctgttctccagttactatgcgttcagtgtcacgttttcgtattaccttgaacatgactactgttttactatgttagaaattggtgctgcttatgtctgcccaggtgtagccatgttactaggatctcaatctggtgggcacctctcagattatcttcgttcacgctggatcaaaagtcatcctaaaaagaaattcccggcagagtttcgtttattactgaacctaattggaattttactaacaatatgtggcacaataggatacggatgggcaatcttctttcattatcattttgtggttcttttagttttttccgctctcactgcctttggtatgacctggtgcagcaacacatcaatgacatatttaactgagttactccccaaaagagctgctggaactgttgctgttagcagtttctttcgaaatgtgggcgctgccattagttccgttatcattttacagctctgtaacgcaatgggaattggatggtgttttacagggctaggtctctgcagttcaatttcattgattggtatattatatcttctcatttttcaaagaaaatatactgccaaagaattttaa

SEQ ID NO: 75588 - DNA, 1359 bp, Saccharomyces pastorianus
atgggtagaagaaaaattgaaattgaacctatcaaagatgatagaaatcgtacagttactttcataaagcgaaaagcaggactgtttaaaaaggctcatgaattgtcagtactttgccaagtagacattgctgtcattattttaggatccaataatacattctacgaatactcttctgttgatatgagtaacctgcttaatgttcatcaaaacaacactgatcttcctcataatatcatagaaccatctgattatggtgactatgtgaaaaaaccacgtgttgttctgaatgaaaggaagcgcaggcgaagaagagcaaccgtgttgcaaccagcttcccattctgggagttgtacagtttcgagtcaagacccctccagtgtacaaaacaatgggaatttaagcgctccgttggcgtcaaatgacgccgggaacgctggtgtaagtacaccattggtgcattgccacggagcaatatcacgtagcggatccaatcattctgactgtacaagaaatagtgcagattatcaaatgttgcaaggcggtttaaattctggtgggagtttacatgctaatgattataaagaaagcgtagaccaacagcatgttgcaaacgaggctattcataggaattttatgaacaagcggattaggccggatactcatttactactttctgaatctaaccactctaattatcataatttttacccgtcaccttacgagaatttgccaaagccttcattgcctgcaagtttagtgggcaatattccatcctttcaatcgcaatttgtacaggttattccggcaaatagtaacccaatgggaaaaggatttaatggcacgggtgacagcgaaagctttgaagcaaagcaaaagatacacccgacagttgctatatcaaatactttggaaggtccagctccagtgcaggcgatggtccatcacctgcaccaactgaacagcaatagaggaaagctctcagggaagccatatttaaagctaaatattccgaaggccacaaatgacgcttgccagaggtcgccagcaatgtattcaggaactgcatcaccgaaaacggatgtacaagccactcccaatcaaatgctcgccagcaacatgtcctcccctctttctcgttcaaaatttttgggattcaagaacaatgatatggacgacttatatcataatggccgatgtggcagcacttatgtaaataacaaaacattctttctgaaaccgccaattggaagaccgcctaaatttccgaaaagcccgtcttcatctattgtggtttttccttcctcggtagctagttcaactttgaaatccacgagttcgacaaactctccagattaa

SEQ ID NO: 75589 - DNA, 951 bp, Saccharomyces pastorianus
atgggaatatttcgttggaactatccagagagttctgtccccggcgtttggggagaaacaacttccactattgactggtgtgaggagaactatgtcgtttctccttatattgccgagtggtcaaacactttaactaacagcgtattcatactgtcagcgatttacacaacttactctgcttacaagaataaattagaaaaaaggtttttacttattggcttcgggtacggtttggtcggagtaggatcatggctatttcatatgacactgaagtatagattccaactattggatgaacttccaatgatatacgccatgtgcattccgacatggagtttagtatgcgaggccaaagaggcattacttaacggagataatcacaagaaggttcctctatttgaacagatgttcatcggcgtaattatcggcctggccgttacaacagcaagcatactctacgttatttacaaaaatgtcgatatccatcaaattttgtttggcgtacagattgtagttgtggctgctactgcaggaagtttaacgtacagatacgtccatgatccactagctaaaagaaatctcaaggcttcaatggcgctcggcgcaattttgttcttatctggctacatttcgtggctacttgatatacactattgttcgttctgggtgcacgttagaagaagtattttggctttaccacttggtgtactgcttgaaccacacggatggtggcatatattaactggtatggggatttatttctacattgtttctttggaacatttaagggtcattacgctcaacgtcagctgcaattaccagttcatctggagatggaaagtcttccctgaactgatatggaaagggcgcaaaccctcaacaagatattcacttgaactatttggcccatacgtagaagatcaatcaattgaagttaaaaaggagaagtaa

SEQ ID NO: 75590 - DNA, 837 bp, Saccharomyces pastorianus
atgagtgtattaagatctacatgccttttcttccctccaagatccttgttgatatcatttaacaagcggcgattattttcaacttcgaggctaattttgaataaagaaagtgaaattacaaagaagaaagataaaagtaagcagcaagattttaatcctcggcacctgggtgttgctgccgaaatatttatcccctcggcttacaagaaccttccaaatgtatttgcccatcctctcattgttgcaaatgcattgatcagaagactttacacatttggtttgaactctgttcaagtcgcattgtttcgttttcaatcaggcattaaaccttcttttttactctggaaaaacaaagccatagagacgtatatcaatgtaaacacgtcgtttgctcataaaaatttgtcggacatcaaagggttagtttcattatgggttcaggaagctctcgaggctaggtcccgtcaacttccaggtaatgcaacactggactggcagttgataaagtttaatgcagttcctaaactagtctcagtgcaaccaatcatgattcccggaatgccgttagagcatttacagttggtttacaaatttgatacgaagcaaagactaattaaagtcaatcagcaaactaagaagactgagacgttagaccgtgacgttgtagactatattgcctttttgtgtgatgctacaactaatgatatgattttaatgggatctttgtttgaaagtaaaccaaatgataaattaccgaaaagctacgaggacgatgctaaagttgccatacacagaatgaaagttaacggagatatatatcgtttacctccaagctaa

SEQ ID NO: 75591 - DNA, 1134 bp, Saccharomyces pastorianus
atgcctaaaaaatccatagaagaatgggaagaggatgccattgaatcagttccgtatttagcaagtgatgaaaagggctctaattataaggaagctacacaaattccactaaatttgaagcaatctgaaattgaaaatcatccaacagtaaaaccatgggttcattttgttgctgggggtattggaggaatggcgggtgcagttgttacgtgtccatttgatttggtgaagacccgattacaaagtgatatatttttgaaagcatacaaatcacaagctgttaatatcagtaaaggatctactcgtccaaagagtattaattatgtcattcaagcaggaacccatttcaaggaaacactgggaatcataggcaatgtgtacaaacaagagggttttagaagcttgtttaagggtttgggccccaatttagtcggggttattccagcaagaagtattaatttttttacctatggaactactaaagatatgtatgctaaagcgttcaataatggccaagaaacacctatgattcatctgatggctgctgcaaccgcaggttgggcaacggcgacggcaaccaatcctatttggttgattaaaacaagagtacagcttgataaagctgggaaaacatcggtccgacagtacaagaactcttgggattgcttgaaaagtgttataagaaatgagggtttcaccggcttgtacaaagggttgagtgcctcttatttgggttctgttgaaggtatacttcaatggctattatatgaacaaatgaagcggttaataaaggaaaggtctattgagaaatttggatatcaagccgaaggtacaaaaagcacatcagagaaagtcaaggagtggtgtcaaagatcaggaagcgctggtcttgcaaaatttgtggctagtatagcaacatatccgcacgaagttgtcaggacgagattgagacaaacgcccaaggaaaatggtaaacgaaagtatacaggtttagtacaaagtttcaaagttataattaaagaagagggactcttttcaatgtatagtgggttgaccccgcatttgatgagaacagttccgaacagtataattatgtttggtacatgggaaattgttataaggctactatcgtag

SEQ ID NO: 75592 - DNA, 672 bp, Saccharomyces pastorianus
atgtcacaatctactgcatcactggtaccagagggcaatcaaggctccctccaagaagatgttagttttgatttcaatggtgtacctggccaggctttagatgccgtgcgcatgcgtttggctcaattaactcattcattgaggagaatcagagacgaaatgtccaaagccgaactgccacaatggtatacactccaatcacaactaaatgtcacattatcccagctcgtttctgtaacctccactctacaacatttccaagaaactttagactctacagtggtttaccctttgcctaaattcccaaccacctctcatgaaagtttggtcactacccttttgaggaagaagaatatccctgaagtggacgaatggatgaaatatgttagggaaacatctggagtaactacagccttgctaaaggatgaagaaatagaaaagctgctgcaacaggacagagaaataacgaattgggcgcgcactacgtttagaaacgaatatggaaagcacgatttcaaaaatgaagaatccctaagcgaagaacacgcttcacttctagtacgagatagcaaaccttcgaaacctttcaatgtggatgatgttctaaagttcaccttcacaggggaaaagcccattattacgggatctactccaacatcatctagtaattga

SEQ ID NO: 75593 - DNA, 372 bp, Saccharomyces pastorianus
atggatcgaaagaaggacccaagtaataacttaacagaaagaagggtttccaaggttcaacgcccaaataagaaaaaggtacgaaatcaagttgaatcactttctagaaacctagagagaaataaagagggacagcttctgcagactgtatcaaaaggtcatttagaagctgattctggacactcactgggtcgtgaaaaagagaacggtgaactcggtataagaagtatattttacgataaagactggaatccaaggggcactgcaccatcacattacagaaatataccttataatcctgccactttcaaaaggcgaactgaagttcaagccagactaggaaacctcgagaatatcaaaataccaaagtga

SEQ ID NO: 75594 - DNA, 1269 bp, Saccharomyces pastorianus
atgaatcagtgcgcgaaggacataactcatgaagcctccagtatacccatcgatttgcaagaaagatactcgcactggaagaaaaacactaaactactttatgattacctaaacacgaattcaacaaagtggccgtccttaacgtgccagttctttcctgatttagataccacttcggatgagcatcgcatcttgttatcctcatttacatcttcccaaaaacctgaagatgagaccatatatattagcaaaatatccacgttgggtcatataaaatggtcatctttaaataatttcgaaatggacgaaatggaattcaaaccggagaactcgacaaggtttccctccaaacacttagtaaatgacatcagtattttcttcccaaacggggaatgcaatagggcaagatatttgcctcaaaatccagatattatagccggcgcctcttcagatggtgcaatctacatattcgatagaacaaaacacggctctactagaataagacagtccaaaatttcacatccctttgagacaaagctgtttggttcacatggtgttattcaagacgtggaggcaatggatacttcttcggcagatataaatgaggcgacttctttagcctggaacttgcagcaggaggcccttttactgtcttctcactccaacggccaagttcaagtttgggacgttaaacaatattcgcatgagaaccctataatagatttacccttagtgtcaataaacagcgacggaacagcggtgaatgatgtaacttggatgccaacacacgattccctctttgctgcttgtactgaaggaaatgcggtctcactattagatctgaggactaagaaagagaagctccagagtaaccgtgaaaaacacgatggtggagtaaactcctgtagatttaactataagaactctttaattctagcatctgcagattcaaatgggaggctaaatttatgggatattagaaacatgaacaaaagcccaatcgctaccatggagcacggtacttccgtttcaactttagaatggagtccaaatttcgatactgtattggcaacggctggccaagaggatgggttagtcaagctatgggatacctcctgcgaagaaactatatttacccatggtggtcatatgctcggtgtgaacgacatttcgtgggacgctcatgacccttggttaatgtgcagtgtggcaaatgataattcagttcacatatggaaacctgcaggaaaccttgttggacattcgtga

SEQ ID NO: 75595 - DNA, 1665 bp, Saccharomyces pastorianus
atgtccaataactcattcactaacttcaaactggccactgaattgccagcctggtctaagttgcaaaaaatttatgaatctcaaggtaagactttgtctgtcaagcaagaattccaaaaagatgccaagcgttttgaaaaattgaacaagactttcaccaactatgatggttccaaaatcttgttcgactactcaaagaacttggtcaacgatgaaatcattgctgcattgattgaactggccaaggaggctaacgtcaccggtttgagagatgctatgttcaaaggtgaacacatcaactccactgaagatcgtgctgtctaccacgtcgcattgagaaacagagctaacaagccaatgtacgttgatggtgtcaacgttgccccagaagtcgactctgtcttgaagcacatgaaggagttctctgaacaagttcgttctggtgaatggaagggttataccggtaagaagatcaccgatgttgtcaacatcggtattggtggttccgatttaggtccagtcatggtcaccgaggctttgaagcactacgctggtgtcttggatgtccacttcgtttccaacattgacggtactcacattgctgaaaccttgaaggttgttgacccagaaactactttgtttttgattgcttccaagactttcactaccgctgaaactatcactaacgctaacactgctaagaactggttcttgtcgaagacaggtaatgatccatctcacattgctaagcattttgctgctttgtccactaacgaaaccgaagttgcaaagttcggtattgacaccaaaaacatgtttggtttcgaaagttgggtcggtggtcgttactctgtctggtcggctattggtttgtctgttgccttgtacattggctatgacaactttgaggctttcttgaagggtgctgaagctgtcgacaaccacttcacccaaaccccattggaagacaacgttccattgttgggtggtttgttgtctgtctggtacaacaacttctttggtgctcaaacccatttggttgctccattcgaccaatacttgcacagattcccagcctacttgcaacaattgtcaatggaatctaacggtaagtctgttaccagaggtaacgtgtttactgactactctactggttctatcttgtttggtgaaccagctaccaacgctcaacactctttcttccaattggttcaccaaggtaccaagttgattccatctgatttcatcttagctgctcaatctcataacccaattgagaacaaattacatcaaaagatgttggcttcaaacttctttgctcaaaccgaagctttaatggttggtaaggatgaagaacaagttaaggctgaaggtgccactggtggtttggtcccacacaaggtcttctcaggtaacagaccaactacctctatcttggctcaaaagattactccagctactttgggtgctttgattgcctactacgaacatgttactttcactgaaggtgccatttggaatatcaactctttcgaccaatggggtgttgaattgggtaaagtcttggctaaagtcattggcaaggaattggacaactcctccaccatttctactcacgatgcttccaccaacggtttaatcaatcaattcaaggaatggatgtga

SEQ ID NO: 75596 - DNA, 150 bp, Saccharomyces pastorianus
atgtcccgtgtctatatatatccattgacggtattctattttcttgctattgaaatgagcgttttttgttactacgattggttttacagacggaattttccctatttgtttcgtcccatttttccttttctcattgttctcatatcttaa

SEQ ID NO: 75597 - DNA, 105 bp, Saccharomyces pastorianus
atgtgggtagtactttcaaaagaaaaaatattactgaagaaggcatactacgccaagactattttattctcagcacttgttctacgtggggttagaggcgagtaa

SEQ ID NO: 75598 - DNA, 2397 bp, Saccharomyces pastorianus
atgtcacagaagcaaagtacgaatcagaatcaaaatggcacgcatcagccacaaccagtaaagaatcaacgaactaataatgctgctggcgccaattccggccagcagccacagcaacagagtcaaggccagtctcaacagcaggggaggtccaatggtccgttttcggcgtcagacttgaatagaattgtcctagagtacctgaataaaaagggataccaccgtacagaggccatgctgagagccgagagtggacgtacactaacacctcaaaacaaacaatcaccagcaaatactaaaacaggtaaatttcctgaacaatcatcaattcctccgaaccccgggaagacagctaagcccataagcaatccaactaatttgtcatccaagagagatgcagaaggtggtatagtatctagcgggcgactagaagggctcaacgcacctgaaaattatatacgtgcatattcaatgttgaaaaactgggtagattcgtcgctggaaatttacaagccggaactaagctacatcatgtacccaatattcatttatttatttttaaatttggtggccaaaaatcctgtttacgcccgtcgtttctttgatagattttctcccgattttaaggacttccatggctcagaaattaatagacttttcagtgtcaattctatagatcacatcaaggaaaatgaggtcgcaagtgctttccagtctcacaagtacagaattactatgtcaaaaaccactttaaatcttctcttatattttttgaatgaaaatgagagtattggaggttcattaataattagtgtaataaatcagcacctagatccaaatattgtagaatcagtaaccgcaagggaaaaattggctgatggaataaaagttctcagtgatagtgaaaacggaaatgggaaacaaaatttagaaatgaattctgttcctgtcaagctgggacctttcccaaaagacgaggagtttgttaaggagattgaaactgaattgaaaattaaggacgatcaagagaaacaactaaatcaacaaactgcaggtgacaattacagtggagccaacaatagaaccttattgcaagaatataaagctatgaataacgaaaaatttaaggataatactggcgacgatgataaagacaaaattaaagataaaatcgccaaagatgaggaaaaaaaagagagcgaattgaaggtggatggtgaaaaaaaagacagcaatttatcttcgccagcacgtgatattttacctttaccaccaaagacggcactagatttgaagttggagattcagaaggtcaaggaatctcgtgatgccatcaaactagataatttacagttggccttaccaagcgtgtgcatgtatacattccaaaacacaaataaagacatgtcatgtttagatttcagtgatgattgtaggatagcggctgctggctttcaagacagttatatcaagatctggtcactcgacggctcatcacttaataatcctaacatcgcgttaaataacaacgacaaggatgaagacccaacgtgtaaaactttggtggggcacagtggtacagtatattcaacaagtttcagtccggataataagtatttactttctggttctgaagataaaaccgtcaggctatggtccatggatactcacaccgcgctagtaagttataagggccataatcaccctgtgtgggatgtgagtttctccccgctaggccattatttcgccactgcatcgcacgaccaaaccgcaaggttatggtcatgcgatcacatgtatccattaagaatatttgcaggacatttaaatgatgttgattgtgtgtcatttcatccgaacggttgctatgtgtttacaggatccagcgataagacgtgtcgaatgtgggacgtttctacgggcgactcggttaggttatttcttggacatactgcgcccgtcatttctattgctgtttgtccagatggtaggtggttgtccactggtagcgaagatggtattattaatgtatgggatattggtaccggcaaaaggttgaaacaaatgcgtggccatggtaagaatgccatttattccttatcatatagcaaagagggaaacgtacttattagtggaggtgccgatcacacagtccgtgtatgggatttgaaaaaggccactactgagccaagcgcagaaccagatgagccatttattggatacttgggtgacgttactgcatctataaaccaagatataaaagaatatggtcgcagaagaacagtaatacctacaagcgatttagtagcgtcgttctacaccaaaaagacgcctgtttttaaggtcaagttcagcagaagcaatttagcccttgcaggaggtgctttcaggccataa

SEQ ID NO: 75599 - DNA, 1656 bp, Saccharomyces pastorianus
atgctgaaaaacttcaaactctcaaaaagagatagtaatgggtcgaagggcagaattacatccgcagatatttccacaccttctcatgataatgggagtgttataacgcatattaagacagtaccagtgaggtacctttcttcatcttccaccccagtgaaaagccaacgggactcttcaccaaaaaacagacataattctaaagatattacttctccagagaaagttataaaagccaaatacagttatcaggcacaaacttcaaaggaactatctttcattgaaggtgaatttttttatgtatctggagatgagaaggattggtataaagcttcaaatccttctactggaaaagagggtgttgtccccaaaacctattttgaagtgtttgatagaactaaaccttcctctgtaaatggatccaatagttcaagtcggaaggttacaaatgattcattaaacatgggatcgttatacgccattgttttatatgactttaaggcagaaaaagctgatgagttgacaacttatgtgggagagaatttgtttatttgcgcccaccataactgtgaatggttcattgctaagccaattggtcgacttggagggcccggccttgttcctgttgggtttgttagcatcatagatattgccacggggtacgcaacaggtaatgacgtaatagaagacatcaagtcagttaacctaccaactgttcaagaatggaaaagcaacattgcaagatacaaagctagtaatattagccttggttctgtggagcagcagcagcagcaatccattacaaaacctcagaacaaaagcgcaaagctggttgacggtgaattattagtgaaagcatccgttgaatcctttgggttagaagatgagaagtattggtttttagtttgctgtgaattatctaatggtaagacgaggcaactgaaaagatactatcaagatttctacgatctgcaggttcaacttttggatgcgttcccagcagaggccggtaagttgagggatgcaggtggacaatggtccaaacgtataatgccctatatccctggacccgttccatacgttaccaatagtataacaaaaaaaagaaaggaggacttgaatatatatgtggcagacctagtaaatcttcccgattatatatctcgctcagaaatggtgcattccttattcgttgttttgaataatggtttcgacagagaatttgaaagagacgaaaatcaaaacaatattaaaacattacaagaaaacgatacagcaacctttgcaacagcatctcaaacttctaattttgcctcaactaaccaagacaacactttaactggcgaagacttgaagttaaacaagaaactctcagatttatctttatcgggctccaagcaggctccagcccaatcaacttctggattgaaaacaactaaaattaaattttattacaaagacgatatttttgctttaatgctgaagggtgacacaacctataaagaacttcgtagtaaaatcgctccaaggattgatacagataattttaaattacaaaccaaattatttgatggtagcggggaggaaattaagactgattcacaagtcagtaacataatccaagccaaactgaaaatttccgttcacgatatttga

SEQ ID NO: 75600 - DNA, 165 bp, Saccharomyces pastorianus
atgcttttgtgcttccatatgtgtcaaaggataatgtggctccccttcgatttaatgaagtggcgtagatttcattgtggcgctgttcttgttggaacactgagcttacgtaaccgcaacccaaagatactttctctttattttattagcgataggacaggctaa

SEQ ID NO: 75601 - DNA, 636 bp, Saccharomyces pastorianus
atggatgctgtaatactgaatctcttaggcgacattcctttggtcacaagattatggacaattggctgtcttgtactatcaggtctcacaagtctccggattgtggatccagggaaggtagtgtacagttatgatttagtattcaaaaagggacaatatggaagactactttattcgatattcgattacggcgcatttaattggatatctatgataaacatctttgtcagcgctaatcacttgtcaactttggaaaactcattcaatctgagaagaaaattctgttggataatatttttactgttggtgatactggtaaagatgaccagcattgaacaacctgcagcatcactcggtgtgttattgcatgagaatctcgtgtactacgaacttaaaaagaacggaaaccaaatgaacgtacgattcttcggtgtcattgatgtttcaccatctatattcccaatctacatgaatgcagtaatgtattttgtatataagcgtagctggttagaaattgccatgaatttcatgccaggtcacgtaatttactacatggatgatataatagggaagatttatggcatcgatttgtgtaaatctccgtacgactggttccgcaacactgaaacaccctaa

SEQ ID NO: 75602 - DNA, 2538 bp, Saccharomyces pastorianus
atgagtgcggcacttccatcaattcagcttcctgtcgactataataatctttttaatgaaatcaccgatttcttggtgactttcaagcaggatacgttgtcttccgatgcaacacgaaatgagaacgaagatgaaaatttggatgctgagaatatcgaacaacatctattggaaaaggggcccaagtacatggcgatgctacagaaagtggctaatagggaactgaattccgtgattattgatttagatgacattctacagtatcaaaacgaaaagtttctccagggcacacaggcagacgaccttgtgtctgccattcagcaaaacgctaatcacttcactgaattattttgccgtgccattgacaacaacatgccgctaccaacaaaagaaattgactacaaggacgacgttcttgatgttattttaaaccaaaggagactgaggaatgagagaatgctctcggacaggaccaatgagatccgaagcgaaaacctcatggatactacgatggatccaccctcttccatgaatgatgcgttaagagaagttgtcgaggatgaaactgagttatttcctcctaatttaactagacgctatttcctttattttaagcctctatcgcaaaattgtgctcgtcgttacaggaagaaagcaattagttctaaaccattatctgttagacagattaaaggtgacttcctaggccaattgattaccgtcagaggtattatcaccagagtttctgatgtcaaaccagctgtggaagttatcgcatatacctgcgatcaatgtgggtacgaagttttccaagaggtcaactctcgtacttttaccccgttgtcagaatgtacttccgaagaatgttcccaaaatcaaacaaaaggtcaattgtttatgagtacacgagcttccaaatttagtgcctttcaggaatgtaaaattcaggagttatcacaacaagtgccagtgggtcatattcctaggtcgctaaatatccacgttaacgggacgctggtaagatctctatcgcctggtgatatcgtcgatgtaactggtatattcttgccagcgccctacaccggtttcaaagctttgaaagctggcttactgacagaaacttatttagaggcacagtttgtccgtcaacacaagaagaaatttgcgtctttcagtctgacttctgatgtagaagagagagttatggaattaatcacctctggtgatgtatataataggctggcaaaatctattgcaccggaaatctacggtaacttggacgttaagaaagcgttgctgctattacttgtcggaggtgttgataaaagggtaggtgacggtatgaaaatcagaggtgatatcaatgtttgtctgatgggtgatcccggtgttgccaaatctcaactgctgaaggccatttgcaaaatatcacctcgaggagtgtataccactggtaagggttcctcaggcgttggtctgaccgctgccgtcatgaaagatcctgtcacggatgaaatgattctagaaggtggtgccttagtactcgctgataacggtatttgttgtatcgatgaatttgataagatggatgaaagtgacagaacggcaatccatgaagttatggaacaacaaacaatttcgatatccaaggcgggtatcaatacaactttgaacgccagaacctcaatcttagcggcagcaaatccgttgtatggtagatataatcctagattatcacctctggacaatataaatctaccagctgctttactatccagatttgatattctcttcttaatgttagatataccaagtagagatgacgacgaaaaattagccgagcacgttacatatgtgcatatgcataataaacaaccggatttggacttcactccagtagaaccctctaaaatgagagagtacattgcctatgctaagacaaagaggccagtgatgagtgaagctgtaaacgattatgtggtgcaagcttacatcagattaagacaagactccaagagagaaatggattccaaattttcctttggtcaagccactccgagaactttactaggtattataagattatctcaagcgctagcaaagttaaggttggctgatatggtggatatagatgatgtggaggaagccttgaggttggtccgagtctccaaggaatcattgtatcaagaaaccaacaaatctaaagaagatgaaagccccacaacgaaaatctttacgatcatcaagaaaatgttacaagaaactggtaaaaacacgctatcatatgaaaatattgtgaaaactgtaagactaagagggtttaccatgctacaattaagcaactgtatccaagaatattcttacttaaacgtctggcatttaattaatgagggtaacactttgaaattcgtggatgacggtaccatggacacagaccaggaagactcactagtgagcacgcctaaactcgcaccacaaacgaccgcttccgctaacgcgagcgcccaagattctgatatcgatctacaagacgcttga

SEQ ID NO: 75603 - DNA, 2775 bp, Saccharomyces pastorianus
atgtcaagtgcttcaagacttcaaaacgtcaatattgtttctaacaactattctcgttacggaacttccgtttacgataagttgtatcataataacggcagtggtagcaataatgctggtaagaattctaccacagttggtaaactgtcatctatctcacaaaagtccaggagcaaacagcgtcatggctcaaattgctccagatcaatgagtcaatcacccttatcgacgttcaaatctccactcagcaatcaaaatcaatccagcgctcctgatgatttggcttccataggtcagagacgcagtgacgacgtcacatctttagataatgaaactatcataacgatgaattcaaggaaatcaaggattaaaaaaaagtataaatccttaatctccacctcttcaaaaaaatttatgaataaattgtacgatcatggtgcttcatccgactcattttctatattttctttgaagacttcccattctggtaaacatgaaaattccagatttgaaaagctgaggaagagaaaataccatgcttggggcaaatttgccgatatcaacgatttaccagttgaaataattgccaaaatactttctgaattcgagttaggccgtgatcaaaagacactcgtaagatgtctatacgtatcgaagaagttttataaggcgacaaagatcgtcctttataggctaccttacttcacttccacttacagagtggcgcagtttgtcacctcactaagattacatccggataacggggcatacgtgaaagtattggacctatcacacttgaagccgggaattataggccaagactcgaaggattctcaaggcctagacgatgatggccactcaaggcgtcacagacgccgtcgccgtagatctactaacacaagtttgaatctacctccagctaccccgacatctaccatttctaacgaggatgatgccaatagcggattaatcaaagacgacgcttcaaatggcagtgaagttgaagacttggcattagctggttggagagactggagatacagaaatgaacccctttatagctctcctctgttgaacagctttaaactgaaaaaagtggtttctcgttcttcttctatcacttctacatcttctggaaattccaccggtgttcactctacaaggagacaacgttccaatagttccgttgcttccataacgacgagtatcatgtcatccatctataacacctcccatgtctcattgtcttcaaccacgtctaataccagcaatggtaacatctcttctggtagtaatctgtcaagagtttccactgctggatcattgaaaaaagcttctgcgaagtccacaaggtcatctcctcagaaagcaaaacctatatctgacattacgtcatcttcctggtttagaatgaggttaagttcaagaaatagaaaggcaaggacagctaatacgattaatttaaagaactcgaaggataagtctgacgatgactttaaagttataaagcacgattcggggcatccatccaattatcgttcttcgacattaaaatttagcattgaacaaccatttagtacgcatcatccgtatgccaacaaatttcttttaaagtatgctccttataaagatctgcccctaggttatattttacatatgctgaacttgtgtcctaaccttgttgaactaaacctttccaatttagttatttgtaccgatttcaaattaatcaaccaaagatccgaaagaagaaggatgacatcttcactgttgcccgctgtccaggagtctagtgtttctgcaggccctgagaaagatttagaaattgtctatatgaccgattctggcaaaggttatgaatattatgaggggttaagcaagaaacactcacgttcttcaagcctaggtaccaatccatctagttggattggaggtcaggcgaattggacagattacccacctccaatcgatgcacaaacgaaaacaagagaggaacacagacgcaacaataccttgaacaataagaacgtcgtattaaagaagctaaacccttttgaaatttttgaaatgatctgtaatagaaatgaagaaaaaggtggctactgctccttaactaaggtgaaaatgaatgacattgtgtggtgcaggcaatacatggtaaagtattttgtaatgaggacgtttcgccagcatttggattataaatccatggaaaacaactcttatgaaagacacttattcagtttccgggactctggcttggatagaaatttttcctgggcttgtaatgccaaattgcatgaatttgtcgcattgatggttatggatcatctttcaaatttagatgatttaggattagaagagctttttaatatcaagtccgaaaagctatatataaaaaactattgttgccgagacccggatattctcgaaatatcaaacttatttgatattagatatggggccggatctggggctgatgctacttctgattccaatcccgaagcagaatctttacaattcaggttgacaatattaaaaacagaaaagccaacttcattttggctcacaaaagtttccaaagattatgtttctttagtggttaaattatgtgtggatgatgacattgatatggacaaaatgaaagttggaaaaccaactttgagaatagacagtattacacacaatttgattagcaggttgaaggagttgaggagagttgatctaaggagaaatgttggcgaaaataactactatgctgaaagcatcatataa

SEQ ID NO: 75604 - DNA, 1128 bp, Saccharomyces pastorianus
atgaatatggcagaacgtgcagaggcaacaaaaagttggtcctgtgagcccctttctggaaaggcgctagaagtgattgttcaaaatgcagaaaatgcagctgatttggtagcttacattcgcaaaccagaggtagatttggactttaggttgaagtttatcgcagaacatgaggagttttttaatgtacaactatcggatcgaacttcaagaataaggacgtgtcacaacttgagcgataaagggatacggagtgatactgttttcgtcttcgtgcctgggttggctggcaacttagaacaatttgaacccttactcgagcttgtggaatctgatcaaaaggcatttttgacgttagatctgcctggctttggtcatagttcagaatggagcgactaccccatgctgaaagtggtggaacttattttcgttcttgtatgtgatgtcttaagaaaatggtctacagcggtgccaaataatgataatgtaaatccatttaacggtcataagatagtgcttgtaggacattctatgggttgttttctggcatgtcatctttacgagcagcacatggctgatacaaaagcggtacaaacgctagttttgttgacgccccccaaagcacatatcgagcggctttctaaggataaacatattatccagtgggctctctatggtgtgtttaaattgccatggctatttgacgtttatagaaacaaattcgatcaggtaaaaggtctacaaagttccggcatcaagcagtatttttatcaacaaggtgatgatgtcaagttgaaatacaggaagttctggcaatttaaaaacaacataagcaacaaaagtagaaccatcataggttatttactaggatgggaaactgttgattgggttaaattcaatggtgtattgacgcaaacggatatgaaacagaaaattataatatttggcgctgaaaaagatcctatagctcctattgaaaatttggaattttacaaacaaactataaataaagaatgtcttcgtaaagtgattattttacctgactgttctcataatttatgcttcgaccgtccagaattggtgtgtgaaaactttcaacgagaggtgattgataattccaaattgtag

SEQ ID NO: 75605 - DNA, 1215 bp, Saccharomyces pastorianus
atgtctgtgcaccacaaaaagaagctaatgcccaaatcggcattgctgattagaaaataccaaaagggaatcagatcatcattcattgggctcatcatagtgttatcctttttatttttcatgagtggctcaaggtccccagaggtaccaatagctcagggcaccagtgtcagtcgtgtagccagtaaggattatttgatgccgtttactgacaagtcacaaggagtaatccaccccgtggacgatggaaagaaagaaaagggtgttatggtcacattggccaggaattcagatttatggaacttggtaaaatctattagacatgttgaagacagatttaataacagatatcactacgattgggtgttcttgaatgaccaaccatttagtgatgagtttaaacgtgttaccagtgcattggtttcaggcaaggcaaaatatgggacaatcccaaaggaccattggtccattccatcttggatcgatactgaaaaattcgatgagaaaaggcttgcaatgggaaaattggatattccatatggtagttccgtgccttaccgtcacatgtgccgtttccagtcagggttcatatggagacacccattactggaggagtacgaatggttttggagagtggataccgatatcactttattctgtgatattcagtatgacatattcaagtttttaaaagtaaataacaagaaatatggattcattctttcggtaagtgaatatgagcgcacaatcccaaccttgtgggaaacgacaaagaaattcatcaagaaaaatcctaaattcttacacaaaaataacctcatgaaattcatttcgaatgatgatggtgacacttataatatgtgtcatttctggaccaacttcgaaatcggctctttagacttcttcaggtccgatgcatacagagaatactttgattacttagacagttctggtggattcttctacgaaagatggggagatgcgccagtgcactccatcgctgcctctttgttcttggacaagtcagaaatccatttctttgacggtcttggattccatcatccagatttcacctcttgtcctatcgaacagaagattagactacaaaacaagtgtatctgcgaacctagcaaggacgtcacctggactcctgactacttctgtactagaaagtacttttcagcaggaaattacaagcttccaccaggaatttaa

SEQ ID NO: 75606 - DNA, 324 bp, Saccharomyces pastorianus
atgcgccagtgcactccatcgctgcctctttgttcttggacaagtcagaaatccatttctttgacggtcttggattccatcatccagatttcacctcttgtcctatcgaacagaagattagactacaaaacaagtgtatctgcgaacctagcaaggacgtcacctggactcctgactacttctgtactagaaagtacttttcagcaggaaattacaagcttccaccaggaatttaaaaaccaaactacaaatagcgcctgctccgtcaaaacaggtgctaaaacgtcaacatgtatctatctatatacacataattcaatgtag

SEQ ID NO: 75607 - DNA, 1398 bp, Saccharomyces pastorianus
atggcgtttgaggattatttttctttccagatattcttcattttcttaagggaatccttagaaattgttgtcattgtttctatcctgttgacgatcgtcaaacaaggtctgtctgttgaggacgacagcccgtttgaaggaagttcctcttctgctggtcttccaagtccaaatacgaacacaaacgcagattcgaccactgccttcttacaagcagggccttcagacggtaatgctattggaacgtccgctacggctgctaataataaatcgaggccgctaaatgtggaggaagaagaggaaatttacgagtactctaatgagcttagagatcaggaccgcgagtccgatgaacatacggctgacaacgttaagctatatcagaaattaaaaatacaaattctagcgggcggcgcatttggtttgttgctgtgtatgttaatcgggggtgcgtttgttagtatcttttatcatattggaaccgacttatggacactgagtgaacattattatgaaggtgtcttaagtcttgtcgcgtccgttattatttctgtcatggggttgttttttttaagaatggggaagttaagagagaagttcagagtgaaattagcttctatcatttattcaaaggacaataatttgctgggaaacaaaacccaaaaaggtgtgaaattcagtgaaaagtactccttcttcatattaccatttataacgactttgagagaagggttagaagctgttgtattcattggaggtatcggtattgaccaaccactatcatcgattcccctctctatggtccttgctactgcaatcagtacggtgttcggtatttttttcttcaggtactcaagttctctttcacttaagatatgccttgtagtcgccacctgcttcctctacttgatcgcggctggtttgttttccaaaggtgtatggcaacttgaattgcaagactacgtcaacaaatgtaacggtcaagacatgagtgaagtaggaaatggacccggttcgtacgatatatctcgttctgtttggcatgttaattgttgcaatggtgaaaaagatggaggttggatgatttttactgccatttttggttggacgaatagtgctactgtcggctctgtaattagctacaacgcctactggttggtattaatatgcgctttgaaactgctaatgatagaagaaaaatacggatatatcccatatctacctatcagctggcaaaagaaacgtattatgaaaagattaagcattgccaaggcatcgctcgatctcaaacatcatacttctgaactcaactctagcacatcagagtcagacagtcaaagacggtccaaagatagttctgtgcccctaataattgatagcagtggttcagtgaattga

SEQ ID NO: 75608 - DNA, 429 bp, Saccharomyces pastorianus
atgtcaggaaccggattatcgctattcgtgacgggtcttatattgaattgtttgaattccatttgccagatatactttactatattatatggtgatcttgaagcagactatatcaactcaatcgaactgtgtaagagggtgaataggttgagtgtaccagaggcaattctacaagctttcatttctgcgttgtttctttttaacgggtactggttcgtatttctcttgaatgtccctgttctagcatataacgcaagcaaagtctacaagaaaacacatctactggacgccacggatattttcagaaaattgggtagatgcaaaattgaatgctttttaaaattgggattttaccttctcatattctttttctacttctacagaatggtcacagcgttacttgaaaatgatgcaaatttgataagctaa

SEQ ID NO: 75609 - DNA, 975 bp, Saccharomyces pastorianus
atggatagagacactaaattagcttttaggctgaggggcagtcattcaagaaggacagacgatatagatgatgatgttattgtatttaagacgccaaatgctgtttatagagaggagaactcacctattcaatctcctgttcaacccattttgtcttcaccaaaacttgcgaattctttcgagtttcctattaccacaaataacgtaaatgcgcaggaccgtcatgaacatgggtatcagcccttggatgcagaagactatcccatgattgactctgaaaataaaagtcctataagcgaatcgccgcaaaatgttagaaatgatgaagaccttactactcgttacaatttcgatgatatacccattagacagctatcatcgtctatcacttctgtgaccacaattgatgttttatcttctttattcataaacttatttgaaaatgatttgattccgcaagctttgaaggatttcaataaaagtgatgatgatcaatttaggaaactattgtacaaattagatctgcgactctttcaaacgatatcagaccaaatgaccagagacttgaaagacatattagatatcaacgtgtcgaataatgagctctgttaccaactgaagcaggtactggctcgaaaagaagatttgaaccagcagataatatcggtacgaaatgaaattcaagagttgaaagccggtaaagactggcatgacttacaaaatgaacaagccaaactgaacgacaaagtgaagctaaataagaggctaaatgatttgacttctactttgctaggcaaatacgagggagatcgcaaaattatgagccaagatagcgaggacgattcaatacgggatgactcaaatattctggatattgcacatttcgtagacttgatggatccatataacggacttctgaaaaaaataaataaaattaatgaaaatctttctaacgaattacaaccaagtctatag

SEQ ID NO: 75610 - DNA, 2013 bp, Saccharomyces pastorianus
atgatgtctaacgttgctaacgcctcccaaagacaggagaatccatatattattccattgcctccttcatccacagtggaaacttctactgaacccccaagaacgttatggatgggagatttggatccgtccttcgacgaggccacgattgaggagatatggtcaaaactggataaaaaagttatcgttaaactaattagagccaaaaaaaatttgttgattccttgtagctccacctcaagtagtaataacaacacaagtgaggagaatgctgaaaaccagcaatctgcatcaaacagcactgatcagttagataattcccaaatgattaatattaatggaatatccttcattgatccttccactactcaattacatcatgccggatattgttttgtcgaatttgaaactcaaaaggacgctaaatttgccctgtcattaaatgctacacctttacctaatttttattccccaacaactaactcccaaactaatccaacgttcaaaaggactttcagattgaattgggcgtctggagctactttacaaagttctataccatctaccccagaattttccttgtttgttggtgatctttctcccaccgccactgaagctgatttgttatctcttttccaaacgaggttcaaatctgttaaaaccgtccgtgtgatgactgaccctttaacaggatcatctcgttgttttggatttgtcagattcggtgatgaagatgagcgccgcagggcactgattgagatgagtgggaaatggtttcaagggagggccttaagagtcgcttatgccacgccaagaaataatatgatgctgcagttacaggaacaacaacaacagcaacaacaattgcagcaacagcatcagcagctagatcaggaggataataatggccctctcttgattaagactgcaaataatctcattcaaaacaatagcaacatgcttcctctcaatgccttgcataacgcgcctccaatgcatttgaatgagggcggcatttcaaacatgcgtgtaaatgattcactaccttcaaacacctataatacagaccccactaatactactgtttttgtgggaggactggtaccaaaaactaccgaatttcaattacgttcactattcaaaccctttggacccattctaaatgtcaggattcccaatggtaaaaactgtgggtttgttaaattcgagaagaggattgatgctgaagcttcaatacaaggcctgcaaggctttattgtgggcggcagtccaataagattatcatggggacgcccatccagttcaaatgctaaagcaaattcgaccatcatgggggcaagccaatatatgtcctcaaatggcctgagagcgccatctgcggcttcttcagtcgataactccaaacaaattcttgaacaatatgcggaagataaaaggcgactctttttacatcagcagcagcagcagcagcagcaacaggatggtaacttttctatggagcaaatggcgcacaacaactattacaactacaataattacgattatcacaggaacaagaatggcagccatagcgacctcgttaatctgcagagatctaatgtcccgtatatgcaagaagacggtgctctgtacccacaccaatattcaagtccctcatactcgctccatccgacgggcaaccaattctccaatgctaataataacttacctcaatttgggaacgcgatgtcaatttctatgcaactgtccaatggcaacagcaataaaacggcctcaagcatgaacacaaaccctaacacaaacatgatcatgaattctaacatgaacatgaacatgaacgtaaatccagtaccatacggaatgggaaacggtgcaaatatgtatgacgtgtccaggatgatgactcctcccttaaatatagccccgaattccaataattcgaaatcgagcatcatgaacaagcatcctaataggaacaatgttccgccaattcatccttctcttctacattga

SEQ ID NO: 75611 - DNA, 825 bp, Saccharomyces pastorianus
atggtcaaatcgctacagctagcccatcaattaaaagacaagagaatactactaatcggaggcggagaagtcggcttgacaaggttatataagctgatacctacaggttgcaagctgactttagtatctcctgacctacacaaatccattattccgaaatttggaaaattcatccagaacaaggatcagcccgactacagagaagacgctaaacgctttatcaatccgaactgggactccacgaagaatgagatttacgagtatatccgcagtgacttcaaagacgaatacctcgacctagaagacgagaacgacgcgtggtacataataatgacctgtatacccgaccaccctgaaagcgcaagaatatatcacctttgtaaggaaagattcggtaagcagcagctggtcaatgtggcggacaaacctgatctctgtgacttttatttcggcgccaacctggagataggagaccgtctacagattctgatctctaccaacggcctttctccgcgctttggcgctctagtaagagatgagatccgtaacttattcacacaaatgggggatctggcgctggaggacgctgtcgtcaaactaggtgagctaagaagaggaattaggctgctggcaccagacgacaaggatgtcaagtaccgcatggattgggccagacgctgcacagacctcttcggcattcagcactgccacaacatcgacgtaaaacgtctgctggatctattcaaggtcatgtttcaagaacagaactgttccttgcagttccctcccagagaacggttgcttagcgagtactgctcgtcttga

SEQ ID NO: 75612 - DNA, 1872 bp, Saccharomyces pastorianus
atgatagcaattgtccttgataactctaaaagtggtagtaaacagacaaaatcgagtggcaaaatgcaaacgcaaacagatactaatgctgaagttctaaacaccgataacagtatcaaaaaagaaacaggaagtgattctgaggatcttttcaataaattttcaaacaaaaaaacgaacaggaaaatacccaacatcgctgaagaattagcgaaaaacagaaactacgtaaaaggtgcgtctccgtctcccattataatttctggttcctcttcaacttctccgtcaggaccctcttcctccagtacaaacccgatggggataccaacgaatcgatttaataaaaatactgtagaactatatcagcattcaccatcccccgtgatgactactaacaagactgatacagaggaaaagagacaaaacaataaaaatatggataataaaaacaccccagaaagaggatcttcttcctttgctgctaagcaactaaaaatatcatccttgttaactatatcctccaatgaagatagtaaaactttgcatataaacgatactaatggcaacaaaaatagtaatgccgccagtaataatattccatcggcttatgcagaactccatacagagggaaatagcattgaatcactaataaaacccccaagctctcccagaaataaatctttaacgcccaaagttatcttgccaacacagaatatggatggtacaattgcaaaggatcctcatttaggtgataatacaccaggaatactcatagcaaaaactagttctcccgtaaatttggatgttgaaagcactgcacaatctctgggaaaatttaacaagtccactaattctttgaaagctgctctaacaaaagctcctgcagaaaaggtgtctttaaaacgcagcattagctcagttacaaacagtgattctaatattggctccagcaaaaagcctacgtctgaaaaagctaaaaaatcaagttcagcatcagcaatactaccaaagccaacaacgaccaagacatcaaaaaaagctgctagcaatagtaacgattccaccagaaaaaaaaactcttcgaacaagactacatcagccataaagaaagagtcaaatgccggctccaaattgaacactgttaagaaggaaaatagctctttatcttctatcaaagccactgagaaagaaaaagataaaggtggaaatagcacggaagcaaaaaactctaccagcaacgttagaaaggaaccaactgcaaaatccccaaaaaggttagtagccgcaccgacagtcagtccaccaaaaattctacaaacggcagaaaccaaagcaaaggaaccctcgatattgattgacgttccattgtatcaagctgatacaaacgactacctagacgaaaacggtcaggttatttttaatttatcaactttaataaaagagaagtatcacccgaaaagtaaagaactagcacaacttaaagactctaaaagaaatttattaatgcaattatccgatcattctaacggctcactagaaaaggaaaaagatgaagaaggagatgtaatagaacttgatgatgatgaggatatggaagaagatgaaggggaaatagatacagaaactaatactgtaactaccaccatctctccgaagaagaagtcgcatcctatgaaaggtaaaaatttgattggtaaatatgacgttgaagatccgttcattgatgattcggagttattgtgggaggaacagcgtgctgccaccaaggacggtttttttgtttactttggtccattaatcgaaaaaggtcactatgcaagtttggagcgtgcaaatggtaccatgaaaagaggtggtgttaaaaataaataa

SEQ ID NO: 75613 - DNA, 2025 bp, Saccharomyces pastorianus
atggaaccaattgatgacttactttttgaggttactgatgcgttcaaaactcagaaggaggatcttcttgagttggtaacattgattgatatatatggcgagcaagttaaccaagaggggagctatgaagaaaagacgagattcattgaaactttgaatacattgttagaggataatccgagtactactggtgaaatcggttgggatctgcctaagggattattgaagttcttgtcaaaggataatgtcgatgtaaatggaagactaggtacgaatatgattgtccaaggtgtaatgaagtgtttctatgccatctcaatccaaggcgagcccaaaaaatgtttaattactgggttggagttgctttcatccctttgttcaaaagatttttccaagagtgatcaacagaataaggaagactttgttgataaaaaggccaatacgttacctcctgaaggagtgatcgaaaattcctctaatcgaaaagattttccatcctacggtgaaagcaagagttcaaatgaatttttcttgaagttgaaatcctacattttatttgaattcataggggcgagtctgaaaaggatttctactctgtttccttcgaaatatctgggagctgctgtgtcaacaattgagaaatttgtgtatagtcatgcggacacttttgaagatgcccttttccttcttcgtagggtgtacacattctgcaggaactatattccccctgatccaccaaaagatatacaattgaacgaagattttactcgagagatgtttgataaagttgtggaggaagaaagtgaattacaggttagactattgcgtaggctttgtacttttggtatttcgacacccataaaaactgtcaccaccaatgccgacgtgaaatactattgtgcactaaatcaacagaagtttgaattatctgcatattacaccgaatatcttgagctattttgcaggtattaccaaatggcgttctcgcttgatgttgatatagagggagaatttcagaatgtgataaaagaatgtaggattatttataagtctgtaccccaggagatttctgctgttaatgatgaagcaaagttggttttggaaagaatggtatataaattggcttatacattcgaagtacaaaaggccgctaaagaaaaaaatgttggtttggactataatggtgtaatattattttctggtatccactatttggaaaccaatcaacatttagtaaaggaaatgaatataacggatgccatttatctctacttgagatttacaactccatcattatattctaaagtttactataatgtagcagttgaatcagttagtcgctactggctatggtatgccattacaaccgagcccttggaggatgtaaaaaaagaattgaagaatctttcagtgtttgttacaaaaacattattgcatgttctacttcaaaagaactgtattcaggtcaatcagcagttaagaatgataactttcactcttctcaccagattactatgtttaatacctgaaaaagttgcatttgagtttatcttagatgtgcttaagacatctccccttccattggctaagacgtccgtattatgtgtttttaaagacctttcaaggcgacgcatctccaccaaggataacgattctgagacgaatttgattgtcgaaaaattatccaaactgaaggtcaatgatagtaacaaagctcagcaaagtaacatcagacattatatccaactagattcttccaaaatgaaagctgttcatgactgttgtctgcagactatccaagattcatttacggcagatgccaagaagagtgatatattattactgctaacttacttgaatattttcattgtgctaaaaaaaacatgggatgaagatctactgaagattgtttgttcgaagattgattctaatttgaagtcagtcgaacctgataaacttccgaagtataaggaaattgtggataaaaacgaatctctaaatgactattttactggtataaaatga

SEQ ID NO: 75614 - DNA, 561 bp, Saccharomyces pastorianus
atgagtaggatcctagagagcgaaaatgaaacagaaagtgacgaaagctccatcatatccacaaataatggaacggcaatggaaagatccagaaataatcaagaattaagatcatctcctcataccgttcaaaatagattggaactttttagcaggagattgtctcagcttggtttggcgagtgacatttctgtcgaccagcaagttgaagattcctctagtggcacttatgaacaggaagagacaatcaaaacgaatgcacaaacaagcaaacaaaaaagccataaagacgaaaaaaacatacaaaagatacagataaaatttcagcccattggttctattgggcagttaaaaccatctgtttgtaaaatatcaatgtcacagtcttttgcaatggttattttatttcttaagagacggctgaaaatggaccatgtttattgttatataaataattcgtttgcgccaagtccgcagcaaaatattggtgaactttggatgcaattcaagactaatgatgagcttattgtaagttattgtgcatccgtagcgtttggttaa

SEQ ID NO: 75615 - DNA, 3543 bp, Saccharomyces pastorianus
atgagcagtagcaagaaattggccggtcttagggacaatttcagtttgctcggcgaaaagaataagatcttggtcgccaatagaggtgaaattccgattagaatttttagatctgctcatgagctgtctatgagaactatcgccatatactcccacgaggaccgtctttcaatgcataggttgaaggcggacgaagcgtatgttatcggggaggagggccagtatacacctgtgggtgcttacttggcaatggacgagatcatcgaaattgcaaagaagcataaggtggatttcatccatccaggttatgggttcttgtctgaaaattcggaatttgccgacaaagtagtgaaggccggtatcacttggattggccctccagctgaagttattgactctgtgggtgacaaagtctctgccagacacttggctgcaagagctaacgttcctaccgttcccggtactccaggacctatcgaaactgtgcaagaggcacttgacttcgttaatgaatacggctacccggtgatcattaaggccgcctttggtggtggtggtagaggtatgagagtcgttagagaaggtgacgacgtggcagatgcctttcaacgtgctacctccgaagcccgtactgccttcggtaatggtacctgctttgtggaaagattcttggacaagccaaagcatattgaagttcaattgttggcagataaccacggaaacgtggttcatcttttcgaaagagactgttctgtgcaaagaagacaccaaaaagttgtcgaagtcgctccagcaaagactttgccccgtgaagttcgtgacgctattttgacagatgctgttaaattagctaaggtatgtggttacagaaacgcaggtaccgccgaattcttggttgacaaccaaaacagacactatttcattgaaattaatccaagaattcaagtggagcataccatcactgaagaaatcaccggtattgacattgtttctgcccaaatccagattgccgcaggtgccactttgactcaactaggtctattacaggataaaatcaccacccgtgggttttccatccaatgtcgtattaccactgaagatccctctaagaatttccaaccggataccggtcgcctggaggtctatcgttctgccggtggtaatggtgtgagattggacggtggtaacgcttatgcaggtgctactatctcgcctcactacgactcaatgctggtcaaatgttcatgctctggttctacttatgaaatcgtccgtaggaagatgattcgtgccctgatcgaattcagaatcagaggtgttaagaccaacattcccttcctattgactcttttgaccaatccagtttttattgagggtacttactggacgacttttattgacgacaccccacaactgttccaaatggtatcatcacaaaacagagcgcaaaaactgttacactatttggcagacttggcagttaacggttcttctattaagggtcaaattggcttgccaaaactaaaatcaaatccaagtgtcccccatttgcacgatgctcagggcaatgtcatcaacgttacaaagtctgcaccaccatccggatggagacaagtgctactggaaaagggaccatctgaatttgccaagcaagtcagacagttcaatggtactctactgatggacaccacctggagagacgctcatcaatctctacttgcaacaagagtcagaacccacgatttggctacaatcgctccaacaaccgcacatgcccttgcaggtgctttcgctttagaatgttggggtggtgctacattcgacgttgcaatgagattcttgcatgaggatccatgggaacgtctgagaaaattaagatctctggtgcctaatattccattccaaatgttattacgtggtgccaacggtgtggcttactcttcattacctgacaatgctattgaccattttgtcaagcaagccaaggataatggtgttgatatatttagagtctttgatgccttgaatgatttagaacaattaaaagttggtgtgaatgctgtcaagaaggccggtggtgttgtcgaagctactgtttgttactctggtgacatgcttcagccaggtaagaaatacaacttagactactacctagaagttgttgaaaaaatagttcaaatgggtacacatatcttgggtattaaggatatggcaggtactatgaaaccggccgctgccaaattattaattggctccctaagaaccagatatccggatttaccaattcatgttcacagtcatgactccgcaggtactgctgttgcgtctatgactgcatgtgccctagcaggtgctgatgttgtcgatgtagctatcaattcaatgtcgggcttaacttcccaaccatcaattaatgcactgttggcttcattagaaggtaacattgatactgggattaacgttgagcatgttcgtgaattagatgcatactgggccgaaatgagactgttgtattcttgtttcgaggccgacttgaagggaccagatccagaagtttaccaacatgaaatcccaggtggtcaattgactaacttgttattccaagctcaacaactgggtcttggtgaacaatgggctgaaactaaaagagcttacagagaagccaattacctactgggagatattgttaaagttaccccaacttctaaggttgtcggtgatttagctcaattcatggtttctaacaaactgacttccgacgatattagacgtttagctaattctttggactttcctgactctgttatggacttttttgaaggtttaattggtcaaccatacggtgggttcccagaaccattaagatctgatgtattgagaaacaagagaagaaagttgacgtgccgtccaggtttagaattagaaccatttgatctcgaaaaaattagagaagacttgcagaacagattcggtgatattgatgaatgcgatgttgcttcttacaatatgtatccaagggtctatgaagatttccaaaagatcagagaaacatacggtgatttatcagttctaccaaccaaaaatttcctagcaccagcagaacctgatgaagaaatcgaagtcaccatcgaacaaggtaagactttgattatcaaattgcaagctgttggtgacttaaataagaaaactgggcaaagagaagtgtattttgaattgaacggtgaattaagaaagatcagagttgcagacaagtcacaaaacatacaatctgttgctaaaccaaaggctgatgtccacgatactcaccaaatcggtgcaccaatggctggtgttatcatagaagttaaagtacataaagggtctttggtgaaaaagggcgaatcgattgctgttttgagtgccatgaaaatggaaatggttgtctcttcaccagcagatggtcaagttaaagatgttttcattaaggatggtgaaagtgttgacgcatcagatttgttggttgtcctagaagaagaaaccctacccccatcccaaaaaaagtaa

SEQ ID NO: 75616 - DNA, 1683 bp, Saccharomyces pastorianus
atggaacctaagcgaaagagcgggtcactagccaagcatgatttgccgcaattttatcttttaattatgttatatttggctcaaggcatacctgtaggattggccttcggtaccgtaccgtttctactgaaatctttagcaaaggagacctcgtttacatcactgggaattttctctatggctacatatccatattctttaaagatcatatggtcaccaatagtagactcactgtacaacaagcgcatcggtagaagaagatcatggatcattccagtacaatttgttagtggatttgtgctatgggcattagggtggtgcatttcacaaggcataatcttcgatggtgtcgacgatgcgttccataatcgcggtaatggcactttacacagtgtcagtataaaaaatttgacgtggtggtttggcctgttagtttttctgtgtgccactcaagacatcgcagttgatggttgggcgttgacgattttgtccaaagaatccctatcatatgcgtctaccgcgcaaacaataggtttgaatattggttattttatgtcatttaccattttcctgtcgttgaattcctctgatttcgccaataagtatttcagaaacatcccactggatcacgggttcattagtcttggtgggtacatgaaattctcgggcatgctttacattgtaataaccatatatatcatcttttgcaccaaggaaaaaccctacgtagagtatttgcccaaagtggagcccataaatacaagtgacggagggtcgaagccgataagtattgagtatgacgacggtgatgtggtgtcaactcagaatacaagcagtataaagtacatttaccgctgctttataaaagtgttgaaattgaagtccgtaagaagcctagccttcattcacatgatttcgaaatttgcctttcaatgcaacgaagccgccacaaacctgaaactactagagcaaggcttcaaaagagaagacttggctgtgacagtactcatagacctgccgttcgaaatcatatttgggtactatgttgttaaatggagctccgacaaggaccccatgattcgtgacaatagaagattaagaaacagcacgggcactaacaaggtcatcaagttcttagttggggatgccggcgttttaacaccatggttgtggggctttttgggccgtctggcagccgcagtcttgggaagttacgtggtgaagcaattccccaaggatggtgaaatatccacgggttatttttgtctcgtgatattccagcacctcttaggttccttcatgaatactgtccagttcattggaatatcggccttccatacaagagttgcagaccccgtgctgggtggcacatatatgacattgttaaataccctcagcaacttcggtgggacatggccgcggttaatcattatgtccatgatcaactactttaccgtgtatcagtgcactattcctggcacaaataaagtatacgtaactcacggcggcagcatgcaagcgtgcaccgagcttttgaatggcaccgtgaccatcctgcgtgacggctattacatcaccaatctcatatgtattgtagtcggacttttcctatattttggatatttgaaaaggaaaatcctccatttacaaagtctgccaatcagttcctggagatgtacgtaa

SEQ ID NO: 75617 - DNA, 1101 bp, Saccharomyces pastorianus
atgttttccagactgccaacatcattggccagaaatgttgcacgtcgtgccccaacttcttttgtaagaccctctgcagcagcagcagcattgagattctcatcaacaaagacgatgaccgtcagagaggccttgaatagtgccatggcggaagaattggaccgtgatgatgatgtcttccttattggtgaagaagttgcacaatataacggggcttataaggtgtcaaagggtttattggacaggttcggtgaacgtcgtgtggttgacacacctattaccgaatacgggttcacaggtttggccgttggtgccgctttgaagggtttgaagccaattgtagagtttatgtcgttcaatttctctatgcaagctatcgatcatgttgtcaattccgctgcaaagactcactacatgtctggtggtactcaaaaatgtcaaatggtcttcagaggtcccaatggtgctgcagtgggtgttggtgctcaacattcacaggacttttctccttggtacggttccattccagggttaaaggtccttgtcccttattctgctgaagatgctaggggtttgttaaaggccgccatcagagatccaaaccctgttgtatttttagagaacgaattgttgtacggtgaatcttttgaaatctcagaagaagctttatcccctgatttcaccttgccatacaaggctaagatcgaaagagaaggtaccgatatttccattgttacgtacacaagaaacgttcagttttctttggaagccgctgaaattctacaaaagaaatatggtgtctctgcagaagttatcaacttgcgttctattagacctttagatactgaagctatcatcaaaactgtcaagaagacaaaccacttgattactgttgaatccactttcccatcatttggtgttggtgctgaaattgtcgcccaagttatggagtctgaagcctttgattacttggatgctccaatccaaagagttactggtgccgatgttccaacaccttacgctaaagaattagaagatttcgctttccctgatactccaaccatcgttaaagctgtcaaagaagtcttgtcaattgaataa

SEQ ID NO: 75618 - DNA, 105 bp, Saccharomyces pastorianus
atgttctcccacttcgaagtctcggaaaacagaccccggaaacagccgcgacgaaaaagaatcagcttaggcatgataaatactgtggtttcattagatagataa

SEQ ID NO: 75619 - DNA, 1632 bp, Saccharomyces pastorianus
atgacaagtgccgctactgttactgcttcgttcaacgatacttttagcgtatccgataatgtcgccgttattgttcctgaaacggacactcaggtgacctacagggatctatcccacatggtgggtcacttccagaccatgttcacaaatcctaattctccattgtacggagctgttttcagacaagatacagtggcgatatccatgcgtaatgggctggaatttatcgtcgctttcctcggtgctactatggacgctaaaattggcgcgcccttgaatcccaattataaggaaaaggagttcaatttttatttgaatgacctgaaatctaaggcgatttgcgtcccaaagggtaccacaaagttacagagttctgaaattctaaaatctgcctccacgtttggatgttttatcgtagagctggccttcgatgcgaccaggtttagggtagagtatgatatatactctccagaggacaactacaaaagggttatttaccggtctttgaacaacgccaaatttgtcaacacaaatcccgttaaattccctgggtttgcccgttccagtgacgtcgccctgattttgcataccagtggtaccacctccactccaaaaacggtgcctttgttacatttgaacattgtgagaagcacgttgaacattgctaacacttacaagctaacgcccttggacagatcttatgtcgtgatgcctcttttccacgtccatgggttaattggtgttttactttccacttttagaactcagggttctgttgtggttcccgatggattccatccaaagttattctgggaccaatttgttaagtacaactgtaattggttcagttgcattcccacaataagcatgattatgctgaacatgcccaaaccaaaccctttcccacacattagattcatcagatcgtgttcttctgctttggctccagcaacgttccataagctggagaaggaattcaatgcacctgtcttggaggcctatgcgatgaccgaagcatcacatcaaatgacctcaaacaatctgcctccaggaaagagaaagcctggtactgtgggccagccacaaggagtcaccgtcgtcattctagatgacaatgacaatgtcttgcccccgggcaaagtcggcgaagtttccatcagaggcgaaaacgtcactttgggatatgctaataatccaaaagctaacaaggagaacttcactaagagagagaactatttcagaaccggtgaccaaggttatttcgaccctgaggggtttttggtccttacaggcagaatcaaagagcttatcaacaggggtggtgaaaagatttcacccattgagctcgacggcattatgctatcgcatccaaagatcgatgaagccgttgcatttggtgttcccgacgatatgtacggccaagtagttcaagccgccattgttttgaagaagggagaaaaaatgacttacgaagaattggtgaacttcttaaagaagcaccttgcctctttcaaaattccaaccaaggtgtactttgttgataagctaccaaaaaccgctacaggtaaaatccagagaagagttatcgcagaaacttttgctaagagcagcagaaataagagtaagttgtag

SEQ ID NO: 75620 - DNA, 1635 bp, Saccharomyces pastorianus
atgtcacgagaaacaaatttgaatggaactaagaggaagaggtcggatgttgccgagaaagtagcacaacggtggaagagcgtcaggtatagtgctgaaatggagaatatggctccggtcaacagtaacaatgatagcgacgactgcatcatagtcagtgaatcgaaaatcattgatttgactaatcaggaacaagatttgagtgagagaataggaacaaacgatacggcaaaaggtgccgtttttaaactaatgaaatcggacttctatgaaagagaggattttatgggagaagtagaggatatgattacattgaaagatatctttggcactgagacactaaaaagaagcatactcttcagtttccaatacgaacttgatttcttgttgagacaattccaccagaacgtagagaacataaccatcgtcggccaaaagggtactattatgcctatcgaagcccgtgctatggacgcgacactggcagtaatattaaaaaaggtcaaacttattgaaataacgatgcccccattcgcttcccaccatacgaagctgatcataaacttttacgataatggcgaatgcaaaatattcttgccatctaacaattttacgtcaatggagactaatctgcctcaacaggtgtgttggtgcagtccccttttgaaaataggtaaagaagggctaccagtaccgtttaagagaagcttgatagaatacctcaattcgtaccacctgaaagacattgacgaattgattacaaaaagcgtagaggaagttaactttgctcctttgagcgaattagaatttgtatattctacgccctccaaatttcagtcgtcgggtttactgtcgttttacaataaactagaaaaactttctgctggcacaagtgctagtgatactgcaaaacattatctatgtcaaacttcatccatagggacatctctatcaagagcgcgagacgaaaacttatggacacatctaatgattcctctgtttaccggaatcatgtcccctccagcaaaggacaccactggaaggaagaaagcagaaatactgccaacgaattcattgattaatgaatattcgcagagaaaaatcaagccgtacattattttccccaccgaacaagagtttgtcaccagtcccttaaagtggtccagttccgggtggtttcattttcaatatcttcagaaaaagagctactacgaaatgctgcgaaacaagttcaaagtattttacaagcaagaccctgctatggttactagaagacgagggacgacgcccgcgcactctaagttttacatgcactgtgcaacaaactccacagggccctgtgatgcatcgcaggtatttaaagaactagaatggtgcctttatacttcggcaaacctcagccaaacagcatggggcaccgtttcaagaaaaccacgcaattatgaagcaggagtgctttaccatagtcgcaggttagcaaataccaggaaggtcacgtgccgtacttttacacgtgaccgtagaggctgcgcgggtaatcccacccatgtggccgtgccattcacgctgccagtcataccatacgacttagctgaggacgagtgcttttgccttgctcgtcatgagaacgactaa

SEQ ID NO: 75621 - DNA, 120 bp, Saccharomyces pastorianus
atgactggcagcgtgaatggcacggccacatgggtgggattacccgcgcagcctctacggtcacgtgtaaaagtacggcacgtgaccttcctggtatttgctaacctgcgactatggtaa

SEQ ID NO: 75622 - DNA, 516 bp, Saccharomyces pastorianus
atgattttcgattcactgactatgatgcagtcgtcgctatcattgttactgttgaccggagccatattctccatttcagcactatacctgacgctcttccaccgttgtgctactttctcggcaacatccgacctcttcctcttagttccattcaaatttgtttctcgtgacattaataatcggttgaaaacacattatcatcattcttgtctgggctcaccgtttctctgcattattttcctctttataagccctttattaaattaccattttcgcagtttagtgcggccgccgaaaatacatcagaagggatccataccaacacttaccaagaacgctgaaacacgttgttcacttcacctgaaacaagcagcagctactggagaagtgtgtaaagtagtagtaattattaaaggacacatattgaaggattgttcaattttcttttttattatttttcccctcatttatccactttttataaactgctcaagtaaatacaatgggctccaataa

SEQ ID NO: 75623 - DNA, 1563 bp, Saccharomyces pastorianus
atgttgaaatctgcaagccaaaacttttttagagcttattctagtagaattggtcgatatgctgctacagcatcagggaaactggcacagtctcgtttatcgaatatacccactccaaaagcattgaagaaattcctcgatgagtacattgttggtcaagagattggtaagaaggttttaagcgtggcagtttataatcactatttaagaatcaatgacaagcaaaagaaaggggaattacaaaggcagagagaattgatggaacgagagaaaatcgcggatgataaggatgaaccaattttcagtggaaacagcgaatcaaaggctggttggaggaatcttcaaagacagtttaatttagcaggtagagaggttgacgaagatttagagttaagcaaaagtaatgtccttgtcgttggtccctcaggttctggtaagactttgttggcaacaacattggcgaaaatattaaacgttccaattgcaattacagattgtacacaattgactcaagcaggttacataggtgaagatgttgaagtatgcattgaaagattgctcgtaaatgctgaatttgatgttgcgagagcagaaaaaggtattattgttcttgatgagattgataaactagccaagcctgccgcaagcattggcactaaagacgtgtccggagaaggggttcaacagtcattattgaaaatcattgagggccataaagtggaaattaccgttaaaaggcctgttaagcatgatattgacggacaaaaaaatcaaactacaacaaagaaggacgaagtatttgttgtagacacttcaaatattcttttcatgattatgggtgcttttgttggtttagataagcatattgttaaaaggatagaagatatgaagaaaatacagaaggcaggagagtctgttgaatcatcgaatagtaaagaagttgaaaaagaaagagcgaagaagttcagatttagcaatacgcttgagcaggttgaattagataacggaaaaaaagtgtgtgctttagacttgaccacccccacagatttagttagctttggtctaattcctgaattaattggcagagtcccaattataactgctctgcagcctctacaaagagacgatttatttcatatattaaaagaacctaaaaatgccttattggatcaatatgaatatatttttaagcaatttggggtaagattgtgtgttacacaaaaggcgctaaagaaagttgctcaatttgctctcaaggaaggaactggcgccagagggttgagagggataatggaaagacttctgctaaacgttaattatgattgcccgggttctaacatagcatacgttttaatcgacgaagctactgtcgactcgttacaggaaacagagcactctttggcttcccaagtggacgtaaaatactattctggtgatgaaaaggacagtttaattcgtgacgtttctgaagaagataaaaaattaggagctatgctagaaaaagagttgggtcattctgctaacattcataccccaacaattcccaagagaagcttaacataa

SEQ ID NO: 75624 - DNA, 915 bp, Saccharomyces pastorianus
atgtcgcagaaaatacagcagcatcagtttcctgatttttattgttgttatctactacaatcgattaacaagaggcaatcattttacgttggatcaactcctaacccagtacgacgtttgaggcagcataatgggaaattggctgttggaggggcatatcgaaccaaacgtgacggttcaaggccctgggaaatgataatgattgtgcggggcttcccaagtaagatagcagctttacagtttgaacatgcatggcaacatgggtaccaaacgcattatattgccgaaaaagatcgtgtcgtaaagcataaagcaggtggaagaactttacatcacaaagttgcattaatgaagttacttttaaagcatgaattttttcaaaggatgaacttgatagtcgacgtttttaatataaaggcttgggaggtttggaaacaggacaaattttttattgaaagagacagatttccgattaatatacaaataaatgagaatgcgcttgaagaaccaaaggagaaaactgtggatgttctcatggatcatagtgatgagaatttaaaagtggtagaagctgtatacactaaagtcattgaaaatgaaagaaacatattcgaaactttcgaaaagaaactaactacaggggtagtgcgatgtgaaatttgtgagaaagaaattgactacacgtctgaagagcaaaatctgaagccgtttgtagcgttttgcaataataaagactgcgggtctgttaaccacttgaaatgtcttcacaggtactttctagatgatgaacagttgatagtagggagaagaaacttgatacctcgaggtgggaaatgtccgaaatgtgatacgttttgcgactggacgaccctagtcaagttttcgacaagaatgaagttagctcacgggaagtag

SEQ ID NO: 75625 - DNA, 2865 bp, Saccharomyces pastorianus
atggtccttttgaaatggctcgtatgccaattggtcttctttaccgctttttcccatgcgtttaccgactatctattaaagaagtgtgcgcaatctgggttttgccatagaaacagggtttatgcagaaaatattgccaaatctcatcactgctattataaagtggacgccgagtctattgcacacgatcctttagaaaatgtgcttcatgctaccataattaaaactataccaagactggagggcgatgatatagccgttcagttcccattctctctctcttttttacaggatcactcagtaaggttcactataaatgagaaagagagaatgccaaccaacagcagcggtttgttgatctcttcacaacggttcaatgagacctggaagtacgcattcgacaagaaatttcaagaggaggcgaacaggaccagtattccacaattccacttccttaagcaaaaacaaactgtgaactcattctggtcgaaaatatcttcatttttgtcactttcaaactccactgcagacacatttcatcttcgaaacggtgatgtatccgtagaaatctttactgaaccttttcaattgaaagtttactggcaaaatgcgctgaaacttattgtaaacgagcaaaatttcctgaacattgaacatcatagaactaagcaggaaaacttcgcacacgtgctgccagaagaaacaactttcaacatgtttaaggacaatttcttgtattcaaagcatgactctatgcctttggggcctgaatcggttgcgctagatttctctttcatgggttctactaatgtctacggtataccggaacatgcgacgtcgctaaggctgatggacacttcaggtggaaaggaaccctacaggcttttcaacgttgatgtctttgagtacaacatcggtaccagccaaccaatgtacggttcgatcccattcatgttttcatcttcgtccacatctatcttttgggtcaatgcagctgacacttgggtagacataaagtatgacaccagtaaaaataaaacgatgactcattggatctccgaaaatggtgtcatagatgtagtcatgtccctggggccagatattccaactatcattgacaaatttaccgatttgactggtagaccctttttaccgcccatttcctctatagggtaccatcaatgtagatggaattataatgatgagatggacgttctcacagtggactctcagatggatgctcatatgattccttacgattttatttggttggacttggagtatacgaacgacaaaaaatattttacttggaagcagcactcctttcccaatccaaaaaggctgttatccaaattaaaaaagttgggtagaaatcttgtcgtactaatcgatcctcatttaaagaaagattatgaaatcagtgacagggtaattaatgaaaatgtagcagtcaaggatcacaatggaaatgactatgtaggtcattgctggccaggtaattccatatggattgataccataagcaaatatggccaaaagatttggaagtcctttttcgaacggtttatagatctgccggctgatttaactaatttattcatttggaatgatatgaacgagccttcgattttcgatggcccagagaccacagctccaaaagatttgattcacgacaattgcattgaggaaagatccgtccataacatatatggtctgtcagtgcatgaagctacttacgacgcaataaaatcgatttattcaccatccgataagcgtcctttccttctaacaagggctttttttgccggctctcaacgtactgctgccacatggactggtgacaatgtggccaattgggattacttaaagatttccattcctatggttctgtcaaacaacattgctggtatgccatttataggagccgacatagctggctttgctgaggatcctacacctgaattgattgcacgttggtaccaagcgggcttatggtacccattttttagagcacacgcccatatagacaccaagagaagagaaccatacttattcaatgaacctttgaagtcgatagtacgtgatattatccaattgagatatttcctgctgcctaccttatacaccatgtttcataaatcaagtgtcactggatttccgataatgaatccaatgtttattgaacaccctgaatttgctgaattgtaccatatcgataaccaattttactggagtaattcaggtctattagtcaaacctgtcacggagcctggccaatcagaaacggaaatggttttcccacccggtatattctatgaattcgcatctttacactcttttataaacaatggtactgatttgatagaaaagaatatttctgcaccattggataaaattccattatttattgaaggcggtcacattattactatgaaagataagtatagaagatcttcaatgttaatgaaaaacgatccatatgtaatagttatagcccctgataccgagggacgagccgttggagatctttatgttgatgatggagaaacttttggctaccaaagaggtgagtacgtagaaactcagttcgttttcgaaaacaataccttaaaaaatgttcgaagtcatattcccgagaatttgataggcattcaccacaatactttgaggaataccaatattgaaaaaatcattatcgcaaagaataatttacaacacaacataacgttgaaagacagtactaaagtcaaaaaaaatggcgaagaaagttcattgccgactagatcgtcatatgagaatgataataagatcaccattcttaacctatcgcttgacataactgaagattgggaagttattttttga

SEQ ID NO: 75626 - DNA, 912 bp, Saccharomyces pastorianus
atgccagaagtagagacaaagattataccaaacgaaaaggaggacgaggacgaggacggctacatagaagaggaggacgaggacttccagcctgaaaaagataaattaggtggtggtagcgatgatagtgatgccagcgatggcggtgacgactatgatgacggtgtgaacagagataagggtagaaataaagtggactattcgcgtatagagagcgagagcggcggactgatcaagactagaagagctcggcaagctgaggaagaatatgcgaaaacacataagtatgaatcgttaactgttgaatcgatccctgcaaaagtaaacagcatctgggaggagctacaggaagctagtaagaaccgtcttttgagcagttcagggaaagtcggctctgttctcgacggttccaaggaggctaggtcgacaacggccgcgcaacaggaggacaaaatcctcatcgaaagaaactacaagtttgctggtgaaactgtccatgagaaaaaatgggtttcacgcagcagtgcggagggtcaagaatatctaaacagtttgaaatttaagcagcaggcgcctgctgctcctgttcaactggaaaaagcagttaggaccaagtccaatgaaagccggcaacacttgcggtggccactgaaaaggcctccattgttggagcagatcatttctggcgggctacgacccaagctaacgacattagaaaaatctcagctggactgggctagttatgtagaccgtgctggacttaacgacgaattggtgctgcacaacaaggatgggttcttggcccggcaagaatttctgcagcgggtcgggtctgcagaggacgagagatacaaagaattgcgccggcaacaacttgctcagcagttgcagcaggatagcgaagcttcatag

SEQ ID NO: 75627 - DNA, 360 bp, Saccharomyces pastorianus
atgtttattctagcagaggtttcggattttattctagatatagtggcgcccttgtgtcctactatcagtgaagcgtgtttgactaagcacagcattcgtaaatgtacatcagagggaacattgtcgggggaatcgtggtcgttgtcagagtggctgtctgcatccttcagggccacgcgtttgatttctgcttccagttgttcctcgctggtgtcttcaccctttttccttttgagcgtgttgggagaaacgagtacagtagttggtgtggtagtgattgatggttttgtagtctctgtggacataattgagctaaagagtattacagaaagattatttaatgccgcgctggacgattaa

SEQ ID NO: 75628 - DNA, 1242 bp, Saccharomyces pastorianus
atgtccacagagactacaaaaccatcaatcactaccacaccaactactgtactcgtttctcccaacacgctcaaaaggaaaaagggtgaagacaccagcgaggaacaactggaagcagaaatcaaacgcgtggccctgaaggatgcagacagccactctgacaacgaccacgattcccccgacaatgttccctctgatgtacatttacgaatgctgtgcttagtcaaacacgcttcactgatagtaggacacaagggcgccactatatctagaataaaatccgaaacctctgctagaataaacatatcaaataatatcagaggtgttcctgaaagaattgtttacgtgaggggtacttgcgatgatgtagccaaggcgtacggcatgatagtaagagcgctgcttgaagaacatggtaacgaagataacggggaagacattgagatttctatcaacctattgatccctcatcatcttatgggatgtataattggcaaacgtgggtctcggttaagagaaattgaggatttgagtgcagcaaaattattcgcgtccccgaatcaattgctgctttctaacgatagaattttaaccattaacggggttccggatgctatccatattgctactttctacattagtcaaacattgctaaactttcagatggaatctccgcagaaaaatgtgaaaaggtccatatactatcagccaactcagtttaactcagtattaatagaccatagccaaccgaacaccattttccatcaaagaaaccaccaatatcatccaagcgataaactactttcatacaaacccaacaaaaatttaccaatatcatctactctgttgagtatggccacaccgcagtatactactgctagcgttgcaaacgcaacggcctttcaaccgaacttcgttatccctaatgtgacagtcttagacggccctgttatcagtccggcacccggcaaccatttattaatgaactttgtacaacaagagatattcatagatgagaaatttgtcggaaatgtcattggcaaagatggcaagcacataaattcggtcaaggaatccacaggttgttcaattattatacaagatcctgtagaaggctcttcggagagaagacttaccataagaggtacgttcatggcttcccaagctgctattatgttgattagcaataaaattgaaattgatagatcaaatgctgaacgtaaaagaaggtcgcccctctaa

SEQ ID NO: 75629 - DNA, 285 bp, Saccharomyces pastorianus
atggaacacaatctttcacctttacagcaagaagtattggacaaatacaaacagctttctttagatctaaaagctctggatgaaactataaaagaactaaactattcgcaacacaggcaacagcattcacagcaagaaactgtatcgccagatgagatactacaggagatgagggacatagaggtcaagattggtttagttgggacactgctaaaaggtagcgtgtactcgcttatcttgcaaagaaagcaagaacaggagtctttgggtagcaattctaaataa

SEQ ID NO: 75630 - DNA, 3363 bp, Saccharomyces pastorianus
atggttagtaggttttatcagattccaggtacgcatcggccatcgtcggcaatatcttcttcaaatgaatcttcttcactgttgtctgcaaggagaataagtcaaacatatttcaattatcaggcgactcctgaatgccaaaaagtttcctctaagtatgatcctgataacccaaacaaagataagttgggaacatacgatggggtatttgtgcctactgctttaaacgtattgtctatccttatgtttcttcgttttggcttcattttgggtcagttaggtattatatgcaccatcggtcttctgctattgagttacactattaatcttctcaccacgttaagtatatctgctatatctacaaacgggactgttaggggcgggggtgcttattatatgatttcaagaagtttaggacctgaatttggtggacccattgggcttgtcttcttcttagggcaggtgttcaatgcaggtatgaacgcagtgggtattatcgaacctttactctataacttgggttattctgctcaaggcgagccacctgcagctttgggagagctactaccaagaggacattggcacgaatttacatatgccacggtcattcttttcttatgtttttctgtggcttttgttggctcgcaaacagtgtcaagagcagggaatattctttttttggtactggcagcttctatattttccattccactttctgcattgataagatcgccattcactgaaggcggtatcagttatacaggtccttcatggcaaacttttcatgataacctgctccctcacttaacaaaaggtgcagcaggttcgttactcaaaggtcaggaaacattcaatgatttatttggcgttttttttcctgctacagctggtatattcgcgggcgcaggaatgtcaagtgaattgagaaagccctctaaatcaattcctaagggtaccttatggggtttactattcacttttatctgttatgccgttgttgtcttctccatgggttgttccattcccagaagatcgttatatgatgaagtacaaattatacagacgatcagttccgttcaatgggttatattcatgggtgaaatggctacttctcttttctccgtcatagtggggatgctcggtgctgcttatgtattagaagcaattgcaaaggataacattattcctggtttggagatttttgctcattcaccgttatattcattgatttttacttggattctaacacagctatgtttgttttcagacgtcaataaaatcgccacatttatcacaatgacattcttaatgacgtttgtggtcatgaatttggcgtgcttcctattaggtatttcctctgctcccaatttcaggccctctttcaaatactttaacaggtatactacagcaattggcgcattactttctgttgttgcgatgttaatagttgatggtatctcagcatctgtcttgtttttggctatgattttgctatttttattcattcattatttttcaccaccgaagtcttggggtgatgtgtctcaaagtttaatatatcatcaagtgagaaaatatttgcttcgtctacgtcaagacaatattaaatactggaggcctcaaatattgctgtttgtagataatccaaggacgagctggaacttaataaggttttgcaatcatttgaaaaaaggtggtttgtatattttaggccatgttgcagtaactgcggattttccaaagcaactaaatgaattaaaaactcagcagaaagcttggatgaagatcagagacatggctgcaataaaggcttttgtccaagttgggactggtccctcccttatatggggaattaggaatgtttttattggttccgggcttggaggtatgaaaccaaacattactgttgtcggtttttttgacctcgaaagttatagaaagcacatcccacaaagtcgcagccaaaataaccttcagaaacaggtggaaataaaagctacagtgccacgtagtacatgctctgatgtcaaaatcaatgttccattgcctacggatgagtgtaaaaatgaaaccaaagttaatgtacaacaatgggttcaaattgtagaagatctatcactgatgcaatccaatattgccatagcgcatggattcaaaaatttagagataccgaacaaaagggaccgctgctttccaaaaaaaactatagatctttatcccatccaaatgtgcggaaaagttgaggcaaagggtgatcagcctgcggctatcactactaactttgatacgtatacactgattctacaattagctgccattttggttactgttcctgaatggaagcgcacacattcgcttcgagttattttatttgtggaacaagaatatcatagaacgaacgaaactcaacgaatgaaaaagctattacaggttctaagaattgacgcagaggttttggtagtatctttagatcaattcagagtatacaacacaattgtcaagggagacccaatcgtgtttgattatgtcaactcgaaattggccgataatgaatggtggaaagatttggttgaagctcgtgatacattaaaaccgaagcggaggttttccactattgaacctcaaacgatagcaaagcaatttacacaatcaagaaaatatacgtctggggttcagaaattgggtgtctcatttacaatgaatacgagaatgccaactaaccgcattgataccccatgcgagagtgaggactccgatttggatacagatcttacgtcaattcgtgatgccttctcggcatcgactaatatttcagtaggtaaggacttaacgaccaaatcgaagaccggttccgacagaacaaatttactcgtaaagaatttacaaagcgatgtgtcaacacagtcgttaagacccgttttctcgagtaatactttgccgaggacgagagtcgtggaagatggcaccggtgaacagccgacactgatcccaattgccgaacctgacctttcaaatgggaacggtactgggagcggtattggcaacggcaacaaattaaagaaaccggttcttcccgaattatcaccttgtcgttccaaagatagtttagtcacagcgatgcaaaatttaggtttcaatgatcttcccagcactgctcaacatttggttctgaatgatgtgatgacacaaatgtcaaagagttcggatttaattttttcaaccctgccagttccagctcttggaacacatgaagatcacgatgcaagtttacaatatgtcgaggacttggatatttggttggagggcttacctccatgcatgttaatcaattcgcaaaccatgacagtaactactgcattatag

SEQ ID NO: 75631 - DNA, 1311 bp, Saccharomyces pastorianus
atgtcaaccaaaccagagaagccaatatggatgtcacaagaagattatgaccgtcagtacggctcaattactggtgatgaatcgtccacagtctcaaaaaaagactccaaagttactgccaatgcgcctggtgatggtaatggatcattaccagttttgcaaagcagctctacccttacttctaaggtgtctgatctacccattgaggcagaatccgggtttaaaatccaaaagagaagacatgaaaggtatgatcaagaggaaagattacgcaaacagcgtgctcaaaaattgagagaagagcaactaaagagacatgaaatagaaatgactgcaaatagatccataaatgttgaccagattgtccgagagcactataatgaacgtacaataatcgccaatcgcgctaagaggaatctatcgcctattattaagcttcgtaattttaacaatgcgattaagtatatgttaattgacaaatatacgaaacctggagatgtcgttttagaactcggatgtggcaaaggtggtgatttaagaaaatatggtgctgcaggtatttcacagtttattggtattgacatttccaatgcctctatccaagaagctcataagagataccggtccatgagaaatttggactaccaagttgtgctaattactggggattgctttggcgaatcattaggtgttgcagtagagcccttcccagactgtagatttccgtgtgatatcgtttcgacgcaattttgcttgcattatgcttttgagaccgaagaaaaagcaaggagagctttactgaatgtcgccaaatcactcaaaattggtggtcacttttttggcacgataccagattcagaattcattcgttataaactgaataaatttcccaaagaagtggaaaagccatcttggggaaactccatttataaagtgacatttgagaataattcataccaaaagaatgattatgagttcacatcgccttatggtcaaatgtatacttattggctagaagatgctatagataatgttcctgaatatgttgtgccattcgaaaccttaagaagtttagctgatgaatacggtttggaactagtatcgcaaatgccttttaataaattttttgtccaagaaattcccaaatggattgagaggttttcgcctaaaatgagggaaggtttacaaagatctgatggtagatatggtgttgaaggggatgaaaaggaagcggcatcatatttctataccatgtttgcattccgtaaggtaaaacagtatatcgaaccggaaagcgtaaagcccaactga

SEQ ID NO: 75632 - DNA, 2550 bp, Saccharomyces pastorianus
atggaaactattgattcgaagcaaaatattaatagggagtctttattggaggaaaggaggaaaaaactagcaaaatggaaacaaaaaaaagcacaatttgatgctcagaaagagaatcaaacttcacgcaatgacattgttactaacagtttagaagctaagcagactactgaaaagtttacggaaagacaggaacgtgtaaaagaagagcttcggaagagaaaaagtgaatttaggaaatctgacgaacctgtatcggttaagccttcgaagaaaaagtcgaagagaagtaaggtaaagaagaaaatatccttcgacttcagtgatgacgatgattctgaaataggagtttcttttagatcgaaggagcacattcaaaaagctccagagcatgatattgaaaaagatccactggatgagtttatgacgtcattgaaggaggagaaaatgagtaatagtaaaggcatgtacgacagaggcgacattcttgatgtagaggatcaattgtttgaacttggaggaaccgacgatgaggatgttgaagataatacggataattctaatatagcgaaaattgctaaactcaaagcaaaaaaacgtgtaaagcaaatttattactctccagaagagcttgagccgttccaaaaaaaattttatatagaatctgaaacagtttcctcgatgtcagagatggaagttgaggagcttagacttagtctggataatatcaaaataaagggaacaggttgccccaaaccagtcacaaagtggtctcaactgggactatcaacggacaccatggttttaattacagaaaagttgcactttggctccttaacgcctattcaatcccaggctcttcccgctattatgtcaggtcgtgatgttataggaatatcaaaaactggctccggtaagactatctcctatcttttaccattgctaagacaagtaaaagctcaacggccattatcaaaacatgaaacagggcccatgggtttaattctggctccaactagagagctagctttacaaatacatgaagaagttactaaattcacagaagcagatacatccattagatcagtatgctgtacaggtggttctgaaatgaaaaagcagattactgatcttaaaagaggcactgagattgttgttgccacaccgggacgatttattgatatattaacactaaatgatgggaaattacttagtactaaaagaataacgttcgtagtaatggatgaggcagacaggctgttcgatttaggttttgaacctcaaataacgcaaatcatgaaaactgttcgaccggataaacagtgtgttctatttagtgcaacttttccgaacaaactacgtagttttgccgtaagagttttgcattccccaatatctattacgattaattcaaagggaatggttaatgaaaacgtaaaacaaaagtttagaatatgccattcagaagatgaaaaatttgacaatctggtgcagcttatctatgagcgcagtgaattttttgacgaggttcaaagtgaaaatgacggacagtcaagcgatgttgaagaagttgatgctaaagccattatatttgtatcaagtcagaatatttgcgacttcatttcaaaaaagctgttaaatgctggaattgtgacctgtgctattcatgcaggtaagccatatcaagaaaggcttatgaacttagaaaagttcaaacgagaaaagaacagtattcttctctgtacagaggttctctcaagaggtttaaatgttcccgaagtgtcgttggttattatctataacgccgtcaaaactttcgcgcaatatgttcatactactggaagaactgccagaggaagtcgctccggtactgctattactcttctattgcatgatgaactgtcaggtgcttatatcttgagcaaggcaatgcgcgatgaagaaataaaagcttcaaactctctgcaagcaaaagaacttcaggaaatgagtgccaagtttgaatccggtatgaaaaagggtaagtttaggttgtcgaaagggttcggcggcaaaggactggaaaatattaaaagtaaaagagaggaagctcaaaataaagatttggagctcaaaaagaatgataagaggagcgatgacttggaaaagaaaatcaacaatccacacgaagggcatgacagtgagcctgagtcttctgcgcttattccgagactcaattatgaactattcaaagagtctacagacgggtcgatcatcttttacgccaaggtttatattaatgatttaccccagattgtaagatgggaggctacaaagaatacaaccttattatttatcaagcatgaaaccggatgtagtattactaacaagggtaaattttaccctgaagggaaggaaccaaagaatgaaaacgatgagcctaaactatacttattgatcgaaggccaagatgagaaagacatacaattaagtattgaattgctggagcaaaaagttaaagagggggtcgtaaaggctgcaagcttgtctttgaagagtactaagtactag

SEQ ID NO: 75633 - DNA, 2196 bp, Saccharomyces pastorianus
atgatccgtttagctcagcaaacacaagtactgaagggcaaacccccaaaccagtttgttccacatccgacaaagaattcgctgactcatccaatgaaatttaacggtacaatcgctatggagcaccatgaacacaactatgccattccttacacgcctgctacttttaacaatccagccctcgctacttatcaggtaagcccagccaaccattttgttcctcactttggtggcaacattggagccaacaacaacaatcatctagctcagaataacagcaataatagtaacaaccatcataacaataaccgtaatcatcaccacaataacaatcgtaaccatcatcaaaataaccataatcatagcaagtataataactccaatcaaggtaattcaattagcccagactccccatggtttcataaggtttgtgccttcgaagattgcgtttcacagactctttatatgtcacaaactccaaggcgtcaaaacatgaaacaccattcagaacatccaaattccaacgctaatccattattttgggattctataggtagagcaatggggctgtatcatgatctactcactacaccggaattaaattctgatcgtgtctccaagcttgtacatttacttcacaatgggttgagggctaatagaaatcagttgacgagaatgaacaagaaacctgattacgactctcaatcctttcacaaagaaatgacaaactatctttgcaaatctttgagagagatctccgaggacgttctaaacggcaaggtcgaactgaacgaatacggtgctatgcatttgataactgcgtttaaggagcttttgttgtttgaggaagctgtcgacatatggaaagctgcaatcaatgggcgaaatacctacacatctaatatttttctgaatccaagagttgtcggtgttatattacccatcttatacgacaatggtgtctcttatccagaaattcaagctctatatgaaaagtcttcatcgatgattaattacttccatccaaatctttcagttgggatgatcagagcctctttatctgctagtgaaaatgacatggctctcaaattattccaaaaattatgccaagaatcaaccgaaatgaaatacggttatttgatagaaacccatctttccttcattggtgaatgtaaagacttgaatgtggctcaaaccttttttgacaaggctttaaatgatgaaatgccatacaagatagacttgcaagtttcctacgtgaaatcctttttaagaaacatatggagccaaacccgtgatttcaaccacatctatcaaatctggtacaagtcttctttacattatggtagaaacgtcaaccacggtatttcttcatctttgaatgacacttttttcgacatttttcttgaaaattatgctgtggacaagatgcaaggttttcaaacattacaaaatattattcaaacttacaacaacatcaagcatatagatgaacctttctttaacattatcttggctaaatgcactgtctggcatgaccgcagtattttagaatacatcgataagagttacgaggcgtaccacattccaaaaacaatagtcgcttatagaatcttattaaagtctatgggatctgtcgatgatgcttcgaatgcagaaattctccaaagatggatggatttaatccgcaaatcagatgaaattggtcaaagatttattgccaacgcggattgggcggccttaagagatgctactgtaacatggacccaaaatgatagagattccaagaaaagtaacatgaacagcactcaaataagcagaaccgcaactccttcgccatccttaactccaatggatactccagcaccagagcatttgttcaacaatcctcaaaatccaatggacttctactcttatccagcattgcaagcagcgactgcttctggtgcatttgatgaatttgctgcggaggctgcttcttcttccataccagttgacggcagaatggttttgtatttgaaaattgttaaacgttactctccatattgccgtgattccagacaactagccagattaacaacagggaccgctgtcaaatattccgttttgcaagaagttttgaaccaattccaaactttaatcgttaacgatattcctattcctgaattacataatttgaagccaacgtgtgtttaa

SEQ ID NO: 75634 - DNA, 1353 bp, Saccharomyces pastorianus
atggtcaatagtaagaggcagcagagaagcaagaaagtagcgtcatcctccaaagtgccccccaccaaggggaggacatttactgggtgctgggcatgcagattcaagaaacgcagatgcgacgagaatagaccaatctgttcactgtgtgccaaacatggagataattgtagttacgatatcagacttatgtggttagaggagaacatctacaaagtacgcaagcattcactgatcagttcattacaggctcgcaaatcgaaatcgaaaccattgtgccagaaaatctcaaaatcaaggtttaaacaaatgacccattttagacaactatcacccccgacaagtgactgcgaagacagcgtgcacgaggcaagtaaggaaactacgcttcctaacgataatacattcaccataagcgtacggagattgaagatatacaataacgctgtggcctctgtctttggtagcatgacaaatagagattatactcaaaagcgcatagacaagaagttggacgaattgcttaatatggtggaaaacgacatatctgtggtcaacctcaattgctccaaacacgggccttactcagttttcagggccaatccggctgcagttacctctgctcttacagatcagctgccgtcgccaggtcattcgatgtcgtcagcagaggaaaccactactgcagcgctgtcatcgccgccagaagacagcacctctttgatcgatattatccaaggcaaaattttcgggatcctatggtttaattgctacgggaacatgatattgaaccgacaagaatacacgacgtggttcatcaataagatgaggaactcgttgaccacggaattcatacgcttccttgggaaaataattgacgacccggacatcaatatggcctcgtgcctgttcaaagagtgcatcgctcgttggagttgtgtcgattggcaatccatagctataacaatgctggtcatcattcatggatatacctgccccaacttgacaaagcttctaagagtgtggtttctccagcaaaagctattgagattttcgatgtatccgctggtcaactttatcataaacaatacacaagatttagacgttctgtaccattgtaatggattactagggaatgccgacttattcgaggatccctatcaggacgagcttacgtcggagttacatgtcttggtcacggagcgcctagtgaatagttggaaagatacaatattgcaacaactttgctcatgtcaagataccacactttcatgttcccaactgcggtactggcagctacaactgaagtgtaatcaacaattttacaaggatgtatatgccatgcaggactag

SEQ ID NO: 75635 - DNA, 1467 bp, Saccharomyces pastorianus
atggctgaaactgaaagactaatgcctaacggtggttcccgcgaaacaaaaccgttaattacgggccatttaatcttgggcacgatagttgcttgtttggggtcgatccagtacggataccacatcgcagagttgaatgcgcctcaagaattcttatcgtgctccagatttgaggcaccagacgaaaacatctcatacgatgacacttgggttgggcaacacggactcaagcaatgcattgcgttaaccgattctcaatacggcgcaattacgtctatattcagcataggcggactgtttgggtcgtactacgccggtaactgggccaaccgatacggaagaaagtacgtgagcatgggcgcctcggccatgtgcatggtttcttctctgctgcttttcttttccaactcctacttgcagttgctatttggcaggttcctggtaggcatgtcctgcggcaccgccattgtgatcacacccttatttatcaacgagattgcccccgtggagtggagaggcgctatgggatctatgaatcaggtttctatcaatctaggtatcctgctgacccaaaccttggcactcaagtacgcagactcctataactggaggtggcttctcttttccggatccgtgattgcggtagcgaatattttagcttggctcaaagtggacgaatctccaaggtggctggtgagccacggattcgtctcggaagctgaaactgctctgttcaagttgcgtccaggaacgtaccaacaagcgaagcaagaaattcaggattggcagcgtagccatgcgcacaaccgcgacccggagtcaagcgaagagactcattcaggacccacactatggcaatatgttaccgatccctcatacaagaaaccgcgcacagttatactcgccatcttgtcgtgccagcaattttgcggcatcaactctattatcttctacggtgtaaaagtgatcggcaagattctaccggactactcgattcaggtaaattttgccatctccatcctcaatgtcgttgtcactctagcagcatctgcgatcatcgaccacgtcgggcgccgtccattattgcttgcctcgactacggtgatgaccgccatgtcgctgctgatcagtgtaggtctcaccttgagcgtatcctttttactggtcacggccacttttgtctatattgccgcattcgccatcggtctgggacccatccccttcttgatcattggtgagctatcctacccgcaggatgccgctacagctcaaagttttggtactgtgtgcaactggcttgccaccttcatcgtcggatacctcttcccgataggccacggcctcatgggcggctacgtatttgcgatcttcgccgccatcgctgccatgtttgctacatatgtgtacaagcgtgtacccgagacaaagggcaagactacatacagcgaggtttgggctggctactga

SEQ ID NO: 75636 - DNA, 717 bp, Saccharomyces pastorianus
atgacagcaacgatcacaaataagaaatcatgctctggttctgttgaggcaggaaagacacgtttaacaactgaatggaagcctgaaagccaagtaccccaatatgttaaaaatgagctctctaaaccccatccaaactatatcctggcgtttttgaacgtggtacagcaattaaaaattcagagaagaaccggttatcttgacctcggtattaaagaatgtgaaagcatatcagatcacatgtacagattgagcataatcaccatgctgatcaaggattcgcgggttaaccgcgataaatgtgtccggatcgcattggtgcacgatatcgccgaatctttagttggcgatattactccagttgaccctattgggaaggaagaaaagcatcgtcgggaatgggaaaccataaaatatctatgtaatgctctgatcaagccatacaatgagatcgcggcaaaggaaattatggacgattggttggcttatgaaaatgtcacctcattggaagctagatacgtgaaagatatcgataaatatgaaatgcttgtacaatgttttgagtacgagagggaatacaaaggaacgaaaaacttcgatgatttctttggggctgtagctagcataaaaacagacgaagtaaagggctggacaagtgaccttgtcgtgcagcgccaaaaatacttcgccgatttgactcaatcgataactaaataa

SEQ ID NO: 75637 - DNA, 1347 bp, Saccharomyces pastorianus
atgttgcgacttttttcactggcacttatcacatgcttaatctactattccaaaaatcagggcccatctgctcttgttgcggccgtgggatttggtatagcaggctatttagctacagatatgttgattccacgtgtgggcaaatccttcatcaaaataggcctattcggtaaggacttgagtaaacctggccgtccggtgcttccagaaacaataggtgctatccctgctgcagtttatttatttgtaatgttcatttacattcccttcattttctacaagtatatggtcataaccacttcaggtgggggccatcgcgatgtctcagtggttgaagataacggtatgaattctaatatttttcctcatgataaactatctgaatatttgagcgctatcctatgcttggaaagtacggtcctcttgggtatcgctgatgatttatttgatttacgttggagacataagtttttcttgcctgccattgcagccatcccactgctaatggtttattatgtggattttggagttacgcatgtacttattcccggattcatggaacgctggttgaaaaagactagtgttgatttggggctgtggtattatgtttatatggcatcgatggcaattttttgccccaactccatcaacatcctggcaggtgttaatggtttagaggttggccaatgtatagtgttggccatcttagcgctattgaacgatttgctgtacttctcgatggggccattagccacaagagactcccataggttttccgctgttttgattatcccatttttgggtgtatccttggcgctatggaaatggaatcgttggcccgccacagtgtttgtgggagatacatattgttatttcgctggaatggtattcgcagtcgttggtatactgggtcatttttcaaagacgatgcttttgctattcattcctcaaatcgttaattttatttattcatgtcctcagctattcaaattggtcccctgcccgagacataggttacctaaatttaatgaaaaagacggtttaatgtatccatcaagagcaaacttaaaagaagaaccgccaaagagcatttttaaaccgatcttgaagttactatactgtctccatttgattgacctggaatttgatgaaaataatgagattattagcacctctaatatgacgttaataaacttgacattagtatggtttggccctatgagggaagacaaattgtgcaatacaatcttgaagttgcaattctgcattggaattttggctttacttggaagacacgctataggcgctatcatctttggccacgacaacctatggacagtacgttga

SEQ ID NO: 75638 - DNA, 489 bp, Saccharomyces pastorianus
atgaccacatctttttatgatttagaatgcaaggacaagaaaggcgaatcttttaagtttgaccaactgaaaggcaaagtagttctcatagttaatgttgcctccaagtgcggcttcacgccgcagtataaagaattggaagaactatacaaaaaatatcaagataaggggtttgttattttggggttcccatgtaatcagttcgggaagcaggaaccgggctctgatgaacaaattacggaattttgccagttgaattatggcgttacattcccaattatgaagaagattgatgttaacggaagtaatgctgactctgtctataattatttgaaaagccaaaaagcaggtttactaggtttcaagggtatcaaatggaattttgaaaagttcttagttgattccaatggtaaggttgtccaaagattttcctccttaacaaaaccatcgtccttggaccaagaaatccaaagcctgttaagtaaatga

SEQ ID NO: 75639 - DNA, 1164 bp, Saccharomyces pastorianus
atggactctattcaagaatcagatgtactaaatgcagtgaaaacaaaactaccgccgtgttgtttgagaatattcaggaataagatcatccttgttgggacgtatgatttagataagtcaactggatacagatcaggctcactggatgtcttcacaatggacctcaaacttttattttcaaaagatacgtatggcgcaatcttagatttgaagctatccccctttgatgatacattgatatgcacggcccattcgacaggtaatatcatgctatggaggatagggtgcacagataaggatgatttccaatcaaacgaactagatattcatgcaattgcaaatctacaactctttgaaaaagatgttctcattgcctcgtgccatttttccccacttgattgtaagaaattacttgtaacaaatacggcaggcgaagcagctaccattgatataagaacactatctgtacagttcacggcatcagcaatcgcacaggcttactcaaaactagataaaatagattacgaagttcaaggtgcaaccgaaaaagtcatccatgttgaatcggaacaatttttgaaaccccatgaactcgagtgttggactgcggaatttggatctctacagccttttcaagacgttgtatttacaggaggtgatgattcgaggattatggcccacgacttacgttccaaagaattcatttggggtaataatcgtattcatgatgctggtgttgttagcattaagtgtagtcaacctaactttcgaaataataaacccacgtccataataactggatcctatgatgataacattcgttctctggatttaaggatgatgggtgagtccatatttcctggtgaaaatgtcccaacagttaataaattggcgtgtgatcttggtggcggtgtttggagatttgttgaatcccccattgatcaggaacaatctcaccacaacggctccgatcggcttttagtttgttgcatgtacaatggtgccaaggtggtgaccatgaatgataattcagatgagtattttcaaattcaacattatctgaagaagggccatgattcgatgtgttacggtggcgactggtcaaattctttgatcgcaacatgctcattttatgataattccttgcaaacatggatagtttag

SEQ ID NO: 75640 - DNA, 1452 bp, Saccharomyces pastorianus
atggccagagcatcctctactaaagccagaaaacagaggcatgatccacttttaaaggatttagatgcagctcaaggtaccttgaaaaaaatcaataaaaagaagctagcgcagaacgatgctgcaaatcacgatgctgcaaatgaggaagatggatacatagactccaaagcatcaagaaaaattttgcagttggccaaggaacaacaggatgaaattgaaggtgaggaacttgctgaatcagaaagaaacaagcaatttgaagccagattcaccaccatgagctatgatgatgaagacgaagacgaagacgaagacgaagaaggttttggagaagacatctccgattttgaacccgaaggtgattataaagaagaggaagagatagttgaaatcgatgaagaagacgcagcgatgtttgagcaatatttcaagaaatcagatgattttaactctttaagtggtagctataatcttgcagacaagattatggcctctatccgagaaaaggaaagtcaagttgaagatatgcaagatgatgaaccacttgctaatgaacagaatacctcaagaggcaatatttcatccggtttgaagagtggagagggtgttgcacttccagagaaggtcatcaaagcatatactacggtaggtagtattttaaaaacttggacgcacggtaagttgccaaagttgttcaaggttatcccatccttaagaaattggcaagatgtcatttatgtgaccaacccggaagaatggtcaccacacgttgtttacgaagcaacgaaattatttgtatccaacctaactgctaaagaatctcaaaaatttattaacctaattttacttgaacgtttccgtgacaatatcgagaccagtgaagaccactctttaaactatcatatataccgtgcggtgaaaaaatcgctttataaaccaagtgccttcttcaaaggtttcctattcccattggttgaaacagggtgtaatgtacgtgaagcgacaattgcaggaagtgtgcttgctaaagtctctgttccggctttacattcttcagctgccttgagttatcttttaaggctacctttctctccacctacaactgtttttatcaaaatattgctcgataaaaaatatgctttaccgtaccagacggtggacgactgcgtgtattactttatgaggtttagaattttggatgacggtagtaatggggaagatgctacaagagtactcccagtgatatggcacaaggctttcttaacatttgcacaacgttacaagaacgatattacccaggatcagagagatttcttgttggaaactgttcgtcaaagaggccataaagatatcggtcctgagattagaagagaactattggcaggagccagcagggagtttgttgatccacagggagctaatgatgatttaatgattgatgtcaattga

SEQ ID NO: 75641 - DNA, 1113 bp, Saccharomyces pastorianus
atgagtgaatctccaatgttcgctgccaacggcatgccaaaggtaaatcaaggtgctgaagaagatgtcagaattttaggttacgacccattagcttctccagctctccttcaagtgcaaatcccagccacaccaacttctttggaaactgccaagagaggtagaagagaagctatagatattattaccggtaaagacgatagagttcttgtcattgtcggtccttgttccatccatgatctagaagccgctcaagaatacgctttgagattaaagaaattgtcagatgaattaaaaggtgatttatccatcattatgagagcatacttggagaagccaagaacaaccgtcggctggaaaggtctaattaatgaccctgatgttaacaacactttcaacatcaacaagggtttgcaatccgctagacaattgtttgtcaacttgacaaatatcggtttgccaattggttctgaaatgcttgataccatttctcctcaatacttggctgatttggtctccttcggtgccattggtgccagaaccaccgaatctcaactgcacagagaattggcctccggtttgtctttcccagttggtttcaagaacggtaccgatggtaccttaaatgttgctgtggatgcttgtcaagccgctgctcattctcaccatttcatgggtgttactaagcatggtgttgctgctatcaccactactaagggtaacgaacactgcttcgttattctaagaggtggtaaaaagggtaccaactacgacgctaagtccgttgcagaagctaaggctcaattgcctgccggttccaacggtctaatgattgactactctcacggtaactccaataaggatttcagaaaccaaccaaaggtcaatgacgttgtttgtgagcaaatcgctaacggtgaaaacgccattaccggtgtcatgattgaatcaaacatcaacgaaggtaaccaaggcatcccagccgaaggtaaagccggcttgaaatatggtgtttccatcactgatgcttgtataggttgggaaactactgaagacgtcttgaggaaattggctgctgctgtcagacaaagaagagaagttaacaagaaatag

SEQ ID NO: 75642 - DNA, 1572 bp, Saccharomyces pastorianus
atgttgttttcgtcttcatcttcttcacttaattccgaggtttcacaagtgttctcggaaaatatatctagtagatccactactctgactgaaagttccacacaaagcgagataaggcagcattttggtaatgaagatttcagtggtgaactaccaaaaaaattaattcaactcaagaaattaaaaaatggtggcactacaatcaagaaggctaaggaagaccttgagtattgctatgattcactacggctgtacgaaaatccctatgtaacatcatctgtagataaaaaatgtggttacagcattgaattgtatctagataacaagtacaaaacactaatgttctccgatttacaattgaatgctgactatccgttgtattacgattcctcactggataatatatctacaaatgttgaaagagaaagagccactcctctacaaatcaaaggaaagattaggataaacattgatagagaagaccaggccctcttaatcacttcccattcaatttctttaaaatgtttcacaaaggaatatgcatgctttgtaaattcagaaactagcaaaaactcctatagtgacaaaattatcaaagaacttaatcacacagagttttttgagtcttccacctaccccaaacagcagttgagagtcatacaccactcattaaatgataagaaaattctattgacaaagggcacgtacgattacccattcacttttacccttcaagcaaatactttcccagcaagtttctcttccttctttggcaagacccattttcgaatagaaagcttaacaacaataatgagaataccaagtaaacctaaaaacttactcaaatttttgaagaatgaaagttttacagataagatcattttaacagaagaaattaaagttaaaagagtcctgccttcaacgagtatgcttaagtttgaaacatttcaattaaggtcatacaatactgcaagtgatatcgtagtattggtcattggaaactccaagttgattgaaattggtatgcctttccaaatgatattatcaattaccaaaacagattcttccattgaattacaggaagcttctttggcagttgcacagagaatggcaataccaagtattgatttgaagaccaagaaaatactacgagagccatacattaaaaagtccgagtatttactaagaactgtagaaagccaaagtttcgattccgacaagaccattttcggattttgctttgatgacgttgtcatcccaacctatgcggatggtctaccgagctggtttaaaacattctactgtgaaccaagttcattttatcccaatcatgctgccctcaaagtaactcatttgcttttgttcagaataacctatagcaggaatgaattggtggaagggcttgaaatgaaaaaaaattatcgtattacggtgaattttccaattttagttggcgatagtgatatttcgaccagctctttgttacccaaatatgaaaaatttgaaaatattagtgatctacaagatgaacccccactatattctatggtagcaggtgagaatagcttatga

SEQ ID NO: 75643 - DNA, 924 bp, Saccharomyces pastorianus
atgttcaagaggcaattatcgactagtgttcgttatctacagcattatgatgagtcgctattatcaaggtactatcctgaaagtcttttaaaatccataaaacttgctcaacaaacgataccagaagatactaaattcagagtatctcgtaacgtggaattcgcaccaccatatttggatgattttaccaaaatacatcctttttgggattacaaaccaggcatgccccatctccacgctcaagaggagaataataacttcagcatctttagatgggaccaggtacaacaaccattaccaggcgaaggtaacattctgcctccaggagtcagcttaccaaacgatggtggtcggaaatcgaaaagcgccgatgtagctgcagggctacacaagcaaaccggtgtagatccggattatatcactagaaagttgactatgaagccgctggtgatgaaaagagtgtcaaatcagaccgggaagggtaaaattgcgtctttctatgccttggttgtcgttggtgacaaaaacggtatggtaggtttgggagagggtaaatctcgtgaagaaatgtccaaagcgatctttaaagctcattgggatgcggtaaggaacctgaaggaaatacctaggtatgaaaacagaactatttatggtgatatagattttaggtatcatggtgtgaaactacatttaagaagtgcaaaaccagggtttggattacgtgtaaaccatgtaatctttgagatttgtgaatgtgcaggtatcaaagatctgagtgggaaagtatataaatccagaaacgatatgaatatagctaaaggtaccatcgaggctttcacgaaagctcaaaagacattggatgaggttgccctgggtagaggcaaaaagcttgttgatgtcaggaaagtttactattcaagctga

SEQ ID NO: 75644 - DNA, 444 bp, Saccharomyces pastorianus
atgactgctactagcgacaaagtactaaagattcaattgcgctcagcaagcgctactgtacctaccaaaggttctgccactgccgcgggatacgacatttatgcatctcaggatattaccattccggctatgggtcaaggtatggtttccaccgacatatcgttcaccgtacctgttggtacctacggtcgtattgcgccaaggtcaggcctggcagtgaaaaacggtatccaaaccggtgctggtgttgtcgacagagattacaccggtgaagttaaagtagttttattcaatcattcacagagggatttcgcgatcaaaaaaggtgatcgcgtagcccaattgattctggaaaaaattgtcgatgatgcccagatcgttgttgtagactctctggaagaaagtgcaagaggggccggtggctttggtagcactggtaactaa

SEQ ID NO: 75645 - DNA, 366 bp, Saccharomyces pastorianus
atgagcaaccaggcactatatgagaaactcgaacaaaccaggacgattctgtctgtgaagctggcggaattgataaatatgactacgatagccgatagaaatgatgatgacgaggattcattcgcacaagaaaattctgagctcgctgtggccacgaccagtgtgatgatggtgaataaccagaccatgcaattgattaaaaatgttcaagacttgttgatcctgaccagatcgataaaagagaaatggctactgaaccaaattcctgtaacggaacactcaaaagtgactcgttttgacgagaagcagatagaggaattactggataactgtatagaaacgttcgtggcggaaaaaactacgtaa

SEQ ID NO: 75646 - DNA, 528 bp, Saccharomyces pastorianus
atgcctcagtattttgccattattggtaagaagggcaatcctgtctatgaaatcgagtttaccaatgcagaaaatccacagggttttcctcaggatttaaaagaattaaatccgttcatactgcatgcatcactagatatcgtagaagatttacaatggcaaattaatccgacttcacagttaaatgggaacggtggaaacggatccaatggcggtggtgggttccttcgatctagagctataaacaatactgataattgttatctaggtaaagttgatcatttttatggactagcaataacggcttatattagctatagtgggatgaagttcgtgatgatccatgggaactcagccaacagtagcgtagttattgacgacaataatatgaggtcattctaccaagaggtacacgaactatacgtaaagacactaatgaacccgttttataagattacagaccctattaggagcccggcattcgactcgagggtaaggacattagcacgtaagcatttgtccaaataa

SEQ ID NO: 75647 - DNA, 2085 bp, Saccharomyces pastorianus
atgactcatacaaatgagcacgaccataaggctgaacaacaacaaaatggaaggggcgatacaacaacagagactgtaaaccctctgaagatgaaattggttaccaaacttctcattgataataaatttggactaatggacgacttgaattttagtagaccattaaccgcttcttctgagggtgtaccaatatcagcaaagacatcagaattgggtacggagtacctcaagaatcaacaagagaattcagtaagcccaatacttccaatatcaagaagtacaagaataaaagcagacagggtgagaatatatttagactattattataatatattagagcgttgcatttcaattgatagctcccagaatcatcatgagggtgttgaaggggtgtacaacccattacaagttattaggaatcgtaaattaaaaaagaagcatcatgaattacctaccagagagttttatactacaaaacaccctattattgccattaagcagttttcgaaaaaacctaacaaaaaaatgccgtggtttgtagatataaacgagaagtatatggatttgacttggagaacttcgcattgggaagaattagtggatcctcaaggtaagctttggttccagtcttatagtccttccaacgaatcgagcggatcatcatcatcccgccggcatcatggacaccacattcatcccagaagacatttacgacatcactccagggtccgtacagctaattcagtgcactcaaacactcaatcactaacaccgaaacgagtcatgaccaatgaagaagacaataataatcataacaataataacatgataacgaagatcgcaactactccagaagctcagatttcaaggaacaaaaaatctgatctcaatttaagtcacattcatttagaggtaccaataaccaatacagttacaaacacctcatcagatcaggggtcattggtcatcgaagcaaagggcagtagctatggaggtgatcgtcgtggaagtagtaataccagtggaagtggtgggaaaagaaattctaaacattatcgttcaaaatcagcaggccccccggaaaacgagaaatcaagaatgaatgggctcgaaaaaatcattagtaaaacgtcgaaaggatggtctagatcaccaaaaaaaaatacgcctgggcttgaaaaacaggtgcttctgaatcccactattagtaatggaggcaccagcagaaggagcagtaataatggagagagtattagtaccaacagtagcaaaagtagcatgggaattacttttggaaacactgaaacttacaagacgccggttgataatgggaaagatgctataatacggcaaagtttgttgagcgaagtgccagttcataccttgagaggtaaaaccagcaacagatcgttgcgagcagaaggtgaacaagctcttgaaagtgacaaagaattaccaaatggtgctgggagtatttacgaaggtgcgcctagggagaagactactagtcaaggtagcgaaccagtgggattagtaagcgattccttacaggttgacgaacagttacagagatactggcatgatacaaggtatattatgagtaccgtagctatgatgcaacacaggagagagacacatgatatagtgaagaggagagaaattgcacgaagaaacgaaattgaaattacacaagatgcagatacaaacattaggaagactgcagatgctttgactcagtatgataatgaattgaataaagttttaaagctaggtaatgactggacatcaaaacttctgaacgactattcaattcgtgtagaaactttgatatcatctagtgacagaattcttagtgatataaatacaacattgacattgaagttgaaaatgtttcaagagaatacagaaaggtatgttacggtgaaagttatgagagcccaaaaggtgaccaaaaccatatatcggttgctggaatttggcattgttttagttctttggacaatttggtttttgttcagcgtcctgagaagcattcggttcacaatttttttagttctaaaaatcattaaggcattgctgtggtaa

SEQ ID NO: 75648 - DNA, 717 bp, Saccharomyces pastorianus
atgtttactggtattgtagaatgcatggggactgttttggaaaacaacccatatgatgactctgaaagtggaggtcaaggagtttctattactattggcaatgcggggagtattctcaccgattgtcacgttggagattcaatagccgtaaatggggtatgccttactgtgaccgagtttaataacgactccttcaaagttgggatatcaccagaaactataaaacgaagtaatgtcgcttcctggattcaaggcaccaaggtcaacttggagagagcggtatctcaagacgttaggttcggtggtcattatgtacagggtcacgtagacactgttgctaatattgtctcaagaagacctgaggggaattcaattatttttgggtttcagttaagagatcaagagtactttaaatacatagtagaaaagggattcatttgtatagatggaacttccttgaccataatcaaggttgacccactttcgcaaggtggagccttctatattagtatgataaagcacacccaagacaatgttatcatgcctttgaagaaaattggcgacgaggttaatattgaagtagatttgactgggaagattattgagaagcaaattctattaacgttggaaaaccaaatatcaaagaaagatagtactttgaatactatgatctcaaacattatcgaggagaaggttagaaactacctaaataaataa

SEQ ID NO: 75649 - DNA, 840 bp, Saccharomyces pastorianus
atggatagaactcaaacgtttattaaagaatgtcttttcacgaaatgcctggaggaccctgaaaagccctttaatgaaaatagatttcaagatacgttgttgctactgccaactgatggcggattgacttcaaggcttcagagacagcaaagaaaatcaaagctaaatcttgacaatttacaaaaggtctcccagttagagagtgcagacaaacagttggaaaaaagagattaccaaagaatcaacaagaactctaaaatcgcattaagagagtacatcaataattgtaaaaaaaatacaaaaaaatgtgtgaaattggcatacgaaaataaaattactgataaggaagaccttttacactacatagaggagaagcatccaacgatatacgaatcattaccgcagtacgttgattttgtaccgatgtataaggaactatggattaactatattaaagaacttttgaacattacaaaaaacttaaaaacattcaatggatcattagcattattaaaactatctatggcagactataatggtgcgctgttacgcgttacaaagagcaaaaataagactttaataggccttcaaggcattgtgatctgggactctcagaaattttttatcatgattgtcaagggcaatataatagacgaaataaaatgcattccaaaaaagggcacagtatttcaatttgaaatcccaatatcagatgatgacgattcggcattgagatatagtatactaggcgataggttcaagtacagaagtgtggatcgtgcaggcaggaagttcaaaagtcgtcgttgtgatgatatgctatattatatacagaattag

SEQ ID NO: 75650 - DNA, 429 bp, Saccharomyces pastorianus
atggcgtataatcaagaagatagtaaaagactatcagacaagtataagaaggagggacattttgacaagttgaaaagagaaatattgtctaacccatggaataatacagaagagaatagtgaatcttttgaacaagcgcttaggaaaagagttgccagtactgttaaagaaatggttaacgaagatgaagaattaatatttaaaaacagagggctaaccagtgcattgattgaatcacaattggtcaaggacaactacctaaagctgggtagtaaaatggagggggataatggtgatggtgagaagaaatttgacttggatgtctatgtacggtctaagttacaggatcccaaactattggaaatgataaagggacaacttcaggaaacactgaactcttatgaagaggaagcaaatggaagtacgtaa

SEQ ID NO: 75651 - DNA, 2067 bp, Saccharomyces pastorianus
atgtccattgacgaggctgttgccagatatagagatgttataggcaatctagcaactggcaatttaaggcggattgttatacagtcagaaaaactggcccagatcattgcatcttcaaaaggtaccgttcgtttccaccataaaactcgcagcggtaaaacagtaatatacaaatgcatcaaaaaggcgctgctttccagtgtcgcgtctctatcgtcagagttttcctcagaaacagatgttcagcaattcctccatttaaattacatatatcaatctcacttccaagctttgagtggacaaataaacaaatattgcggcatgaagaaatactacgagttaaagtttgcagcaatcgactacttagaaaccgaagtccaaactaccgggcttacactctcaagattctgggtggcatctttagatgagttcattaaaaaagagcgatggccagataatggatctaactttcaaatcttttacaaactaatggctgagtattcgtcttggaaatgggattctgatgataaaaggcaactccagttcatgtacgaatttcgaatgaaactcaaagaatgtttggtgaaattttacgagaattttgatcttcaaaaatctagcgatcctctgaaagaactcattataccttgggaaaagattgtttatgtcgccaactgtatcgatgcattcactggagagcaagttaggatcgacggtgctgaattaatctggacatccaaaaatcttgtgttctcttcgatttcttctgccgttcttagattaaatgaccttcaaaatatgttcagcgcattccagccttatggggaagaagcattagttcaagactttgcgcatatacgatctttaaagtgggatagtaatgataaagttgaaagcttaattcgtgcccttatttttaatgatatgtttccttatttcaataaggaacaggtagatacgaaggcagatggtatattccttttgcgcttactgagaaaaaacttcaaagaacacattaatgacgttaaagattttcatattcaagtgataaagtacttgaattcccaatttaaaaataattacagcacattgatgacgtcatcgaaaactcaggatagaaggaaaagtcataatatgccttcttctatcttagatgatggtaacaaaattggaatgcatgtttcgcctatcgatgaatactcacattttgttgataatgatgaaccgttgtggcgagacaaagtatatccaaagatttacacaaatgagcaaacacctacacctgacgcatcagcaatatttgattctcacaggatatatgcaattatatcgctgctgcgatattacttacctgagaagagaaagttttttcggatttattatctgcccagtatttttaaaaggatattatattacggtgcaaagtttgctcaactatatttcatggaaggttgcttggaacggctagtaatagaatctctccaaattctagaaccctctttggtacatgcgataaataatttgatcaagtctagcatagaatcactgaaaaatgtaacagtgacaagtgatgacaaaacttcatctggtgtcattattttgtcctacaaagaatttaagtcactatctgaagttaacaaagatttcaatgaaccattttggcctaaccaatcaattgcgaatagttggccagatttcgcgaataagcaattaaagaggggtcaaaatttgcaagatgcatttgcattccacctttttgaaattgaactaccaattattatcgatactacaagaaatacgcatttgaaactcgtttccaacatgtgtactacgagcatattgtacttatataatgaagttgattccttatcattaactagcatacaggaaaaattagctgttttaccgacaagtaaacggaatgaaatcttattgtacaatttgaacaggctaacaaaattgaaactattgttgttgaaagagaacgaaaaaggacaaaagttttacgcatttaattttaattacaaaagggatggacagaaaacatcattaataaggttaatttaa

SEQ ID NO: 75652 - DNA, 699 bp, Saccharomyces pastorianus
atggacgtgcctgcagattcccatatcaaatacgaagatgccatcgactattggacggatgtggacgccactgtggatggtgttctaggtggatacggagaaggtacagtagtacccacaatggatgtcctgggatccaataacttcctgcgtaaactgaagtcgaggatgctgcctcaggagaacaacgtgaagtacgctgtagacattggtgcggggattggacgtgtaagcaagaccatgcttcacaagcacgccgctaagatagaccttgtagaaccggtaaagccatttatcgagcaaatgcacgttgaattggctgagctgaaagacaaaggccaaattggacaaatatatgaagtagggatgcaggactggacccccgatgccggcaagtactggctgatctggtgccaatggtgcgtgggacacctaccagatgcagaactcgtcgcattcctgaaaagatgtattgttggtttgcaacctaatgggacaatcgtggtcaaagaaaataacacacctacagataccgatgatttcgacgaaacggattcttcggtcacaaggtcagatgctaagttcaggcaaatcttcgaagaagctggcctaaagctcatcgccagtgaaagacaacgtggcttaccaagagaattgtacccagtgaggatgtacgcactcaagcccatgccaaactag

SEQ ID NO: 75653 - DNA, 321 bp, Saccharomyces pastorianus
atgtcgaaattgggtccgttagcaagatctgtgaagtggactctctctgtgggagtaatcggttctgttttttacctgtaccgatacagtaacaatggctacttctacgatcacgatgctacatggttgaaacaagatcatcaggtacaggacctggtggatagaaaagaagtggtacctggggagaccaggaaccgcaagctagttgtgacggatgatggcactgcatggagtaggaccatgggggagagcataaaagatatttggaatgaacagataagaaactctgtcgattggatctactcctggggtaagaattag

SEQ ID NO: 75654 - DNA, 657 bp, Saccharomyces pastorianus
atgatagtaaaattactccaggaaatacaagtagcacaaaatacggaggaatacgatatggaagcaaccatcaaagtggtactgctaggagattcatcagtggggaaaaccagtatagtgactaggctcaaatcaggtaagtttctagcaaaacatgcggctacgataggtgcggcgttcatcaccaagacaatcgaggttccttctaacgacgcctctacggagaaacgtatccatatggagatatgggacacggcgggtcaggaacggtataaatcactggtgccaatgtattatcgagatgcgaatattgctttgattgtattcgaattgggagacgtatccagtctgcaatgtgcaaagacatggtttcaagatttacaggaccgtgctcagggaacgcaggtaattctcgtgggcaataagtacgatttagtctgcgaagaggattcaggggaagtgactataccggcggagttacagggtctgccgtatgtggccgtaagtgcaaagacagggtacaatttcgatacattgaataaaataataatcagtttggttcccgaaagtcaattcaagacattgtcaaagaacaatgaacagggaaatatactggaaataaataaaaaaaaaagcggcagtggctgtatatgttaa

SEQ ID NO: 75655 - DNA, 963 bp, Saccharomyces pastorianus
atgaagtttacgttagaagaccaagttgtgttgatcactggtggttcacaaggtcttggaaaggaattcgccaaaaaatattataatgaggctgaaaacacaaagattattatcgtcagtaggtcagaggctagactgctggacacatgcaacgaaattaggattgaagctcacctgagaagggaaaccactgacgagggccaagtgcaacataagttggctgcgcccttggaccttgagcaacggttattttactacccatgcgacttgtcctgctacgaatccgtggaatgtttgttcaatgtcctgagagacttggatttactccctacgcaaacgttatgctgtgcagggggggccgttcctaagttatttcgtgggctaagcggacatgagttgaacttgggtatggacatcaactataaaacaactttgaacgtggcacatcagattgcccttgcagagcaaaccaaggaacaccacctcatcatcttttctagtgccaccgcgctttacccatttgtgggctattcccagtatgcgcctgcaaaagctgcaatcaaatcactggtagcaatcttaagacaagaactgacgaacttccgtatcagttgtgtttatcctggtaattttgaaagcgaaggtttcactgtagagcagctaacgaaacccgaaattacaaagttgatcgaaggcccctcagacgctatcccatgcaaacaagcatgtgatatcattgccaagtcgctggccagaggtgatgatgacgtttttacagattttgtcggatggatgataatggggatggaccttgggctcaccgcaaagaaaagccgctttgttccgttgcaatggatttttggtgtcctatcaaacattctggtcgtgccattctacatggttggctgttcctggtatatcaggaaatggtttcgtgaaaatgacggcaagaaggccaactga

SEQ ID NO: 75656 - DNA, 1182 bp, Saccharomyces pastorianus
atgagtagcagtggtgtttatacgtgtaattcatgtgtcctgacctttgatgcaagcgacgagcagcgggcccacatgaagtccgattggcatcgctacaatttgaaaagacgtgttgcacaattgccaccaatatcatttgagacatttgactccaaagtgtctgcagctgctgccagtactagcaagtctgctgaaaaggagaaacctgttaccaaaaaggagttgaaaagaagggaaaagcaagcattgctcgaaaagaaaaagaaactgttggaaattgccagggctaatatgcttgaaaacatgcaaaagagccaagaaggagatactcccgacctaagcaagctctctttgcaagaaaatgaggagaacaaggaaaaggaagaacctaagaaggaggagcctgaacagttgaccgaggaagaaatggcggaaagagtaatgcaagaaaagctacgcaacagagtcgatattccactggaacaatgtctattttgtgagcacaataagcacttcaaagatgttgaagaaaacctggaacacatgtttaggacccacgggttttatatcccagaacagaaatatctagtcgacaagatcggcttggtaaaatacatgtcggagaagattggtcttgggaacatttgtattgtttgtaattaccaggggagaacgttgaccgctgtaagacagcacatgttggcaaagagacactgtaaaattccctacgaaagcgaggatgaaaggttggagatatctgaattctacgattttacaagctcatacgcaaactttaatagcaacacaacaccagacaacgaagatgactgggaagacgtgggcagcgacgaagccggaagcgacgacgaagatctgccacaagagtacttatataacgatggtatagagctgcatctaccgacaggcatcaaagttggccacaggtccttgcaaagatactacaagcaagacttaaagcccgaagtgatactgaccgaaggccaaggtaccctggtcgctgcagagacgagatcgttcttacctgccttcgacaaaaagggcgtgcagactcaacagcgtgtttggcaaactgagaggttcgacaagaaaaggctcgataagagaagtgccaagttcgtcaataaccaaccacactacagagaccaacttctgcagtaa

SEQ ID NO: 75657 - DNA, 453 bp, Saccharomyces pastorianus
atgtgttccaggttttcttcaacatctttgaagtgcttattgtgctcacaaaatagacattgttccagtggaatatcgactctgttgcgtagcttttcttgcattactctttccgccatttcttcctcggtcaactgttcaggctcctccttcttaggttcttccttttccttgttctcctcattttcttgcaaagagagcttgcttaggtcgggagtatctccttcttggctcttttgcatgttttcaagcatattagccctggcaatttccaacagtttctttttcttttcgagcaatgcttgcttttcccttcttttcaactcctttttggtaacaggtttctccttttcagcagacttgctagtactggcagcagctgcagacactttggagtcaaatgtctcaaatgatattggtggcaattgtgcaacacgtcttttcaaattgtag

SEQ ID NO: 75658 - DNA, 318 bp, Saccharomyces pastorianus
atgttggcgcgcagtttgggttacaggttgatatcgaccagtcgtgtcttatataataaacccacggttaagtcagtggtgtcgtcgtgtcctgcgggaacatcgcttaacttaaacatatggaagagcggtaaagacgcagtggcactcgaggacaaggagtatccaaattggttatggagcgtattggatagtgatcacgttgtcgaacatgcggctgaggacccagagggacaggctctcttaaagagaagaaagaacataaggaaggcgaacaggcagcgaatcaagcaaaacaatttcttgagccaactttaa

SEQ ID NO: 75659 - DNA, 1638 bp, Saccharomyces pastorianus
atggcaacagacctaaatcgtaaaagaagtgctacctcaggcgcactgagcgtcacaaacccgaacataaaagcaactaatcgcaaaccagctagagtttatagtgtttcttctgatatagtaccgcaagcgctgacacatcccgacgaagatgtgcatctaaaaacatccaaatctcctcatgatgccgctcctagatggtcacaggtggggtttcaatctatattccatgatggttccaatgcaaggcgctcgacggattcgattgaagaggagtacagccaaggcacggagaataacgatggtcactccgaaataggttcatcaagtagtaatcgaatggaggggaacaccacgtctaatgatagtttattttcttccaactcaaggggcaataaaaggcgactgtccatcttcaccaattcaaaagataatatgagaaatcgaagcagaagcgggtcaaaaaactacggcactgttattaccggcacaagtagtaacaacataagtaggagtggctctaaattgtttcatacgaaatctaatatgagtgtgaacagtttacaatcttcactgtctacaggacattctcattcaaacaaaggcagtaatgtctttagcaaaatggcaaaaaagcttttaccctacaagccgcataattccattggtaaagacgacgttgaatccgtagttcccagcccattcagtaaatttctgcattcttcatatggtaaacataggtcacccgtacagtttatccatacttctactggaggccttattgactctggaaaatctgtatattcctttaaccctagcattaacaacaaccctaatgatacagctctatcgctgatccaagatgatgctttcgacgcgactaatgtttctttactacatgatttactgaaaaacttgccatccttgatagcaaactataaaagcttcaccgtacaggagttatttgttctggaggggaatatctggggtatatactgcagcatagttgtggagctatttaaaaacaagagggtatggcaattgccagcaaaaatagaagatattgaccggctgctggaattttatatcactttgaaaacacaaaccaaggctgccgtaacgcactcaaggtttttggccgaaatcgaggaattcattaccacttcactttacattttagagaaccagattgtgttcaattatgccaatgaggataccgtaaatacggctttgaaaagagtcggcataatctggaaggtgttttaccaacaggtttactacgacatgatggcagtgttactgcccttcgagaaaagcttccaaaaaaatagtaactactggcttgacggatatctatctgaaccttcaaggtacgcaccgtcaattgatgtccttttattaaagtgttttagagactccatcattcttccgtattacgaaagcttcctacatacaaatgacggtgccagtaagagttttcaaagatatattttcagcgaggaagaacagaacggcgtcacagaggaagataaactgacgctgctgcagtgttttgggatcctgaataccataaaaggtaacagcagaaaccaaagaattattggtgaacttcttgagggcatacgcatgagtatataa

SEQ ID NO: 75660 - DNA, 1260 bp, Saccharomyces pastorianus
atgtttgatcctctcgatttgtacacccctgatgacatccaggttgaggctttacagttcaatctagcagagagagagccaaaagatccttgctcaccgcaacgtgacgaaatattaacggctgtagatgaagaacagagtgacgacgatgacaccattatcgataatctggatctgccctccgtgaagtatgctccgccagaagttatcctttgtatactaatacttctgaagcccgatagacaagtaaacttcaatcaggagacagggaagaacaaatctgtactggaggtttgcaagagtcatgggctggaacccgatctgctgaaaagacttttaagttggtatacagaagaatggcctaacaagaggttaaactcgttggaaaagatatgcaataaaatcccaatgctgagatttacagtatcaaaagaactactgttgggctactatactagtgtattgaaaaaatacaataatagttgcggattgaatgacgaaatcatacaagaacttcttaaggaattgagctcaaggatatccgaaaactgtgggagaacggcccaaccatccatagtaagatattttgaattaagaaatctaagcacttccataccgcttcatgaaccctctttaacggccgataatcttggttggaaaacatggggatcatctttaatactttcacaattagtcgtagatcacctggattacctacataccactaatgtgaacatgttagcgaacagcgacatcaaacagattaaagtattagaattaggagcgggcactggtttagtaggactttcatgggccttaaaatggaaagaactttatggaactgaaaatatagaaatcttcgtgacggatttacccgagattgtgacgaatttgaagaaaaatgtgtcattaaataatttaggagatttcgttcaagcagaaatattagattggactaatcctcacgattttatagataaatttggacatgaaaatgaatttgacgtcatattgatcgccgacccgatatattcgcctcagcatccggaatgggtagttaacatgatatcgaagtttttggcggcatcagggacctgtcacctagaaatacctttaagggcaaaatacgccaaagaacgagaggttttgaaattattactaaaagagagtgatttaaaagtagttgaagaacggcattcagagggtgtggatgattggggtgccgttaagtatttatataggcaaatcgttcgcaattag

SEQ ID NO: 75661 - DNA, 1311 bp, Saccharomyces pastorianus
atgttagaagcactgtttagagattctgtggaagaagcaataaacgattccatcaagcaaggcgttgtgctggccgtttacaacactgcacgggatgaccagtggctgaaaagttggtttaaaggagatgatgtctcattagatactttagcggaacatagtatttggttgaggttggtcaaagacactgagcagttccagttatttgagcaagtatttcctaatgtagttgtacccagtatatacttgatacgtgctggaaagatagaattgattattcaaggcgaggatgaccgacattgggagaagttgctgacgtgcataggcatcaaagacaaaaaggctggtgagagttcgtccagggaaaccaatccaggtttggctagagaagaaaagtcatccagagacgtccataggaaaaatgcaagagaacggattgctgagactaccttagagatccaacgtcgtgaacaactgaaacaaagaaagctggctgaggaggaaagagaaagaattataagacttgttagggcagaccgtgcagaaagaaaagctcttgatgaaactcatcacagaacccttgatgatgataagccattggatgttcatgattacataaaagacgcacaaaaactgcacagcagcaaatgcgtcttgcaaatcaggatgactgatggcaagactctaaaacatgagttcaactcgtctgaaacattaaatgacgttagaaaatgggtggacctcaacaggacagatggagactgcccgtactcattccacaggggcattcccagagtgacatttaaggattctgatgaattgaagacgctagagacactagaactaactccaaggtcggcattattacttaaaccactagaaactcaaaactcggggctatctgtgactgggatggagggaccaagccttttgggccgtctttataagggattctctacgtggtggcgcaacgataaagatcctgaagtaacatcacaacgtgaggaaacatcgaagccgaatcgtcacgaagtgaggtcttcaacacctttatctggagctgcttcgtcaagctgtttccaatacaacaatgttcgggaaccagttcaatcatctgctcatgcatcaccaatgctgacacctagcggaaccaggtacccatcggaaaccaaccttactacgtcacgttctgtctcgccaaatgttttccaatttgttaacaacgatcatcaagaagatcctgaagacccaacaacctttaatggtaataatgtccatttagaaaagaaaaaggacgaagataaagaataa

SEQ ID NO: 75662 - DNA, 1584 bp, Saccharomyces pastorianus
atgagtctctcgcaggtgtcacctttaccccatatcaaggatgttgttttaggagatacagtaggccaaggcgcattcgcctgcgttaaaaatgctcatcttcaaatggatccctccattattctagctgttaaattcattcatgttcccacttgcaaaaaaatgggactcagtgacaaggatatcacaaaagaggttgttttgcaatcgaagtgttctaagcatcctaatgttttgagacttatcgattgtaatgtctctaaagaatatatgtggataattctggagatggcagatggtggtgatctatttgataagattgagcctgacgttggagttgattccgacgtggcccaattttactttcaacagctcgttagtgctattaattatctgcacgtagaatgtggagttgctcacagagacatcaagcctgaaaacatcttactcgataagaacggaaatctgaagcttgctgattttgggctcgcctcccaatttaggaggaaagatggtacattacgtgtatccatggatcaaaggggttctccaccctacatggcccctgaagtattatattctgaagagggttattacgcagatcgaacagatatatggtctattggcatcctcttgttcgtattgttgactggtcaaacgccttgggaattaccttcattagagaacgaagatttcgtcttttttattgaaaatgatggaaatttaaactggggaccctggtcaaagatagaatttactcacttgaacctactccgaaaaattttacaacctgacccaaataagagggtgacattgaaggctttaaagttacatccttgggtattacgtcgagcttcattttctggggatgatggtctctgtaatgaccctgaactcttggctaagaaactgttttctcacttaaaagtctcactgagtaacgaaaattatttgaaattcactcaagatacaaactctaataataggtacatttctactcagccaattggtaacgaattggctgagcttgaacacgactcaatgcacttccagaccgtttcgaatacacaacgtgcatttacctcgtatgattcaaatacgaactataatagcggcacagttatgacacaagaggctaagtggacgcaattcataagctatgatatcgctgccttacagtttcattctgatgaaaatgattgtaatgaattagtaaaacgacatttacaatttaatccgaataaacttaccaagttctacacgttgcaacctatggatgttttgttaccaattttggagaaagccttgaatttatcacaaattagagtaaaacccgacctttttgcgaattttgaaagattgtgcgaattattgggctatgataacgttttcccacttattataaatattaaaaccaaaagtaatgggggttatcaattatgcggtagcatttccatcataaagattgaagaagagttgaaaagtgtcggatttgaaagaaaaactggtgatcctttagaatggagaagattgttcaagaaaatttcaactatctgtagggatattatcctaattcccaactga

SEQ ID NO: 75663 - DNA, 5751 bp, Saccharomyces pastorianus
atgtcgaaagatttttcagataaaaagaaacatacgatagatcgaattgatcagcatatcctccgtaggtctcaacacgataattattccaatggaagctccccgtggatgaaaactaacttgccacctccatctccacaagctcatatgcatatacaaagcgatctatcgccaacgccaaagaggcgaaagctagcgtcttcaagtgattgcgagaataaacaatttgatttatcagctattaacaagaatttatatccagaagatacaggaagcaggctaatgcaaagtcttccagagttgtctgcctctaatagtgataatgtatcaccggttacaaaaagtgtagctttttctgataggatagaatcatcaccgatttaccgcataccaggttcctcacctaaaccctctccatcaagcaaaccaggaaaatcaattttgaggaataggttgccttcagtgaggactgtaagcgacttgagttacaataaactccaatatacccaacacaaattacacaacggtaatattttcacatcaccttataaggaaacaagggtaaatcctcgctccttagagtattgggtgagtggtgagatccatggtttagttgataatgaaagtgtttcggagtttaaagaaattattgagggcggattgggcatcttgcgacaagaatctgaagattacgtcgcgaggaggtttgaggtatacgcaacctttaataatattatacccattctaaccactaaaaatgttaacgaggttgatcagaaattcaatattctaattgtgaatatagaaagtatcattgaaatatgcataccgcatctacagatagcacaggacacattattaagtagtagtgaaaaaaaaaatccatttgtaattagactatatgttcaaatagttcgattcttcagtgctattatgtctaatttcaaaatcgttaagtggctaacgaaaaggccagatttggttaataagtttaaagttatttacaggtggaccaccggtgcgctaagaaatgaaaattcaaataagataatcataacagcacaggtctctttcttgagagacgaaaaatttggtacttttttcttgagcaacgaagaaattaaacctatcattagcactttcactgaaataatggaaatcaatagtcacaacctaatatatgaaaaattgctacttataaggggatttttgagcaagtatccaaaattaatgattgagacggtaacttcttggttaccaggtgaggtactacctaggattattatcggggatgaaatttactccatgaaaattctcataacttcaatagttgttttactggaactactaaaaaaatgcttagattttgttgatgaacatgaaaggatttaccagtgtatcatgctatctccagtatgcgaaacaatcccggaaaaatttttatctaaactaccgttaaattcatatgacagcgctaatttagataaagtgacaattggtcatcttcttacacagcagataaaaaactatattgtggtcaaaaatgacaataaaatagcaatggatttgtggctttcaatgaccggattactatacgatagcggaaagagagtttatgatttgacatcagaatctaacaaagtttggtttgatttaaataacctgtgctttatcaataatcaccccaagactcgcttaatgtccatcaaagtttggagaattattacctactgcatatgcacgaaaatatcacagaaaaatcaggaaggaaacaaaagtttactgtcacttttacgaaccccttttcaaatgacgcttccttatgtgaatgatccaagcgctagagaagggatcatctaccaccttttaggtgttgtttacactgcatttacaagtaataagaatttgtcaacagatatgtttgaactattttgggaccacctaataacaccgatttatgaagattatgttttcaaatatgattcgattcacttgcaaaatgtactcttcacagttttgcatttgttaattgggggaaagaatgcagatgttgcattggaaagaaaatataaaaagcatattcacccaatgagtgttatagcctcagaaggtgtaaagttaaaagacatttcaagcctgcccccgcagatcatcaagcgtgaatacgataaaatcatgaaagttgtgttccaggccgttgaagtagccatttctaacgttaatttggctcatgatctgatccttacatctttgaagcatcttccagaggatagaaaggaccaaactcatttagaatcctttagcagtcttatattaaaagtcacgcaaaataacaaagatacacccatttttcgtgacttttttggtgctgttacttcatcgtttgtttatacatttttggacctgttcttaagaaagaatgattcatcattagtaaatttcaatatccaaatttccaaagttggtatttcgcaaggaaacatgacccttgatcttttaaaagatgttatcaggaaagctcgaaacgaaacatctgaatttctgataatagaaaagtttctagaattggatgataagaaaacagaagtatatgcccaaaattgggttggatcaacgttattaccaccaaatatatctttcagagaatttcagagtttggcgaatattgtggacaaagttccgaatgaaaactccattgaaaacttcttggacctatgtttgaagctcagctttccagttaatttgtttacattacttcatgtgcctatgtggtcgaacaataattttatttatttcattcaaagctatgtttcaaaaaatgaaaacaaattaaacgtggatctgatcacgctgttaaaaacttctttaccagggaatcctgaactgttttccggtctgctcccatttttgaggcgtaataaatttatggatattttggagtactgtattcattccaatccaaatttattaaattccatccctgatctaaattcagatctcctaatgaagctgttaccacgtagcagagcttcatattttgcagcaaacataaaactattcaagtgctccgaacagcttacattagttcgttggctgttgaagggtcaacaacttgagcagctaaatcaaaatttttcagaaatcgagaacgttttacaaaatgcatctgatagcgagttagaaaaatcagaaataattagagaactccttcatctggcgatggcaaatcccattgaaccattattcagtggcctattgaatttttgcataaagaataatatggcggatcatttggatgaattttgcggaaatatgaccagcgaagttcttttcaaaataagtccagaactactattaaaattactgacgtataaggagaagcccagtgggaagttactggcagcagttattgaaaaaattgaaaatggagatgatgattatatattggagttgcttgaaaagattattatacaaaaagagatccaaattttggaaagattaaaggagccacttttagttttcttcttaaatccggttagctctaatatgcaaaaacacaaaaagagtacaaatatgctccgtgaattagtcttattatatctcactaaaccgctttctagaagtgccgccaaaaaatttttttccatgttaattagtatattaccgccaaaccctaactatcaaactattgatatggttaatctgttgattgacctcatcaaatcacataatcgtaagtttaaagataagagaacctataatgcaacattaaagacaataggaaagtggatacaggaatcgggcgtggttcatcaaggggattcaagtaaggaaattgaagctatacctgacactaagtcgatgtatattccatgcgaagggagtgaaaataaactttcaaacttacaaataaaagtggattctcaagatatccaggttccggctacgcagggaatgaaagaccctccctcctcatttcaaatatcttcccagattaatgcgaaagattcagattcaatatcgcttaaaaatactgcaataatgaattcttcacagcaagaatcacatgctaaccgaagcagatcaattgatgatgaaacactagaggaagtggataatgaaagcattagagaaatagatcagcagatgaagagtacgcagttagataaaaacatggccaatcatagcaatatttgttctactaaaagcgatgaggtggatgttactgagctgcatgaaagtattgatacacaatcctcggaagtgaacgcataccaaccaatagaagtccttactggcgaactgaaggcggtaacaaatagatctatcaaaacgaatcctgatcataacgttgttaacagtaataatcctctaaaacgaccttccaaggagacgcctacctctgaaaataaaagatcgaaaggtcatgaaacggtggtggacgttttagtttctgaggaacaagcggtgtcgcctagcagtgacgttatatgtactaacatcaagagtgtagccaacgaagaatcttcgttagctttaaggaatagcataaaagtggaaacaaactgcaatgaaaattccttgaatgtcactttagatcttgacgagcaaaccatagcaaaggaagatggaaaagggcaagttgaacatgttcaaagacaggagaaccaggaaagtatgaataaaatcaacagtaaaagttttacgcaagacaatattgcacattacaagagcgtgaagaaagctcgtcctaataatgaggatgaaaacaacaattgtgcttgtaatgttgaacaagcctctccagtaaggaacgaggtgccaggagacggcattcagaccccgagtgggactatacttctcaatagttcaaagcagacagaaaaatcaaaagttgatgacttgcgtagtgatgaagatgaacatggaacggttgcgcaagagaaacatcaaatgggtgcaataaacagcagaaacaaaaataatgacaggatggacagtacacccattcaaggcactgaagaagaatctagggaagttgttatgaccgaagaaggtatcaatgtacgcttagaagatagtggaacatgcgaacttaataaaaatttgaagggaccgcttaacggagataaggatgccaatattaatgacgattttgtacctgttgaagaaaatgtcagagatgagggctttttaaaatcaatggaacatgcggtatctaaagagacaggtctagaagaacaacccgaagtcgctgatatttcagtgttaccagaaattcgtatacccattttcaattctttgaaaatgcaagggtcaaagagccaaataaaagagaaattgaaaaagagattgcaaagggatgagttaatgccaccagattcacctcctcgaatgacagaaaatacaaatatcaacgcgcagaatggcttagacaccgtaccaaaaacaattggtggaaaagaaaaacaccatgaaattcaattaggccaagcccacacagaagcagatggcgaacctttgttggggggagatggtaacgaagatgctacatctagggaagccacaccttcattaaaagtgcactttttttcaaaaaagtcgagaaggttagtggccagattgagagggttcacaccgggcgacttgaacggaatatctgtggaagaaagaagaaacttgagaattgaattattagattttatgatgaggctcgaatattactcaaacagggataatgatatgaattga

SEQ ID NO: 75664 - DNA, 2424 bp, Saccharomyces pastorianus
atggttttggaagtgccctcaatcacacctggtgaactgcatgatcttatgcgactacatcaggatgcagaatggcctgaatgtaaaaaaatgttcccctgggctcatgatatttcctttggtcaaccacccgattttcctcattctcttgcaatagtcaaatcgcaatcagatgctaacaattctgcgcttttgcataattctctcgaagtgaatgatatcttccagtcctggaaagttcgcacttcctttcatagagagggcgatacctgtgaaactggaaatgattctaatggttttcaatatcctaataacacaaaggaacttttgaacttgctaaagtttcagatacgacaattggaattgcaagtggatgatgttgctttggaaaacgctgctacttattgtcacaatcatagcattttaccatttctgaaagtagatcctcgtggactatcattagaacttaaaaggtattctagaaacaaggttgggtctaataccacgctaaaacggagtgggcaggacgtctggggaaggagaggtctattccgaaggttcgacctgcaatgtgccaagatgatagaaatggttgataatatagtaatttattgttcgcagactggtggcagcactgatattcaaacagaatcagcgccagcgtgctcacacgagggaaattgccccaattgtacaacccttgcactacttttacagatctgtttaatgtttgttcaaaagggttatgtagggagtggaggatcgctttacaagacgaatctttttatttgtacttatcagaatttcaatacagatatacctcaaactttgattggtacacctttattagacaacgaatttttcaagaataatactcccttgaatttatgttcgtcacctagtgaaatagtgtgtttcaataacgttgataagaatatggttttgtgcgagaagttagagttgaataagctgacttcagctacacgattggaggaaacagggttgatttgcggtaacaccactgattggcataattatcaaataattaaaaaaaacaatatatctctgccccaccgtttcgaagagaatacaagcatagtaaatttaaagtctctaaattatgatacggacaatccgacaacctccatttctcaactgtataacataccgaatacaaaagaggtgtggaaattgatcataaaatgtacgtcaaactcgcaaatgccgtcgttaacgaaaatccgaacatatctagatcttttattagacgatgatgcgtcaaaatcacaagagcatttgcatttgactttccctgcctcaggtagtataggtttggggaacttaaacattcagtctgtggaaattcttttgaatgtttgttatttaatatttcaagtatcccaagttcaagaattattgacgttcatgtattgcgaagacggatatacagaaacgtcattattattaacagcttatattatattccactttaatattccgttacaagacgctcttttgaggatccatccaagaccatttttcctttttccatcagacttgcaaattttaggccatttacaacctgtcctgcgggagtttagtccgcagaatggaagtaatctaaaattatatgccaatgcattgaaatttagggataaaagctttcaattacacatttcttcagagctttttagtagcatattttttatgaagatacctcttgagtctaatttcgttaatttgaagggcccactgccatcccggattctacgtcacttgtatttgggatccctggatcatgcacaaaatcctgccttacttaagtctctaggaattacgcatatagtttctgtcggtgaagttgtttcatggacattgaataaggataaaattgctcatcctgtaaggccacatcgtgcaataactatgacgaataccaatgaagttgcaggtaatactacatgtaataaaagcagaaatagagctgacactgtggtcagcgataagcaagaaaatggcagcaacgtagtaataagtgaaaattctggatttcaaatttgccagatcgaaaatctagatgacaacggcaaagatccgcttttccaccaaataaacaaagttttggattttattagcaattccgaagcaacaggagggaaagttctggtgcattgtatggtcggagtctccagatctgcaacagtttgtatagctgaatgtatgagatatctccagtgtgacctggcaagtgcgtatttgtttgtgagggtacggaggcttaatgttatcattcaaccaaacttgttcttcgtatatgagctcttcaaatggtggaaaaagcattataatcgcgaaaaagacaaaactatggattggcacatcatctgtaggggtatcgctgaggttaatatgaagtacacatga

SEQ ID NO: 75665 - DNA, 402 bp, Saccharomyces pastorianus
atgtttagttctctcttcttgtcgagtgcgctattcttcttcagttgtttaatggcatcctctagaaacctgaaattatctcttttttcgacacattcttctatagaatttaggcttaatcgtaggcttgtctttcctttcgaattcagttgtgctaagaccagcgattcttcgacgagattctgtacaaataactcagcagcgaatgcggtcgctgatatagctacattagatgtaattacgtattcggggtcgcatttggcaatcttctttactttagatataggaaagacaggtgctttttctttaactaagttggacattttttttgcaacacggttgacccttgcttgtttttatctgttggggcaggcagttgttaaggccattaatttcgcgtaa

SEQ ID NO: 75666 - DNA, 606 bp, Saccharomyces pastorianus
atgtccaacttagttaaagaaaaagcacctgtctttcctatatctaaagtaaagaagattgccaaatgcgaccccgaatacgtaattacatctaatgtagctatatcagcgaccgcattcgctgctgagttatttgtacagaatctcgtcgaagaatcgctggtcttagcacaactgaattcgaaaggaaagacaagcctacgattaagcctaaattctatagaagaatgtgtcgaaaaaagagataatttcaggtttctagaggatgccattaaacaactgaagaagaatagcgcactcgacaagaagagagaactaaacatgcaaccgggtcggagcgatcaagaggttgttatagaagagcctgaattgcatgaggatgatggtgtagaggaagaagaagaagaagacgaggtatccgaagaagaagagcccgtacacaatgaagaacttcttgatgatagtaaagatcaacaaaatgataaatccacgcgcagtgtggcaagcttgctgtcgagattccagtataaatccgcactagacgtaggagaacactccgactcttctgatatcgaagttgaccatacgaaaagcaccgatccttag

SEQ ID NO: 75667 - DNA, 1338 bp, Saccharomyces pastorianus
atgtccaaaaaacaggaatatattgcaccaataaaataccaaaacagcttgcctgtgccacaattacctcctaaacttctggtttaccccgagtctccggagacgaatgcagactcctcccaactaatcaattcactatacatcaaaacaaacgtcactaatctaattcaacaggatgaagatttaggtatgccggttgatttgatgaaattcccaggcctattgaacaaattagattctaaactgctttacggctttgataatgtgaaattggacaaagatgatcgaattttactgagggaccctagaatagatagactgaccaagactgatatatcaaaggttaccttcttgagacgcaccgaatatgtctccaacacaattgcagcccatgataacacatcgttgaaaaggaaaaggcgcttggatgatggagattcggatgatgaaaaccttgatgttaatcatataattagtagggtcgaaggaacattcaataagacggacaaatggcaacatccggtgaagaagggtgtcaagatggttaaaaaatgggacctattgcccgacacagcttcaatggaccaggtgtattttatcctaaaattcatgggcagtgcatcattggatactaaagaaaaaaaatctttaaatacaggaattttcaggccagtggaactggaagaagacgaatggatttccatgtatgccacagatcataaggactctgccattctggaaaacgaattggaaaagggtatggatgaaatggatgatgactctcatgaaggtaaaatatacaagtttaaaaggataagagactacgacatgaaacaagtggctgaaaagccaatgacagagttagctatacgtttgaatgataaggacggcatagcttactacaaacccctacgttcaaagatcgaattaagacgtaggagagtaaacgacatcattaaacctttggtgaaggagcacgatatagaccaacttaatgttactttgagaaaccctagcactaaggaagctaacataagggacaagttaagaatgaagtttgaccccataaatttcgccactgtagatgaagaagacgatgaagacgaggagcaaccagaagacgttaagaaagaatcggaaggcgattcaaaaacagaaggttctgagcaagaaggagaaaatgagaaggatgaagaaatcaaacaggaaaaagagaatgaacaagatgaagaaaataaacaagatgaaaaccgtgcagctgatacgcccgaaacttcagatgctgttcatactgaacaaaaaccagaggaagaaaaggaaactttacaagaagaatag

SEQ ID NO: 75668 - DNA, 1929 bp, Saccharomyces pastorianus
atggaaaagcacatcatgagtgaagttgagagcagagaaaaggagcctgacgcaggattgtccccagatatcgttcaagctacgctaccatttttaagcagtgatgatattaagaacctctcgcagacaaataagtattataatacattactagattttgaccactctaaaattttgtggcatgaactatttcataaggcatttgggacattaaagacaaatgacgagcctttccagtgtcgaaattcggcggaatttaagacctgcacagagacgattttaagagaagcattccccaccttgtcatggcaggaattataccaattacgggcatatgatgcaaagttttatagttggggttatttaaagcatggaaggttgggctataccgcgagttccaataatgaacttgtcgccacttcactaaacgggccaagtccgcggttcaaatatggtgtcaatacccccactgaagttccttggtttaacagtaggacaacatctagaactagtaacttcactccttcagaggacccgttaagcgccatcaagaaggatggagacgaaatcatagctcaagtatctagtggtggtttttctttccaaatattgactgagtcaggtaacctttacagcagcggatccactttttctggagggttaaaaggaccaggtcccagtggttcacagcatgattataatcccttcagagaaatgattcacaatatggaaagatcgtatccgcggatcactagccgcagtaatgggagtactgtcaataccacgggtacattttctggaaggagaatgagcggtagccatccatctactgcttatgaaccaggaaatgcaactacagctcagcatattaccatagatagcggaggtgcgcctgcagcctctcccggagggagccatagtggtgtccctagaactacaatgccttcaatggggccgcatgagaatatttacagccagatagaaatgctggaacgaagtgctaacaaggctgtaccaggaaatagtcatatcaggagaatgttcgcaagaaattctttcccattatatagtggtagggatgaaaatttaggatcatttaatgatattcaatttgtcgcggtaagctctgggagaagtcatttcctagcaatggatacagataacaatatttattcttgggactcaacggaatctgaccaaggtgtcaaaattgagtttgctaacctacctagtcgtgctacgaatcctattttgaaaattgctagtggttggaatttcaattgttgctatatatataaggtcgggttggttgcatggaaagaaagagatgctattcaaaagggcgagagctttgcttttgcaaaatacgagattgtcccgaatacgaatgatgttaatggagactccaggattgtcgactttgcatgtttacaagataactgcgttttcttcattaataacaacggcgataaactatggaagtaccacaatggactgaaccagatagtagatttaaatattgtcggaaaactgtgcaaaattaacgcctgttttgcttcattagtcctcttcaccgatactcactgttatactttgaaagtaacaaatggagatgtcgataaagatagtttaacggagctagacatcaatgaaaatgttatctccgttgcaagtggtgactatcacacggtggcactaaccgaacgcggtcatttgtattcatggggtattgaaagtcaggattgtgggtgcttaggattgggcccttctgaaaaaatagttaacgagctacatattggcaattgggaagggcaaagaaacattagggtcgttaagcccacgaaaatagaactacctgaagattatatttgtgtcagtgtaactgctggtggctggcaaaccggtgcattaatcatcaagaagcattga

SEQ ID NO: 75669 - DNA, 2637 bp, Saccharomyces pastorianus
atgtacgatagcaggggtgtcgcattgcactctgaactaattcataggtggaatcacgctttttccatcttatccattgttgcatttccaaaaaaaagattgttgtttgctggtagccaagactccaagatattggtttttgatcttcccacatataatctaatacatacgattagactaggcgaatcacaagaggaaacgcataccagatcttcggttttgtgcttgacaggatcagaagatgaaaactttttattttcaggcggcgcagattctttggtgagaatttggtccgttggcgaaaagaccattagagatgactttctacctgttactgaaatagccactgtttactcagtgaccgatattggtgatattttctcattggcatatttggattcgttggaaactattgtctttggctgtcaaaatgcaagcttactatatgttgagaacttgattcagaagattgaaaaaaaatcctctgatggagtagaaaatatcaataaattaccgcatagaagatatgataagttctttgattcgttaggtccgactggatatagttcaaattcattatctcaaacttcattgacctctctacaagaaaactgtggcgctgccatcatagaggttccctccgaaaacattattaaatatgcacattatgggtttatttattctattaataaattgtgtcccaggtttaatcagttattggaaaaaagctcacgaacttctggtgcagagcacataatttcatccgctggtgatggaataagcaagctttgggagttctctaaagataaagggcaaaacactgttaaaatctccttgataaacgataaaatcgacaatgaagatagcgtcatatcccaaactattgagttcccatttttatattgcgggttgactgacgggattataaaaatctgggacttaaatactcagcaaataatctcaactctgaaaacaaagcatgaatcggacgtcatttcaatatcagtttatatggaccatgtatttgccattgatgaatcaggcatcacgcatttttaccagaaccaagttaaccattggaaccctcaacaaggaaaaatattaagctcagagattttcagtaaatcaaatgctggatctgttagtttattaacgggtggtagcgatgggtcattgactctctgggatataacctcattattatctgcggtgcctctgtcaagcaactcacccatcaatgcatcatctacattacaaaccaccaatttatgggccgcctatcaatctgcctctctaaataacgaggagatgttaaacacactgagagaacttatttctttccagacagtgtctcaaagcaaagacactactaatactttgtcattaaggcgttgtgcaatctacctgcaacaattattcttgaagtttggagctacaaactcccaattatttccattgcctgatggtggtaatcctgttgtattcgcatattttcaagggaatgggaaagtttcacaggtgaagggtgccaagaaaaagcgtattctatggtatgggcattatgacgttatatcgtctggaaatactttcaactggaataccgacccatttactttaacttgtgaaaacggatacttaaaaggtcgaggagtatcagataataaagggccattggtgagcgctattcatagtgtggcgtatttgtttcaacagggagaattggtgaacgatgtcgtatttttggtggaaggaagtgaagaaatcggatctgctagtttgaagcaagtttgtgaaaagtaccatgatattattggaaaagatattgactggattttattaagtaattctacttgggttgatcaagaacatccatgcttgaattatggattgagaggtgttattaatgcccaaataaaagtctggagcgataagcctgacggacattctggtcttaacggtggtgtttatgatgaacctatggttaatttagtgaaaatcgtgtccaaactacaaaacgaacaaaatgaaattatgattccaaatttttattcaccattgaaagatctgactgaagaagaatatcaaaggtttcagaaaattaccgagcttgcaaatatcgacgaaaatactactgttcaagatttaattaccaactggactaagccttccttgtctatgacaacagtcaagtttagcggtcctggtaacataacagttattccaaaaagtgtcaccatgggtatctccatcaggttagtacctgagcaaagtgtagaacaagtcaagagagatctcaaagcgtatttagaagaaagtttcaagcaattgaaatctcaaaatcatctagaaattaaagttttaaacgaagcagaaggttggttgggtgacccaacaaatcatgcataccaaatattaaaggacgaaattactactgcatgggacgtagaaccattgctagtaagagaaggaggttctatttcatgtttgagaatgttggaaagaatattcgacgcgccagctgttcaaataccatgtggccaatccactgacaatggccatttagccaacgaaaatctcagaatcaaaaattggtctaatttgactgagattttgtctaaagtattcaataggttataa

SEQ ID NO: 75670 - DNA, 441 bp, Saccharomyces pastorianus
atgaaaggctcacccatttcgcaatttagtaagacctctattaatgctcttaccaggccttggaagaaatacagagatggtgaattattttatgggttatcaaaagttgggaataaaagagtgccgttgaccacaaagcaaggtaacaagacgatgtacaaagggacaagagcttcagggattggtagacatacaaaattcggtggttatgtgataaactggaagaaagtcagaacctatgttaccccagatatggttaatttcgaattaaagccctacgttaacgcaaatgtaccacctctaaaacacgaatttaaaggatttagcggcggcccattagatcctcgtttacagttattaaagataaaagaatacatagtaaacgggagagtacaaagcgaaggggccaccgacacttcatgttataaggagcgtggataa

SEQ ID NO: 75671 - DNA, 1473 bp, Saccharomyces pastorianus
atgtctggttttcgtctaattgatatcgttaagcctatcctaccgattttaccggaagttgagttaccttttgaaaaattaccatttgatgacaagattgtctatactatttttgcagggttaatttacctttttgcacaattcccacttgttggtttgcccaaagctaccacacctaatgttaatgaccccatttattttctaagaggtgtatttgggtgtgaaccaagaaccttgctagaatttggcctttttcccaacatttctagtgggttaatcttacaattattagccggtttgaaagtaattaaagttaatttcaagatccaaagtgatagagaattatttcaaagcttaacaaaagtttttgccattgttcagtatgtgattttgaccaacattttcatatttgcaggttattttggtgatgatttatctgtggtacagatcgggttgatcaactttcaattggtcggtgctggcatattcaccactttgttagctgaagtcattgataaaggatttggattttcttctggagctatgataatcaacactgtggtaatcgccactaacttggtggctgatacttttggtgtttctcaaattaaagttggcgaggacgaccaaaccgaagcccaaggtgccctaatcaatttgattcaaggtttaagatctaagcacaagacatttattggcggcatcatctctgcattcaacagagactatctaccaaacttgacaactactattatagttttggcaattgccattattgtgtgctatttgcaaagtgtccgtgtagaattgccaatcagatcaacaagagcccgtggtacaaacaatgtttacccaattaagctactatacactggctgtttatctgttttgttttcttacaccatcttgttctacatccacatttttgctttcgttttaattcaattggttgccaagaatgaaccaactcacatcatctgcaaaataatgggccactatgagaatgctaataatcttttagcagtcccaaccttcccattatctcttttggctccaccaacatctttcttcaaaggtgtcactcaacaacctttaaccttcatcacctattcggcctttatattggttactggtatttggtttgctgataagtggcaagctatttcaggttcctctgctcgtgatgtagccttggaattcaaagaccaaggtatcactttgatgggacgcagagaacagaatgtcgctaaagaattgaacaaagttattccaatcgcagctgttacgggtgcatccgtcttaagtttgatcaccgttatcggtgaatctttgggtttgaaaggtaaagctgctggtatagttgttggcattgctggtgggttttctttgctagaagtcattaccattgaatatcaacaaagtggcggtcaaagtgctttgaatcaagtcttgggtgttccaggtgctatgtaa

SEQ ID NO: 75672 - DNA, 2394 bp, Saccharomyces pastorianus
atggtacagaacaatgaatcggtttttttcgttgaatgcgactcttataaggagagcccttccacttcaccaatacgcttggacgacctggatggaaatgacgctgtgtcggatcagggtttagctttcgacggggacgtaggaattacatcacaagctcgagtaagaaatcctcgagctcaaatcttcgaggatagtaatactgacgtagtattgcatttggatgatcttgatatggtcccactaaatacgaagttcgatatgcagatggagatgggttcacccatggcgatgccggcagaaacgccacctcctgtcgaacctttaaaaacaaaagatctagcatattcatccttggctcaccttcctagctatttctttgagcaaacacatttccgcatagaccgcaaatgcctgttggaaatgtctaagttaaggcgaaattatctaactataagtaaacaagatgctttgtcatgtccgcagcttcattcaagagtggctgggggttatcttaaacctgtaaaagaaaaattatttggaatacgtcactttcttgatctagaggaaagtaatactgtaaacctcctccaggatggaaattatatgacggaattgttcaacagtcagattaatatccccacttttaaagaatttagggaagattttgaatggtgcttgaaaattataagagatagaagcctatcaaggtttagcgaaaaaagattacaatatcttgtaaataagtttccagtttttcaacacctacattccaaggaagaaatgagacagagcaaaaaggtgccacacaaggatttttacaactgtagaaagattgatctgaatcttctgttaagcggctgtttctcacagtggcaattgactgagttcatttggaccaagttgagaaaagaaccggacagggttatccatcaagcttttaatggtagtcatataaccttgagccaattattcaaagtgaatttcgaggagaccggtcagttcttcaatgggttgaaaattattgacgattcatttttggagtggtataaagttatttatcccgcaaaatatcatttggttaacgatgaaatggaaatacacacaggctcacacggtaagcagcttcgatattatttgattgcgaaaacatttttggagtttgataactatattaatggtgaatacttagcggaactactgaaaacgtttttaataaaaccgcaagaggagtcgaaatatcagttatgtcaactctctgtggacttccaattttatctgcattacgataattctgatgtggacaattggtggatggtctttgccaattggctgaaccactataatatattttctaacaatattcgctggaatattcgcatttctagaatttatccagaactgtatcatactggcaaggtgaagaattttcaggagtatttaaatttaatcttcaaaccacttttcaatgccgaaaattatctacacaagtcattaggacctattcttttgaaatttctttctcaagtatcttcgattgatctatgtattcaagatacggacaactatatttggaaaaacttcacagcagttagttgcttgccaaaagattggacatctggcggtgataatccaaccatttcacaatatatgtattacgtctacgtcaacctaacaaaattgaaccatatccgccaagcccttcatcaaaataccttcactttgagaagttcatgttctcccacctcaatgaatcgaacttcacagtttagtaatacactgaacttcacagaacatacggaaactattttaaacaatttcttgctcgcctgtggagggtttctaaatgcagaaaatctctggaatgcaccaccatcactggtgtatcttttctatctaagtcaaattcccatggttgtggcgcctttgaattccatagtagattcaaaccctacaatgctacaagaacaagccccgacggggcttgtcctagagccctcaaagccttataagaagaaccctttcatgaagttttttgaaatggggttcaagatatcgctgagctcagaatctatcctctacaacaattcgtatacgaaagaacccattatagaagagtatagtgtagcggctagtatataccgtttacattcagcagatttatgcgaacttctaagaaacagtgtcataaccagtggattttcaagtaccctaaagaacaaatggctcggcgtttccttagccagccatgactacttcgtggaaaacactgggtttgtagacaagtggtatgattgtaaaccaaatacaagtttagagcataacgttccgatcatcagacgtcaatatcgcagtagcactctcgcaggggagtggcgactcataattgcgtga

SEQ ID NO: 75673 - DNA, 435 bp, Saccharomyces pastorianus
atgaccatattttctaggttctcatattttgatagtctattctcctttaaaaagcaagagccttcccccattgaaataatctattgcaatgaaaacaatggtttcataaacataaaatccttagaaagccccactgacgatagcatggaggcggacatttcagatagagaaatggctacaatcctgactagaaacagaaacaatttgggtaaggttgccattgataagaaaggcgttaataatcattgcatagatttgaatgagctgaaaaagggccttgtcgccaatgaacacaaattggataacgataactcaacacggcaccagaacacatattcaccagaggattccgtggaatttgataggttcgatgataaacaaagcagaatactaaagtgtagcactagaaggagctacttgagatacaagaaataa

SEQ ID NO: 75674 - DNA, 1284 bp, Saccharomyces pastorianus
atggttgaaacatttagttttgctcatttggcttatttggtctttgagtccgttttacaggtagtcattatcgcactcgctggtttttggagcgctagttctggtctgctgcccaaacaaagtcaaaaaatcatttctctgttgaacgtggacctttttacaccatgtcttatttttagtaagttggccaaatccctgtccatggccaaaatctttgaaatagccatcattcctattttttttggtttgactactggtatttcatttatttccggaaagataatgagccgtatcctagacttggataaagatgaaactaattttgtggtggcaaactctgtctttggtaacagtaactctctacctgtgtccttgacattatctttggcttacactctgcccaacttaacttgggaccaaattcctaatgataacagagataacgttgcatcaaggggtattttatacttgctgatctttcaacaaatcggacaaatgctgaggtggagctggggttacaataagctaatgaagtggtctggagagaacactcagcatatgccaccttctcaagtgcaatctttgttggaaaggacgcccaacattgataacgaggaacttgtcaatgaggaacaagaggaacaagaattgcttgaagaagaaaataacagaatgaactcatcttttttgagttcgagttccatcggtgataagatttggcaaaaatcatgcgctgtatttgagagaatcagagcgaaccttaatcctccgttatattccatgatttttgctgttgttgtggcagcaattggtccgttgcagagagagctatttatggaagatgggtttatcaataacacatttgccgaggctgttacgcagctgggttcagtttctatcccattgatcctggttgtcctcggttctaacttatatccttctgcggaagtcttccctaagacggttcaccatagcaagttattgatcggctccatcatcggaagaatgattttaccgtcttgcttccttttgcctattattgctattgctgttaagtacataaacgtgagtattttggacgatccaattttccttgttgtcggttttcttttgactgtttcccctcctgccattcaattaactcaaatcactcaactgaatgaatttttcgaggcagaaatggccgatattctattttgggggtacgctgtcttaagtttgcctgtaagtattattgttgtctcaggtgcaatttacgttttacagtgggctaacccaacttaa

SEQ ID NO: 75675 - DNA, 1452 bp, Saccharomyces pastorianus
atgtatttgtcattctatatcactgatacaaagaacaaacttattttccagtatcttttaggtgcaacagctccctccttcaagcacctgtggacccgcgttcagtccacatgtcctcaattgctcgaagatagcagtagtgatgattatttagaccattcaatggttggaagagatttagaggtctataagtatttctcagttataaataagctcaattattggtgcttagcctccacttcgaagtcaaaaggcccgcttgattgttttacctttttagagactatagatcgtatcctgttagaatattttgacaaggataaattaagtatcaagaaaattgttaataattatgatagaatcagtttgatttttaactgttgcgtcgaagcgggtgaaccaaatgtgagtgatatgctctatgttaataaaattaaagaagctgttcctgaaagatcggatttatcgaagttcataagttctacagcccataatttacagcaggctgtgcaactcccacaacaaaggcaacagcagctacaacaaaatcagatttctcgtggtagtaattcactaatcgaaaatgaagagattgttccctggagaacttcaagggctagcaaacatgagaataatgagctttatgtggatttgttagaaacattccatgttgtatttgaaaagaaaaaatcacatctaaggttgctcactggaagtattcatggaatagtggacgtgagatcttatttgaatgataatcctctagttgcagtaaaattaaacactatgggaaatgatataggtatacccagtttgcatgactgtgttgaaatcaatgatggtgtgttttctccctctaatataacgtttataccaccagatgggaagttcagattgctggagtattccgtcgatttaagttctcaagtaaagcaatccggagtaaggatgaattctattggcttgatgtctttacacttccaaaatggattgggtaaagattctgatgaatttgagttatccttaaatattgaaaatttcaaaaaagtttcacaagttgatgacctaaaaatagatttacagttcaatgttgagaatgctgatccaaatgaaatagcatataagataaaaatattgcgcaatactcatggccgttttgaaaatagcattatcatgggtcaaggacaatggatttttgataaatcaactgccactggaacggtacctgtactacgtggctgtattgagtatgaaaatactgggccaaattttacaaaaaaagttgatttacaaacagtctccttagaatattcttacataggacaatcagccagtgaaatctatgtagaagccatcgatattgtatctggattaacaattggcaaaaatacaaagctgtacaagggtgcaaagtataagacccagacaggcaattttcaagtaaggctgtag

SEQ ID NO: 75676 - DNA, 2742 bp, Saccharomyces pastorianus
atgaataatcagccgcagggtaccaacagcgttccaaatagtattggaaatatatttagcaacattggaactccatcttttaacatggcgcaaattccgcaacagctgtatcagagcctcacaccacaacaattgcagatgattcagcaacgacaccaacagttactgatgagtcgtctacaacaacaacaacaacaaacttcaccgtcaccgcaaacgcatcaatctccaccccctcctccgcaacaatctcaacccattgctaatcaatcagcgacttctacccctcctcctcctccagcaccacacaacttacatccccaaattggtcaagtgcccttagctccagcgcctattaatttgcctccacaaattgctcagttacctttggctacacagcaacaagttttgaacaagttgaggcagcaggccatagcaaaaaataatccacaggttgtgaatgcaattactgttgcacaacaacaagtgcaacgccaaattgagcagcaaacgggacagcaaacggcacaaactcagctagaacagcagaggcaattgctggttcagcagcaacagcagcagcaacttagaaaccaaatacagcgacaacagcaacaacagtttaggcatcatgtgcaaatacaacagcagcaacaaaagcaacaacaacagcagcagcagcatcagcaacaacaacaacaacaacaacaacaacaacaacaacaacaacagcaacagcagcaacagcagcaacagcaacagcagcagcaacaacaacagcaacaacaacaacagcagcagcagcagcagcagcagcagcagcagcaaggacaaataccgcaatctcagcaagttcctcaagttagatccatgagtggacaacctcccaccaatgttcagccaactattggccaacttcctcaacttccaaaattaaacttacccaagtaccaaactattcaatacgatccaccagaaaccaagctaccatatccaacctattggtcagacaaaaaagcagatacggatactttgttgtacgaacaaattatccagcgtgataaaattaacaaatattcgctaataagagaaaccaatggttacgatccgtttagcatttatggatttagtaataaagagtatattagtagactgtggcatacactgaagtattatcaagatttgaagaacactagaatgaaatctatcacaagcacttctcagaagattccttcggcaagtatttggggaaatggttactcagggtatggtaatgggattacgaatacaactaccagagttattccacaagtagaagttggaaataggaagcattacctagaggataaactaaaagtctataaacaggccatgaatgagacatcggaacagttagttcccataagattggagttcgatcaagatcgtgacagattcttcctcagggacactttgttatggaacaaaaatgacaggcttattaaaattgaagactttgtggacgacatgttgcgagattaccgatttgaggacgctacgagagagcaacacattgatactatttgtcaatctatacaagagcagattcaagagtttcaaggaaatccatatatagagttgaatcaggaccgtctaggcggtgatgacttgagaattagaatcaagctggatattgtcgtgggacaaaaccagttaatcgatcaatttgagtgggacatctctaatagtgataactgtccagaagagtttgcagagtccatgtgtcaagaattagaactaccaggtgagtttgtgactgccattgctcactccataagagagcaagttcatatgtatcataaatcactggcactgttaggttacaattttgatggatcagcgatagaagatgatgacattagaagcagaatgctcccaacgattactcttgatgatatttataggcctgcagcggaaagcaaaatttttactccaaacctattacagatttcagctgcagagttagagagattggataaagataaggacagagacacaagaaggaaaagaagacaaggtagatctaacagacgtggtatgctcgcattatccggcacatctgcaagtaatacatctatgaacggcgttcacaacacagtagcagcaggaaatgcttcatcgttgccaccaggtgagattttactgccagatattgcagatattccaagaactttcaggactccagtaccaagcactttaatgcctggtggtgttgacgtaggcccttctgtggaatcgtacgaattgagaaacacaaccacttataaaagcaggccagataggcccaagccagtttcacctccttgttatattattgaccatattccgggacattcgctactactttctattaaactgcctgggaaagttgatacaaaagaagagctcgcagcagcgcctaatgacacaagtagtggcaccaatgcaatgcttccgagtccagaatcgctgaaaactaagctgaatagtaacattcgcgctggtgtgacgatatcttcaatcccaaacccgattgccaatcacactgttactaattcacccaatcccacactgcagccagtgatcccaggtggggcagctagtaaatcggtacctacacctagtcttcctatagcacctccagtagcaccacatgatagcgaagcgacattattgactaatagcaataatggtagcagtaacaataatactcagaatacatag

SEQ ID NO: 75677 - DNA, 900 bp, Saccharomyces pastorianus
atgtccagtaaagctaccaaaagtgacgtagatccattgcactcgtttctggcagggtccctagccggtgctgctgaagcatgtataacatatccttttgagtttgccaaaacaaggctgcagctgattgataaggcctccaaggcatcaagaaatcctctggtattgatatataaaactgcaaaaactcagggcattggttccatttatgtcggatgtcccgcatttattattggaaacaccgctaaggcgggtattagatttcttggctttgataccattaaagacttgctaagagatagtgaaactggagaactaagtggtacaagaggggtgatagctgggttaggtgcgggactattagaaagtgttgccgcagtgactccttttgaagcaatcaaaactgctttgatcgatgataaacaatctgctacaccaaaataccataataatgggcgcggtgtagtacgaaactattcatcattagtccgtgataaaggattttctggtctttatcgtggtgttttgccagtttccatgagacaggccgcaaaccaagccgttagattgggttgttacaataagattaagaccttgatccaagattatacggattcgccaaaagacaaacctttatcatccgggttaaccttcttagtgggtgcatttagtggtattgtgacggtctattccaccatgccccttgatactgtgaaaacaagaatgcaaagtttggattccaccaaatactcctctacaatgaattgttttgcaaccattttcaaagaagaagggttaaagacgttttggaaaggtgctacgcctagacttgggagattggtcttgagtggtggtattgttttcactatctatgaaaaggtcttagttatgctagcctga

SEQ ID NO: 75678 - DNA, 1425 bp, Saccharomyces pastorianus
atgagtatttcaaattggatcaccactgcgtatttaattacatcaacatcttttcaacctctttatgggtcattttctgatgcacttggtcgaagaaactgccttttctttgctaatggggcttttaccattggatgtctagcctgtggtttctcgaaaaacatctacatgcttagttttatgagagcattgacaggcataggaggtggtggcttgatcacactttctacaatcgtaaattcagacgttattccaagttcgaaaagaggaatttttcaagcgtttcagaatttacttttgggatttggtgccatatgtggagcgtctttcggtggcacaatagcgtcgagcattggttggaggtggtgttttctcatccaagtacccatatctgtgattagttccatattaatgaattattatgtacctaatcagaaagaatataatcgtcaaaattctagcatattccaaaatcccggaaaaatactcagggacatagatgttatgggctcaattcttattataactggtctcacactacagcttctttacctgagcctggggtgttctacttctaaattatcatggaccagcccttctgtgctactgctattagttgggagtgtaataatcctcttactgttcatattgcacgaaaggaaaacaagtgctagagcgattattcctatggagctggtcaattcctcctacggtgtcgttgtactttcgataagtatacttgttggttttgccagctacgcgtatctttttactttaccattattctttcagattgtacttggagattccactgcaaaagcaggattacgtcttacgattccttccttatttactccggtaggcagtctcataacaggattttccatgagcaagtacaactgtctaagattattactctacattggtatttctttgatgtttttgggtaactttttattcctgttcattgaaaaaacttctccgaactggttgattggtctatttttgatacctgcaaatctaggacaaggtatcacttttcctacgaccttgtttactttcatatttatgttctctaagagtgaccaagctactgcgacatcaactttatatttattccgtagtattggatctgtatggggtgttgcaatttcagctggcgtcattcaattatctttcgcaggtttattgcgtagtaatttgaaaggtctactggatgaaaacaagataaagaaacttattgttcagcttagtgcaaactcctcatatattggatctttacatggcgaagttaaaaacacagtcataaagagttttgatgaggcaacaaagagggctcatctaatgtctacattactctctttattggccctgatactctgcatccttaaagacaatctggcgaaacctaaaacaagaagataa

SEQ ID NO: 75679 - DNA, 3651 bp, Saccharomyces pastorianus
atgaagccggaaaaactcttctccggtttaggtaccagcgatggcgagtatggagtggtaaatagcgagaacatatcaatagatgctatgcaagataatagaggcgagtgtcatcgtagatccatagaaatgcatgctaatgacaatctgggattggtctcccagcgagactgtaccaatcggcccaaaattactcctcaggaatgtttgagtgagactgagcagatatgccatcatggcgagaataggactaaggctgggttagatgtagacgatgctgaaaccggtggtgatcacaccaatgaatccggtgtagatgaatgttgtgctgagaaagtgaacgacactgagactggcttggatgtggacagctgttgcggcgatgctcaaacaggtggtgaccacaccaatgaatcctgtgttgatggatgctgcgttagagattcttcagtgatggtcgaggaagttacaggcagctgcgaagctgtatcttctaaagaacaattgctgaccagctttgaagttgttccaagcaaatctgaaggtctgcaatctattcatgatattagagagacaactcgctgcaataccaattccaaccaacacacagggaagggtaggctctgcatcgaatcaagtgactctacacccaagaaaagaagttgtaaagttagcagacagaaaattgaggtttccagtaagcctgagtgctgcaacatttcatgtgttgagcggattgcatctcgtagctgtgaaaagaggacttttaaaggtagcaccaatgttggaatttctgggagtagctctaccgacagtttaagcgagaagttcttcagcgaacagtactctagaatgtacaatcgttactcctcaattttgaaaaatttaagttgtatctgtaactatttgcgtactttgggaaaagaatcttgttgtctcccaaaggtgcgtttttgtagcggggagggtgcttctaaaaagacaaaatactcctaccgcaacagttctggatgtttaacaaagaaaaagacccatggagacaaagaaaggttgagcaatgacaatggccatgctgattttgtttgttctaaaagttgttgcactaaaatgaaggattgtgctgttacctcaactatttctggacactcttcgagtgaaatttcaagaatcgtatcaatggaaccaattgaaaatcatcttaatcttgaggcaggatctaccggtaccgagcacattgttcttagtgtttcaggaatgacctgtactggttgtgaatcaaaacttaagaaatcatttggcgcgctcaaatgtgttcacggtttgaagaccagtttaatattatcgcaagctgaatttaatctggatcttgctcagggatctgtcaaggacgttatcaagcacttgagcaaaactactgaattcaagtacgaacagatttcaaatcatggttcaactatagatgttgttgttccttatgcagcaaaagattttattaatgaggaatggccacaaggtgtcacagagctgaaaattgttgagagaaatatcgttcgtatttactttgacccaaaggttacaggtgccagagatcttgtcaatgaaggatggagcgtgcctgttagtattgctccattcagttgtcatccaaccattgaagtgggaaggaagcatttagttcgtgtaggctgcacgaccgctttatccataatattgacgatcccgattctcgtgatggcttgggctccacagcttcgtgaaaaaatttccactatctccgcgtcaatggtgctagcaactattattcaatttgttattgcaggaccgttttacttaaatgccttgaagagtttgatattttccaggctcattgaaatggatctactaatagttttaagcactagcgctgcctacatattttcgattgtatcatttggatatttcgttgttggacgcccgttatctacggagcagttttttgaaaccagctctttgcttgtaactctcatcatggttggtcgctttgtgagtgaactagctagacatagggctgtaaagtcaatatcagtacgttccttacaggcctcttctgctattctggtggataaaactggtaaagagacggaaattaatattagacttctccaatatggcgatatttttaaggttttacctgattcaagaatcccaactgatggaacagtcatttctgggtcttctgaagtcgacgaagcgttaatcacaggtgaatctatgccagtcccgaaaaagtgtcaatcaattgttgttgcaggatcggtgaatggcactggtactttgtttgtgaagctgagcaagcttccagggaacaatactattagtaccatagccacgatggttgatgaagcaaaattaactaagccaaagatccaaaatatcgctgataaaattgcaagttatttcgtgccaactatcattggaatcactgtcgtcaccttttgcgtttggatagcggttggaatccgtgtggaaaagcaatcccgctccgatgccgtaattcaggccattatatatgccattacggtacttatcgtttcgtgtccctgcgtgattggacttgccgttcctatcgtatttgttattgcaagtggcgtcgctgcgaaaagaggggtaatcttcaaatcagcagagagtatagaagttgctcacaacacttcgcatgttgtcttcgataaaacgggtaccctaactgaaggaaaacttactgtagtacatgaaactgttaggggtgatcgtcataattctcaatctttgttgcttggattaactgaaggaataaaacacccagtttccatggcaatagcatcctatctcaaagaaaaaggtgtttctgctcaaaatgtttctaatacaaaagctgtgactggtaagggggtagaaggaacatcatactctggtttgaagttacaaggagggaactgtcgttggcttggtcataacaatgatcctgacgttcgaaaagcccttgaacaaggatattctgtattctgttttagtgttaatggttcagtcactgcagtttatgcattagaggactctttacgggcagatgctgtctccactattaacttgttacgccaaagagggatttcactacacattttatcaggggatgacgatggagccgttcgttctatggcagcccgtcttggaattgaaagctccaatattcgttctcacgcaacgcctgcagaaaagagtgaatatattaaggatattgtcgaaggaagaaattgcgatagttcttcgcagtcaaaaagaccggttgttgttttttgcggtgacggaacaaacgacgcaattggtttgactcaagcaacgattggagttcatatcaatgagggaagtgaggttgccaagctagctgctgatgtagttatgttaaagccaaagctcaacaatattttgactatgataactgtaagtcaaaaggccatgtttagagtcaaattgaatttcttatggagttttacttacaacttatttgctatccttttggcggctggtgcctttgttgactttcatattccaccagagtatgcgggtttaggggaactagttagtatcctccctgtaatttttgtagctatacttctgcgttatgcaaagatttag

SEQ ID NO: 75680 - DNA, 1725 bp, Saccharomyces pastorianus
atggctttacatcaatttgactatatttttgccattgccatgttatttgcatttttggatgcctttaacatcggggcaaacgacgtggcgaactcattcgcgtcgtcgatctcttctagatctctaaaatactggcaagccatggttttggcgggtctctgtgagttcttgggtgctgtcttggcaggcgcaagagtttctggtactatcaagaacaacattatagattcctccatttttaccaacgaccccgctgttttaatgcttactatgaccagtgctttgattggctcgtcttgttggttaacatttgctactgcaatcggaatgccagtttctactacacattccattgttggtggtacaattggcgctgggattgcagccggtggagctaacggtgtcgtttggggttggagtggtgtttctcaaattattgcgtcatggttcattgctccgattttggcaggcgcgatcgcagctatagttttttcaatttctaggttttctgtccttgaagttaagtctttggaaagatcgattaagaatgctttactgctggttggtgttttagtattcgccactttctctatcttaacaatgttgattgtctggaagggttctccaaacctacacttggacgatttatctgaaactgaaactgccgtatctattgttctcacaggtgcaattgcttcgatcgtttacttcatctttttctacccattctacagaagaaaagttttggaccaagattggacactaaagttgattgatattttcagaggtccatctttttactttaagtccactgatgatatcccaccaatgccagaaggccatcaattaacaatcgattattacgagggcagaagaaatcttggaacaactgtttctgttgaagacgaagaaaataaggcagccagtaattctaatgattccgtcaaaaacaaagaagacatccaggaagtggacctggttagaactgaaactgaaccagaaacaaagttgtcaacgaaacaatattggtggtcattattaaagcaaggacctaaaaaatggcccttattgttctggttagtaatctctcatggttggactcaagacgtcattcatgctcaagttaatgatagagatatgttatctggtgacctgaaaggaatgtacgaaagatctaaattttacgacaatagagtagaatatatctattcggttctccaagccattactgcagccactatgtcttttgctcatggagctaatgacgttgccaacgctactggtcctttgtctgctgtgtatgtgatctggaaaactaacactattgggtcaaagtccgaagttcccgtgtgggttctggcttatggtggtgttgccttagttattggttgctggacttatggttacaatattatcaaaaatctaggtaataagatgattttgcagtcgccatcaagaggcttttcaattgaactagctgttgctattactactgtcatggctacccaattaggtattcctacctcaacaacccagatcgccgttggtggtattgtcgctgttggtttatgtaacaaggatctcaaatcagttaattggagaatggtagcctggtgttattctggttggtttttaactttaccaattgctggtttgattgccggtatcataaatggtatcattttgaatgctcctcgctttggtgtggaataccaaatgacataa

SEQ ID NO: 75681 - DNA, 120 bp, Saccharomyces pastorianus
atgaaagtgctagatgattggttttcaaggaagttctcaaaagctgtacacggaaacaatcacggcaccatttccttgtcaactctgtcttatatcagagtccataaactagtaaaatga

SEQ ID NO: 75682 - DNA, 1848 bp, Saccharomyces pastorianus
atgaagggattatcctcattaataaacagaaaaaaagacaggaacgactcacacttagatgagatcgagaatggcgtgaacgctaccgaattcaactcgatagagatggaggagcaaggtaagaaaagtgattttgatctttcccatcatgagtacggtccaggttcactaacaccaaacgataataatgaagaagtccccgaccttctcgatgaagctatgcaggacgccaaagaggcagatgaaagtgagaggggaatgccactcatgacagctttgaagacatatccaaaagctgctgcttggtcactattagtttccacaacattgattcaagagggttatgacacagccattctaggatctttctatgccctgcctgtttttcaaaaaaaatatggttctttgaatagcaatacaggagattatgaaatttcagcttcctggcaaattggcttgtccttatgcgttacggctggtgaaattgtaggtttgcaaatgactgggccttttgtagattatatgggtaatcgctatacattgattttggcattgattcttcttgctgcattcacctttattctgtatttttgcaagggtttgggtatgattgctgtgggacaagtattgtgtggtatgccatggggttgtttccaatgtttgaccgtttcttatgcttctgaaatttgtcctatggccctaagatactatttgacgacttattctaatttatgttggacgttcggtcaacttttcgctgctggtattatgaaaaactcccaaaataagtaccctaactcagaactaggatataagctaccttttgctttgcagtggatctggcctgctcctcttgcaataggtattttttttgcaccagagtctccatggtggctggttaaaaaaggaaggattgatcaagcaaggagatcacttgaaagaacattgagtggtaaaggacccgagaaggaattactggtaagtatggagctagataatatcaaagtaaccattgaaaaggaaaaaaagctgtcagactcagaaggttcctattgggattgtctgaaggacagtgttaataggagaagaacgagaatagcttgtttatgttgggtcggtcaaaccacctgtggtacatcattaattggtaattcaacttacttttatgaaaaagctggagttggtactgatacggctttcactttcagtattatccaatattgtcttggtattgccgcaacatttctttcttggtgggcttcaaaatattttggtaggtttgacctttacgcatttggattggctatacaaacagtttcattgtttatcataggaggtttgggatgctccgactcgcatggcgctgaaatgggaagtggttctcttttaatggttctttccttcttctacaatttgggtattgctcccgttgtgttttgcttagtgtccgaaataccatcctcaaggctaagaactaaatcgattattctggctcgtaacgcatataatatggcatctattgtaactactgttttgatcatgtaccaattgaactcagaaaaatggaactggggtgccaagtcgggctttttctggggagggttatgttttgccactctagtttgggccgtaattgacctaccagaaactgctggcaggacttttattgagataaatgaattgtttagacttggtgttccagcaagaaagttcaagtcgactaaagtcgacccttttgcagctgccaaagcagcagctgcagaaattaatgttaaagatccgaaggaagatttggaaacttctgtggtagatgaagggcgaagcaccccatctgttgtgaacaaatga

SEQ ID NO: 75683 - DNA, 1845 bp, Saccharomyces pastorianus
atgaagggattatcctcattaataaacagaaaaaaagacaggaacgactcacacttagatgagatcgagaatggcgtgaacgctaccgaattcaactcgatagagatggaggagcaaggtaagaaaagtgattttgatctttcccatcatgagtacggtccaggttcactaacaccaaacgataataatgaagaagtccccgaccttctcgatgaagctatgcaggacgccaaagaggcagatgaaagtgagaggggaatgccactcatgacagctttgaagacatatccaaaagctgctgcttggtcactattagtttccacaacattgattcaagagggttatgacacagccattctaggatctttctatgccctgcctgtttttcaaaaaaaatatggttctttgaatagcaatacaggagattatgaaatttcagcttcctggcaaatcggtctatgtctatgctacatggcaggtgagattgtcggtttgcaaatgactgggccttctgtagattacatgggcaaccgttacactctgatcatggcgttgttctttttagcggctttcattttcattctgtatttttgcaagagtttgggtatgattgccgtgggacaggcattgtgtggtatgccatggggttgtttccaatgtttggccgtttcttatgcttctgaaatttgtcctatggccctaagatactatttgacgacttattctaatttatgttgggcgttcggtcaacttttcgctgctggtattatgaaaaattcccagaacaaatatgccaactcagaactaggatataagctaccttttgctttgcagtggatctggccccttcctttggcggtaggtattttttttgcaccagagtctccatggtggctggttaaaaaaggaaggattgatcaagcgaggagatcacttgaaagaacattaagtggtaaaggacccgagaaagaattactagtgactatggaactcgataaaatcaaaactactatagaaaaggagcagaaaatgtctgatgaaggaacttactgggattgtgtgaaagatggtattaacaggagaagaacgagaatagcttgtttatgttggatcggtcaatgctcctgtggtgcatcattaattggttattcaacttacttttatgaaaaagctggtgttagcactgatacggcttttactttcagtattatccaatattgtcttggtattgctgcaacgtttatatcctggtgggcttcaaaatattgtggcagatttgacctttatgcttttgggctggcttttcaggctattatgttcttcattatcggtggtttaggatgttcagacactcatggcgctaaaatgggtagtggtgctcttctaatggttgtcgcgttcttttacaacctcggtattgcacctgttgttttttgcttagtgtctgaaatgccgtcttcaaggctaagaaccaaaacaattattttggctcgtaatgcttacaatgtgatccaagttgtagttacagttttgatcatgtaccaattgaactcagagaaatggaattggggtgctaaatcaggctttttctggggaggattttgtctggccactttagcttgggctgttgtcgatttaccagaaaccgctggcaggacttttattgagataaatgaattgtttagacttggtgttccagcaagaaagttcaagtcgactaaagtcgacccttttgcagctgccaaagcagtagctgtagaaattaatgttaaagatccgaaggaagatttggaaacttctgtggtagatgaagggcgaagcaccccatctgttgtgaacaaatga

SEQ ID NO: 75684 - DNA, 1755 bp, Saccharomyces pastorianus
atgactatttctgatcatccagaaacagaaccaaagtggtggaaagaggccacaatctatcaaatttacccagcaagttttaaagactccaataacgatggctggggtgatttaaaaggtatcacttccaagttgcagtatattaaagatcttggcgttgatgctatttgggtttgtccgttttatgactctcctcaacaagatatggggtatgatatatctaactacgaaaaggtctggcccacatacggtaccaacgaggactgttttgagctaattgacaagactcataagctgggtatgaaattcatcaccgatttggttatcaaccactgttctacagaacacgaatggttcaaagagagcagatcctcgaagaccaatccgaagcgtgactggttcttctggagacctcctaagggttatgacgccgaaggcaagccaattcctccaaacaattggaaatctttctttggtggttcagcttggacttttgatgaaactacaaatgaattttacctccgtttgtttgcgagtcgtcaagttgacttgaattgggagaatgaagactgcagaagggcaatctttgaaagtgctgttggattttggctggaccatggtgtagatggttttagaatcgataccgctggtttgtattcgaaacgtcctggtttaccagattccccaatttttgacaaaacctcgaaattacaacatccaaattgggggtctcacaatggtcctaggattcatgaatatcatcaagaactacacagatttatgaaaaacagggtgaaagatggtagagaaataatgacagtcggtgaagttgcccatggaagtgataatgctttatacaccagtgcagctagatacgaagtcagcgaagttttctccttcacgcacgttgaagttggtacctcgccatttttccgttataacatagtgcccttcaccttgaaacaatggaaagaagccattgcatcgaactttttgttcattaacggtactgatagttgggctaccacctacatcgagaatcacgatcaagcccggtcaattacgagatttgctgacgattcgccaaagtaccgtaaaatatctggtaagctgttaacattgctagaatgttcattgacaggtacgttgtatgtctatcaaggtcaggagataggccagatcaatttcaaggaatggcctattgaaaagtatgaggacgttgatgtgaaaaacaactacgagattatcaaaaaaagttttggtaaaaactcgaaggaaatgaaggatttttttaaaggaatcgccctactttctagagatcattcgagaactcccatgccatggacgaaagataagcccaatgctggatttactggcccagatgttaaaccttggtttttcttgaatgaatcttttgagcaaggaatcaatgttgagcaggaatccagagatgatgactcagttctcaatttttggaaaagggccttgcaagccagaaagaaatataaggaacttatgatttatggttacgatttccaattcattgatttagacagtgaccagatctttagcttcactaaagagtacggagacaagacgctgtttgctgctttgaatttcagtggcgaagaaattgaattcagcctcccaagagaaggtgcttctttatcttttattcttggaaattatgatgatactgacgtttcctccagagttttgaaaccatgggaaggtagaatctacctcgtcaaataa

SEQ ID NO: 75685 - DNA, 498 bp, Saccharomyces pastorianus
atggcggcaacaccagcagcgattgaagttagtttgaccattgtatttgttttgttttttagtgctgatgtaagcttaacaagaaatagtgaaatgaaagcgcatacctcaaagatggatagctacagcagctctatttatatgaatgtcttgccaacttccctggcacaaacgagttatcatctggcacccatctctcacctaaaatgtctcagtgtacaattttcatcccacattcattattcatattattacggtgcttctgtacttgaacgatgcgtctttcataggtcccgtatacgaggcgcacgcttcatagtgcctataccttttattgcatttccaaggcacaagaatgttttctcacagtgtacatacttccgaagaatccctttagggtgccttcagagatgcagctgcagcttttggccaagaaaaagccaaaaccaaatttgctttgaaccctcgttaagaggccacctaatctttgtgctctaa

SEQ ID NO: 75686 - DNA, 363 bp, Saccharomyces pastorianus
atggtcaaactaacttcaatcgctgctggtgttgccgccatcgctgctactgcttccgcaaccaccactctagctcaatctgacgaaagagtcaacttggttgaattgggtgtctacgtctctgatatcagagctcacttggcccaatactacatgttccaagccgctcatccaactgaaacctacccagtcgaagttgctgaagccgttttcaactacggtgacttcaccaccatgttgaccggtattgccccagaccaagtgaccagaatgatcaccggtgtcccatggtactccagcagattaaagccagccatctctagtgctctatccaaggacggtatctacactatcgcaaactag

SEQ ID NO: 75687 - DNA, 1083 bp, Saccharomyces pastorianus
atgtcgatagtctacaataaaacaccattattacgtcaattcttccccggaaaggcttctgcacaatttttcttgaaatatgaatgccttcaaccaagtggctccttcaaaagtagaggaatcggtaatctcatcatgaaaagtgccattcgaattcaaaaggacggtaaaagatctcctcaggttttcgctagttctggcggtaatgccggttttgctgctgcaacagcatgtcaaagactgtctctaccatgtacagtcgtggttcctacagcgacaaagaagagaatggtagataaaatcaggaacaccggtgcccaggttatcgtgagtggtgcctactggaaagaagcagatacttttttaaaaacaaatgtcatgaataaaatagactctcaggtcattgagcccatttatgttcatcccttcgataatccggatatttgggaaggacattcatctatgatagatgaaatagtacaagatttgaaatcgcaacatatttccgtgaataaggttaaaggcatagtatgcagcgttggtggaggtggtttatacaatggtattattcaaggtttggaaaggtatggtttagctgataggatccctattgtgggggtggaaacgaatggatgtcatgttttcaatacttctttgaaaataggccaaccagttcaattcaagaagataacaagtattgctacttctctaggaacggccgtgatctctaatcaaactttcgaatacgctcgcaaatacaacaccagatccgttgtaatagaggacaaagatgttattgaaacctgtcttaaatatacacatcaattcaatatggtgattgaaccggcatgtggcgccgcattgcatttgggttacaacactaagatcctagaaaatgcactgggctcaaaattagctgcggatgacattgtgataattattgcttgtggcggctcctctaatactataaaggacttggaagaagcgttggatagcatgagaaaaaaagacactcctgtaatagaagtcgctgacaatttcatatttccagaaaaaaatattgtgaatttaaaaagtgcttga

SEQ ID NO: 75688 - DNA, 1272 bp, Saccharomyces pastorianus
atggcaacccaagccctagaggatatcacggagaggcttttaataaggtcgcaagaggctatcttgcaattagatctgtggatacaacgtcagcagagatcatcaatatgccagacaacagatcaagagtcattggataagttatcccaacagtacaaccagtatatgtctcaactgaactctttatatgttagatcggaatctgttcgagacaagttgagcaaggaacaacaacgcagattgatcacagaggataatgagcatcaacgcatagaagacttggttcgtgaattccaggatatcactttgaggttgaacgagctggccaccgtcccaaatgaagcgtctaatgattctccacaatcgcaatccaccagaagtagtttagggtcatttcaacctcgaccattgaaaataattgagaggcaacgtctctgtatggtaactccatcgaaaccaccaaaaaaatcggtaggctttaaccccatcaatgaagtcgattgtccttcgaaaactaactctttaccgtgctcacctaaaaaacaacctgcaagaaatcgcactttacgtgcagccaaatcacatgatactggcttgaacaaaagtaagaaaccgtcttcctcggatacgtatgagtctttcttcaaaaatagacaaagactttcgttgaccttctttgatgaaatggatgatgaagattttgattctgatcaagatactatcattctaccaaacataagtacccctccacatgttggtgtgaccgcaaagggtgctgaattcgaacctttaaggagatataactctcacgaaagtatactatctaacaaaccagcaccttctaagtcgctcaatctgggaagtttctccgcctcattcttcaagccatctaatccgacgtttggaacttcgatatcaaatgtccaagtgaactgtcatccaactgttgcagcgacaatggctcctagtcgtaatggtcctcgtattccaagttctaaggcgttgttatcatcattcattgcacgatcagatacacatacggtaaaagaggacaacacaaatcttaagcatgcatcttttatggataagtttaattcatcgttaagcacaatatcagaatcttttcaaagtaagagggggagaaagaataagggcatgaatgaagaacgaatatcaaatcataatgtagcacaggaacaaaaaaataatatggatataagcgtctctatagaagaattgcaagatgctttgaatacagaactgctgttttaa

SEQ ID NO: 75689 - DNA, 951 bp, Saccharomyces pastorianus
atggtgtctacacataacagagataaaccttgggatacggatgatattgataaatggaagatagaggagtttaaggaagaggataacgcatccggtcaaccttttgctgaagagtccagttttatgactttgtttcctaaatacagagaaagttacttgaagacgatttggaatgatgtaacaagggctctagacaaacacaacatagcgtgtgttctagatttagtcgagggttctatgacagtaaaaacaactagaaaaacatacgatcccgctatcattttgaaagccagagatttgatcaaattattggcgagatccgttcctttcccgcaagccgttaagatcctacaagatgacatggcatgcgacgttattaaaattggtaatttcgttactaacaaagaaaggtttgtcaagagaagacaacgtcttgtaggccctaacggtaatactttaaaggctttggaacttctaactaaatgttacattctagtacaaggtaacacagtaagtgccatgggtcccttcaagggcttgaaggaggtccgtcgagtagtagaagattgtatgaaaaatattcaccctatctatcatatcaaggaattaatgataaaaagagaattggcaaaaaggccagagttagccaatgaagattggtcaagattcttgcccatgtttaagaagaggaatgtggccagaaagaaacccaagaagatcagaaacgtcgaaaagaaggtctatactccatttcctcctgcccaattgcctagaaaggttgatttggaaattgaaagtggtgagtatttcttaagcaagagagaaaagcaaatgaagaaattaaatgagcaaaaggaaaagcaaatggaaagagaaatcgaaaggcaggaagagagagcaaaagatttcatagctccggaagaagaagcatacaagccaaaccaaaattag

SEQ ID NO: 75690 - DNA, 459 bp, Saccharomyces pastorianus
atgcagtaccattccgctctatatgtatatatttacgtaactttcaccactgttccctataaggaaaagccggatatcatttcgatctgcttcagcatgctgtcgtttgtttttgatttttctgtccgaatttgctctcgtaccttggagtccttttcctggtccttgatcagctcctcggctttcaaagtagtctcagctttcagtttagctggctcttgtgtacttgcctcccgcagcagcgtcggtatcattgtttcactacttttgtttaacttttccacttgtaactttgttctcttcctttcagcggtgctgatcgacctctttttttgtactttcttgccaacaccaacattcttgcccacacctttctttttcatgctacacttgcccattttttccttgctaaattcccttgagttattgtaccttattatagcaggcttgcacatctga

SEQ ID NO: 75691 - DNA, 399 bp, Saccharomyces pastorianus
atgtgcaagcctgctataataaggtacaataactcaagggaatttagcaaggaaaaaatgggcaagtgtagcatgaaaaagaaaggtgtgggcaagaatgttggtgttggcaagaaagtacaaaaaaagaggtcgatcagcaccgctgaaaggaagagaacaaagttacaagtggaaaagttaaacaaaagtagtgaaacaatgataccgacgctgctgcgggaggcaagtacacaagagccagctaaactgaaagctgagactactttgaaagccgaggagctgatcaaggaccaggaaaaggactccaaggtacgagagcaaattcggacagaaaaatcaaaaacaaacgacagcatgctgaagcagatcgaaatgatatccggcttttccttatag

SEQ ID NO: 75692 - DNA, 294 bp, Saccharomyces pastorianus
atgtccgaacaagcacaaacacaacaaccagcgaaaagcactccctccaaggattctaacaagaatggcagctccgtgtccacgatcctcgacactaagtgggatattgtcctgtccaacatgctggtcaagactgccatgggttttggcgtaggtgtgttcacctcagtattattcttcaagcgccgtgcatttcctgtatggctaggcattggatttggtgttggaagaggctacgccgagggcgacgccatctttagatccagtgctggcctcagatcctcgaaggtttag

SEQ ID NO: 75693 - DNA, 2139 bp, Saccharomyces pastorianus
atgcgattgttgctgtgcaagaattggtttgcgtcacctgtaatctcaccactactgtatacccggtccttatattcaatggctaacactactagtttccctattgctccccaggccccgcctaattggtcgttcactcccagcgatattagtgggaaaaccaacgaaatcatcaacaacagcaacaatttctatgattctatgagtaaggtagagagcccttccgtgagtaattttgtggagcctttcatgaagtttgaaaatgaattgggcccaataattaaccaattaactttcttacagcatgtgtcgtctgataaagaaattagggacgcatctgtgaactcctcaatgaaattggatgagttgaacatcgatctatctctgcgtcacgacatctttttgcaattcgcccgcgtctggcaggatgttcaatcgaaggcagattctgtggaaagagaaactttcaaatacgttgagaagtcttacaaggactacattcattctggtttggaacttgacgagggaaaccgattgaaaatcaaagagattaaaaagaagatctccgttaactctattaatttttctaagaatctgggagaacaaaaggaatacatcactttcaccaaagaacaattggaaggtgtgccggattctattttgacgcagttcgagacaataaaatctgacaaagagagcgatgaaaccttgtataaagtcatcttcaaatatccggacatttttcccgtgatgaaattggcatcctcagctcagactagaaagcaggcctttttggccgaccaaaataaggtccctgaaaatgaagctatactgttggatacattgaagctgcgtgacgaattggcctcgttattgggctatgacacgtatgcgaactacaacctgtatgataaaatggctaaagatagcactacggtaatgaactttttgaatgatttgaaggacaagctaattccgctgggcagaaaggaactacaggtcttgcaagatatgaaagccgaagatgttaagaaacttaatcagggtgcagatccaaactactacatttgggaccaccgttactacgataacaaatatttgttagaaaacttcaatgtggacctagaaaagatttctgaatattttccactagaggctacgattactggtatgctggaaatatacgaaacattgtttaatttgaagtttatcgagacgaaagattctcaaaacaaatctgtttggcatgacgacgtcaaacaaatcgccgtttggaatatggatgatccaaagtctccaaactttgttggttggatttatttcgatttacatcctcgtgatggtaaatatggccacgctgccaattttggtttatcgtcatcattcatgattgatgacaccacaagatcgtatccggttactgcattggtttgcaatttctccaaatctacgaaggataaaccttctctactgaagcataacgaaatagtgacctttttccatgaattgggccatggtatccatgacctggtgggacaaaacaaggaatcgaggtttaatggccccggatctgttccatgggattttgtggaggcaccttcccaaatgttagaattttggacttggaataagaatgaattaatcaacctctcatcgcattacaaaacgggcgaaaaaattccagaatctttgatcaattcattgatcaaaactaaacacgtaaatggtgctttattcactctaagacaattacattttgggttatttgatatgaaagtacatacttgtaaagacttgcaaaacctgtcaatttgcgatacctggaaccaattgagacaggaaatttctttgatttctaatggtggtacgttatccaagggttatgattcatttggccatataatgtcagactcttactctgccggttattacggttatctatgggcggaagtctttgcaactgatatgtatcacaccaaattcgctaaggatccgttaaataccaagaatgggatacaataccgtgatatcgtgttggcccgtggtggcctttatgatattaatgataatctgaaagaatttttgggtagggaaccttctaaggatgctttcttgaaggagctgggcttacagaactaa

SEQ ID NO: 75694 - DNA, 435 bp, Saccharomyces pastorianus
atggtttcgaagaaaaatacggctgaaatcagtgcaaaagatatatgggagaatatatggagtggtgtaagttcgctgcttgatttcttcgcagtattggaaaacctaggcgtggtcaacgataagttatatgtaagtgggctattacggaaagtttggctgtgttactcatgcatttcagtgataaaatgtgtatggaaattaataaaattatgcaaggtgaaatttaaaatcgatcaacgattggatggggagggaaatggtctagtaaaggataagttgataaacttcaagaaaaaatataacgaacatatcagacatattactgctgctttactccaagatttgagctatttaatggttttaatctatccagggacgaggttatttaaaagattatctaacataataacactttgtagaataattgtataa

SEQ ID NO: 75695 - DNA, 1008 bp, Saccharomyces pastorianus
atggcattccaagatccaacttacgaccagaataaaagcagacacatcaacaacagtcacttgcaagggccaaaccaggaaacaatagaaatgaaatctaaacacgtatcattcaaaccctctagagacttccatacaaacgattactcgaataactacattcatgggaagtcgctaccgcaacagcatgttactaatattgagaatagggttgatggctatccaaaacttcagaaattatttcaggcgaaagctaaacaaataaatcaatttgccactacgccatttgggtgtaaaatcggaatagattccattgttccaacgttgaatcactggatacagaacgaaaatttgactttcgacgtggtgatgattggctgcttaacagaaaatcagtttatttacccaattttaacccaattgccattggataaattgatctccaaaccaggtttcctgttcatctgggccaattctcaaaaaatcaatgaacttactaaacttttgaataatgaaatatgggctaaaaagtttagaagaagtgaagaattggtttttgttcctattgacaagaaatcaccgttttatccaggtttagatcaggacgatgaaacgttgatggaaaaaatgcaatggcactgttggatgtgtatcacaggtacagtaaggaggtctacagatggacatcttattcattgtaacgtagacactgacttgagtatcgaaacgaaggacaccactaatggtgctgtaccatcccatttgtatcgtattgcagaaaacttctctaccgcgactagacgattacatattattcctgcaaggactggttacgagacacccgtcaaagtaagacctggctgggttatagtgagcccagatgttatgttggataacttctcacccaagagatataaagaagagatagctaatttaggttcgaatatcccattaaaaaatgagattgagctgttaagaccaagaagtccagtacaaaaagcacaataa

SEQ ID NO: 75696 - DNA, 1251 bp, Saccharomyces pastorianus
atggtgacaagacatagagtgactgtactctacaatgcccctgaggatatcggtaatcatatgcgccaaaatgacactcatttgactgttcgtggaggttctggtgtggttttacaacaaaggtggctattagagaggactggaagcttggataaatcctttacgagaatcacttggaggcccagagcggacttggctagaagtttaagcgttatagaaaatgaactgagtgctggcttttcagtttactcaaattcttcggatgtgccggaaaggtttattactaacccagtctacaattcatttcacagtgagaagtttgacatagagcagtacttgcctcccgaagtagatttgaatctgtcatggaatccagaagattttacatatgatatatcagtggagcccacacaaatccaaattgttgaatatcgtctgttgaaacagggtgaagaatttacaattgcaagagtgaaagatgagaaactcgaagtaggtgtattctttgtggatgcaagtgatgaaagtgatgtcgatattggtggaatacgttgtaattggaggatggacgatggtaaaatggaaagatgtcagaaaacatccttattgtataaacagggccatatcgcatacaatcactcgacgactacgacatcactatatctgaatgaacctatcggtttgcatccaaaaatcatgattgatctcacagatttcgaagaacgccctaaatgcatgtatctaatgcacctgcaattgccgttagaattatttatcgataaattccaatcctctcccttactactttttggagaagacgacttagaattaccagaatactctcttcgagataaggcatggggttctgaaagtatctttgaattgaaagccggcacaatgaatgaagtgacattgcatactagatatattgagccttctaataataaaggggataaattggaagtttcatttgatccagaagttatattagcctgcgacacaggtgacaataaagtttcccataatccattttataaaaaagatctaggatatgaatctctctttacagacgatactacattccaccatttgaactcgacaactcttctagtaccaattccaaggcctgacacaaaggattattccaagatcaaaaatggtacgttactatgcttactcatctccatcatatacattttctccaaggtatttggtaacaacaagaagaaaagatcagtaaaacgggaataa

SEQ ID NO: 75697 - DNA, 1752 bp, Saccharomyces pastorianus
atgcccaatacgcatactcaacatgtgcaaatatcagagccaaattctgtaaatactttgtctacaccatccaaaagaggtcaccgccatcgcagatcgctagcaatatcaggagattttgattttttgaaacagcctgcagcaattgtgaatttaccacctccacaggcggctgaaaattgtccttcaactgccccaactgctgtatcaagtacattatcgccaatacgctacaatagatttccttgcaaaaccaatgaagacgctggaacgttagatttgcctgaaccaagattttatccgttatcaccaaagaacaatctgcaaacaccaagtccacgatttttcattagtgaagagccaagtttttcatcgccagttaaaggcgtcccagatgccattattaaccttgacgatgccttgaagacaaggcctaggtcatttaaatcacatagaagatctgaatccgctcctcctgatttggaggttatggtagataagggcaattgtgcagccggttctaactctatgattaaagaagaagaggactccttaattgaaccagaatcgaaaaatgaatattatgagcaaaagcttccaacagcactattatccccactgcggccttccctttgtgtatctgaacaggccattgatgtagatgattcagctctcaatgggtcaccgacccatcacaaccatgggatgcaaaacgccaatgcacggaattccaacacattcaattcgttgaagatcaaaggccaaaagcaaagatattatcattatacgaagcagctacctttgaccgtaggctgtgactcgcaatctccaaaagaacaaaggtcggctgcttcaatgacaatcaatcaggcaatgacaccttcttccctggcctataccccttctaaactagcatctactcccgcaacaccagtatccttttatgacagcaatgcggacattaacttagaaagtgataattttccactaaaagataaccctagatatgccaaggatggttatcctaaaaagtgtggcaattcacagcttaatcgtgtgctggatagcgataaaagacaggattttagtggagaatcgagaagaagaagatcgggcagtcctatctcccacatgcaacaccgcaacctgattgataatatgaaaggtagacgaaacagtaacacgataaactcaatcttcaactacaagagtcaacattatgaaatgccatatgatgatatgatgaaaaatgaaaacattaatgcacagtccatgcccttttcagtcaacggtgtcaacaatgaaaatagtatcggaggggttattacgagagcggacgatgcaccccttcaacactctgtggtcaaatcctgtacgcctgatggcaaggaagaaatgaataggcttaaaagtaatgacagtaatgaatattccaagtctgaagggcagatcagaaccaattcgcaactaagtaaggacattctcatgggtgaaccaggtgatatggttgatctgtcctcttttgtcaacacgcagagaaaagcctcaaatgaaactggtgacttagtctttagtttatcccaggatgatgacgcactgaaaacgttccatgcgagcaacagcgcagcaacaagcaatgaaagctggtgtattagcgatgatgcgttaggaaagcaggcgcaggacagtgaagttaggaggaaaagaaaatccaaattaggactctttagacatattttttcaaggaagtaa

SEQ ID NO: 75698 - DNA, 966 bp, Saccharomyces pastorianus
atgagtatccccgctgacattgcatctttaattagtgacaagtacaaaagtgccttcgataatggtaacttaaaatttatccagactgaaacaacgaaaacaaaggacccaaaaaccagcatgccatacttgattagccacatgccaagtctgatcgaaaagccagagcgtggccaaactccagaaggagaggatccactaggcaaacctgaggaagaattaacggttatcccagaatttggtggtgccgataacaaagcgtataaattgctattaaacaaattccctgtaatccctggacacactttattggtaactaacgaataccaacatcaaactgatgccttgaccccaaccgatttattgactgcttataagttgctgtgtgccttggacaatgaagaatccgacaagagacacatggtcttttacaattctggtccagccagtggttcttcattggaccacaaacatttgcaaattttgcaaatgcctgaaaagttcgtcactttccaagatagactatgtaatggtaaagaacatttcctaccaactttcaatactgaacctttgcaagatgctaaagtctcgttcgctcattttgtcttgccaatgccggagtccgaagaaactgttgatgaagacctattagctatgtgttacatctccatattgcaaagagctttgacctttttccaggactggttgaacgaaaatccagaactaaagaaatcctacaatcttatgttaaccaaggaatggatctgtgtcgttccacgttcgaaggccttttctgatgaaatgaagataggtttcaactccacaggttattgtggtatgatcttaaccaaaaatgatgaagttttctccaagattactgaaaaacctgaattgattaacgatatcttattggaatgtggtttcccaaacacttctggtcaaaaaccaaacgaatacaactattga

SEQ ID NO: 75699 - DNA, 939 bp, Saccharomyces pastorianus
atgtttagtaaatacctcgtaactgcatcttccctctttgtggctttgacctctgcagcatctaccgttgatctagatgctctgcttcttctaccaggggtcgagtcccacgacggcgttgatactgtattttcgaccaaaaacttttatcaagtgtcattcgtcaaatccattgctcctgctatcgtaaacagctccgtaatcttccaggatgtttctcgtggtgtggctatgggcaatgtcaagagcagagcaagtatcttcaacccagaggaaacgtattacgattgggaacagtaccaagtagtaaataatggagactggcgaaccgaatgggcacctgcctctgagtgcatttggagggaggagaaggataacagcgacgaaacaccggacagattccccatctcggtgccatataattggacgtcacagtactcaattgtagattatgacacagacgctaacgaagacaatttagatttcaggtttattaaatcattgctagataagaaaaattggttgaaaaaaattaaccagactgtttcccaatccagtattatggtagcaccaatgattaagccatacaatgtggtccagctttggtattcaaaatatatggtttgggcaaacgttcaaagacaatattgtagcggtgtttatccaggagggactcaatgtagcgcttggtccaggtactaccatgttgatgcacctacctgcgatgagcctgtcgcctcttacatgactaaaatgtcggaaaatgaggttcagtgtcccaatgagagaaacgcaactaccctagagcctctccgcctgaataagcagggagactctgatttttctttgactttcgaggaagaggaagaggaagagacaggatctaaatctctttggagtacattgaaaaaatttttctctaaaagaagtataagttga

SEQ ID NO: 75700 - DNA, 1392 bp, Saccharomyces pastorianus
atgaaccgtattactaggaaaagttgtttattcgcgattatatttgcatcattatttgtgacacatgcattgggtgccgctattgatccgccaaggcgaccacataatgtgaagccttttcataacggtaatctcgaacttcaaagaagagcaaatgaaccgttttttgaaatagatgtcaagagtctgaacacaaactcaccgatatcagagttgtgtaaaaaagatttgcacgtcattgaatcgtctcatgatctttttcatttacaaaaccaatgtgaattcatcttggggtcattaaaagtcacaaactatgattctaacattttggatttgaacagcttgagggccattggtggtgacctgattattcaggattcacctgaactgatcagaatccaagccgggaacttgaataaaatcgaagggctcttccaattacagggactaacctctttggtttctgttgaaattccaactttgaaattttgtcagtcactggagtggaaagttgttcccatcttgaactacgtctccatggattctcagaatattgagattataaaggatattgtcatatcggatacttcattagcaaacatcgagaatttcaacaaggttcaggaaattgatactttcaatatcaataataacagatttttagaaactattcattcgaacgttaaaaccattaggggacaattcagtgtacatgcgaacgctaaggagctagaacttgaaatgccacacttgagagaagtggaaaacataacgattagggacacatcattggtctaccttccacaattaacaaaagtgaaaagctctttagagttcatcgaaaattacttttacgaattgaacctgaacaatttgcagaagattggtggaacattaggaattatcaacaatgtaaatttaataaaagttaatttggagaacgtaacagacattcaaggtggcttgatgatcgccgataacgaatccctcgaggatattactttcctgccaaacttgaagcagattggaggtgctattttctttgaaggttcgttcaaagatatcatgttcgatagcttgaaactggtgaaaggtagcgcttttattaagagttcatcaaacgtgttggattgcaataaatggacaaacccatcaaatggaagatcaatcatcaggggtgggaaattcacttgtatttctggtaagaaggaaaatacgctgaatgttaaacaggatggtacaatcatagaaaaagggtacaaagatttaacgcaagaaggtgaagactccaagaaaagagtgatttcaaaatacgcgaactcagcaaatccaagcatgcaattggacccccttctttttggtacatgccttgttgctatgttattgttttaa

SEQ ID NO: 75701 - DNA, 777 bp, Saccharomyces pastorianus
atgaagaagacgttcgagcagtttcgaaaaagcaatttactatttcaggttctcaaaggaccccagcatctagaatgtcagaagttatttgtccttgattcttcattcaatccaccacatctggcccattttcaactactatcgcagactattaaaaacttcaaattgaaagacacccgttcgcatgttttattactgttagcggtgaataatgcagataagttgcctaagccggcatcttttccaactcgtctggaaatgatgtgcttattcgctgactaccttcaggagaagctcccccaatctgtagtatctgtcgggttgactgttttctcgaaattcatcgacaaggacaaaatattacatgagcaatttgttaaaggatgcagtgcagatataggctacttagttggttttgatacaattgctaggatctttgatgaaaaatattatcatcctttaaaaatcagtgatgtaatggagagcttcatgtcgggatctcaattatattgcttggcgagaggcgattgccatctcagtgctgaatcgcaactaagatatgctagtgacatccttgagggaaaattcgaaccggtaatacccagagaatggggcgctaggattcatgttatgcaaaatgattatccagcattaagaaatgtttcatcatccgagattaggaacaaactgaagaatgggcaagtggagagtttgaaagacgagttgccattgtgcatatacgattatttgatcaataataagacaatatttgattga

SEQ ID NO: 75702 - DNA, 2283 bp, Saccharomyces pastorianus
atgaagataacgtgtacagacttggtgtacgtcttcattttactcttcctaaacacgagttgtgtccaagccgttttttcagatgatgcatttatcactgattggcaactggctaacttaggtccttgggagaaagtcatccctgattctcgagaccgcaacagggttctcatcttatcgaaccctaccgaaacttcctgcttagtttcttcgtttaacgtttcttccggacagattcttttcagaaacgttttaccctttaccattgatgagattcaactggatagtaatgaccataacgcaatggtttgtgtgaactcttcaagcaaccattggcagaaatttggtttacacgattggtttttactagaggaaggcgtagataatgccccttctacgaccattttacctcaatcctcatatttaaacgatcaagtatctattaagaacaatgaactacatattctcgatgagcagtcaaaactggcagaatggaaattggagttacctcaagggttcaataaagtggaatattttcatcgtgaagatcccctggcgttagtgttgaacgttaatgatacccaatatatgggattctctgccaatggcacagaattgatccccgtttggcaaagagatgaatggttgactaacgtggtagactatgctgtattggacgtcttcgattctagggatgtggagttgaacaaagatatgaaagcggaacttgattcaaattcgctttggaatgcttactggcttagattgacaactaattggaatcgccttatcaacttattgaaagaaaaccaattctcaccaggacgtgtcttcactaaactcctagctctagacgctaaggataccacggtatcagatttgaagttcggattcgccaaaatcttaattgttttgacgcatgatggctttatcggcggccttgatatggtcaataagggccaacttatctggaaactcgatttagaaattgatcagggcgtcaaaatgttctggacggataaaaaccatgacgaacttgttgttttttcgcatgatgggcattatttgacaattgaagttactaaagatcaaccgattatcaaatcaagatcccccctatctgaaaggaaaactgttgattccgttattaggctgaatgaacatgatcaccagtatctgattaagtttgaggataaggatcatttactgttcaaattgaatcccggcaagaatacggatgtaccaatagttgccaacaaccattctagttcccacatattcgtcacagagcatgacacgaatggcatttatggctacataatcgaaaacgatacggtaaaacaaacttggaaaaaagccgtaaattcgaaagagaaaatggtggcatatagcaagagggaaacaacaaacctaaacactcttggtattacactaggtgacaaatcggttctttataaatatttgtaccccaacctagcggcttatctgatcgctaatgaagaacatcatacaatcacttttaacttaattgataccattacaggagaaatcctcattacccaagagcacaaggattctccggattttaggtttccaatggatattgttttcggtgaatattgggtcgtttattcctatttcagttctgaacctgttccagaacaaaagttagtagtggtggaattatatgagtcactaaccccagatgagcgtttgtctaactcaagcgacaatttttcttatgatccattgactggacacattaacaaacctcaatttcaaactaaacaattcatttttcccgagattatcaaaacaatgtccatttccaagacaacggatgatattaccacaaaggcaatcgttatggaattagaaaatggacaaatcacctacataccaaagcttttattgaatgcaagaggtaaaccagcagaagaaatggccaaggataagaaaaaagagtttatggctaccccatacacgccagttatcccaattaatgataatttcattatcactcatttcagaaatctattgccaggatccgattcgcagttgatctccatcccaaccaatctggaatccacaagcattatatgtgatctaggccttgatgtattttgtacaaggatcacaccttcgggccaatttgatttaatgagtcctactttcgaaaagggtaaattgcttattactatattcgtcttgttggtgatcacgtattttatccgtccttctgtttcaaacaagaagttgaaatcccaatggctaattaaatag

SEQ ID NO: 75703 - DNA, 324 bp, Saccharomyces pastorianus
atggtaaagggtaaaacgtttctgaaaagaatctgtccggaagaaacgttaaacgaagaaactaagcaggaagtttcggtagggttcgataagatgagaaccctgttgcggtctcgagaatcagggatgactttctcccaaggacctaagttagccagttgccaatcagtgataaatgcatcatctgaaaaaacggcttggacacaactcgtgtttaggaagagtaaaatgaagacgtacaccaagtctgtacacgttatcttcattgctatgggggaaggggaggatgaaagtgttgatatgaatgtaggtattagttattaa

SEQ ID NO: 75704 - DNA, 1254 bp, Saccharomyces pastorianus
atggctgtatttactcctccatcaggtaatagcaattccaccgaccatactcacacacaagatgaccacgacaaagatgataatgatatcaagaaattctacataaggccaagtttaggcttaaaactgtggggtccgctcgtacccgctcctgataacctaccgggactatacactctaatcactatccaatctgcagtgggtttctttgccctttggagactgagaaggctctacaaactaccgccaccgcgccgcattgccactggcactcactcggatttatcctttggcgaactacccagtgaaatgattgtcaatggcaagactaaaatcaaaaaggatattgctgactttccaactttgaaccgcttctccaccacccatggtgacattgtgctcgcccctcctcccatcatacctcgccaatctcgattcgtcagcgtcagaaagctcttatgggggttgtttggctctttgctactttctcagtcactgttggagcttactcgcctgaactttcttaaatacgacccctggtgcgacgaaatgaaatccgtacgtgacaagaagtttttcaacaatattgtcaaatattatcacgagggcatagaccccaccaaaataaaagtcaaggatgctatgaacggtactcctctctcgacaaatatcccagaggtcaaacaaagcgtcgctctcgctagagcgcaagttgaggcgcagaatcccattattaaatggttcggacccttggaatacaagcccatgtctttcaacgagtacctcaatcgcatggaatttcacttggacatgttcgagttttttcaaaataaaagaaacattagagaaaattccattgaactcatcaattccatatcccacaatccgcagtcttcttctactggccttgaaggtctttccgagtccaaaaaactccatctacaaaatgtggaaaaaagactgcatttcttagcatcttcgggagattccatttccgcaccagtaaagaagagatccagcaccacactctcccgaggtgtcattttgccccatgacacgaaaggcccgcaagatattgatctcgatacaataagatcgctttatgatccatggatgactttggccttagaaacttcgctaagcatcaaattcataccaactaccatgccctcccataccaagacacccactagcacggaccagccgttaccagggcctacccccaaggctctcactaatgaaaagacacattag

SEQ ID NO: 75705 - DNA, 2238 bp, Saccharomyces pastorianus
atgtcacacactaataagatcgcatacgtgttgaacaatgacacggaggaaacagcctcgccctcttccgttggttgttttgacaagaaacagctcactaaattactgatacatactttaaaggagctgggctacgactccgccgctgaccagttactgctagagagcggcggatatcaaaatgagtctaaccacatccagactttcttcaaactcatcaagaccggccaattccatcttattaattggcagattgtttgctcgctgccccttgcccatagctctccgctaaggtccgaatggcttcaaaggctgctcattcccacgccgacgcccgccacgacttcacttttcgaccacatgctcctgcaactgcaatacctgcaacagctgatgagctctgtaaattcatctacttgttcggacgcagagatcgccacgctcagaaattacgtagagatcatgattctagttaatagacaaatattcctcgaattcttccatccagtcacaaattccgcctctcacaagggccctcacactgcactgcccgtcctgtatttgcgcaaaatcctcaaaaacttcatcgagatatgggattccctgctggtgtctaacgatcagttcctaaatgaagaaaacatcttcaacccggaaacgaccttgagagaactgtcgacgtacctgaccaacccaaaactaaccgcgcagttgaacctcgagcgagaccatctgattgacgccatctccaaatatatcgatccgaacgaactcgttcccaagggtcgcctcttgcatctcttgaaacaggccatcaagtatcaacaatcacaagacatttttaatatcatcgatccggatgatgacgcctctttctcctctccaccccaccggatcaaccttttgcaggataacttctcacacgatctgactgtgacctttcaagaatggaagactatccaagacaccacagacgaaatttggtttttgacattttcgcccaatggcaagtatttggcttctgcgacttccgagtcttcaagaggctacttcattactgtttatgatgtggaacaagacttcaaaatttataagacttgcgtgagcttgtcacaatccgtattgtacctcatgttttctcctgatagccggtatctggttgcttgccctttcagcgaagatgttaccatttacgacatgaatgccacctccctgcccgatgcgtctgccacagactcgttcctaccatacccttctaccaggctctcgcccatggactcgtttaaactggacaccaccacgtacccagatgataccgaatcatcagcatcatcttcctcgaggccggcaaacgcgaattctaatcaatcaagagtatggtgctgcgatgccttccacactgcggaacgtgcgggctggatggtggttggatcgcccgacagagaagctattgtacactcactcaccacgaaagaatcactttttagcttaaaaggcaggacttgtatcgcgttgggccacgatgaaaacatctctgggagaaaatcaatcgatcctgcaaaagtcctttacaaaccaacaagtagcaatggtaactggcaatatgtggaggacgacgaaacctttccacgtgtgcacgacgtgaaaatcagctatgacgataaatgcgtgcttttaatgacccaccagggcgttatagatgtctacgatttcagtgggttcccctccaaagaggagctatctaagcaaacagtggatcccaaaaactttctgattccaagaatcgcaagattggatgtgggcaaaaacatgacttgtatctcattaccgctaaataacacgcatcaaggcttccataggcaacaaatatccgagtctcaacatttggtactagttagccttcaagataacgaattacaaatgtgggactataaagaaaatatcctcatacaaaagtactttggccagaagcaacagcactttattatcagatcttgcttcgcctacggtaataagcttgtcatgagcggatcagaagatggtaaaatttacatttgggatagaattagaggtaacttagtatctgttttatccggtcattccacggtaatgagtaattccacaaaacccatggggaaaaattgtaacgtagttgcatcaaaccctgcagataaagaaatgtttgcttctggcggtgatgacggtaagataaaaatctggaaaatttcaagaaattaa

SEQ ID NO: 75706 - DNA, 1701 bp, Saccharomyces pastorianus
atgcaggttcaaaaaatggtgagagataacagtaataacggtagcgataaaagcgtccattgggagaggaggaataataacggcgcaggccaccgttatcgttccagaagcggtaataccggtgctttggcaacaaaactaagtagtgggacgctctctgtcagaggattagtgaaggaccgaacaggaagcggcaagatcgcgggctgcgtggaggcgtttctggatgccaggacccaattgaatacgccctgggaccgtgctaagtgcaattggctggaccagatagattactatgtacagttgagaaagaccgcgttttctaaggaattggaccaactaaggaagcccatgatcgatgcatatgtggcggagatgaggcagaagtttgatgcctcctatggacaatccagggcgcaattggaagccaaactggcgctggtggacagtgaatggcatatggtacatggtgatgtgcatgcaaaactggaaaaactcgtggaagaacgccggtttttgaaaagattaagcgacacgatcgtaccacccaggtccaaaagatcacagcggctgtctccattgaccaaagaggaccgagccaactgtatctgtccgcagcccaaaggaatgagcgacaccgcttggttcgaagccattcagaagaaaatgttaggaatgaatggtaccatcaagctcctagagacagaacagaaactactggctgacgagaaaaacagcgtgaggaagacgttctggcccatggtggaagcacattcacgcttgaatgaatttgcttatctggagaaatgcatcaggctgatggcctctcagagagcaatatgcttttgtcttgatatagaggctttcgaaacaaaccagaacgtaatcaccgaaattggaatttcaatttatgaccccagggaaaatatggtgccgtcaatggttccaattacaaagaattaccacctaattatcgaggagtccctggaacttagaaaccaaaaatgggtctgtgactacaaggattgctacttattgggagaaagctatgttttgagcttgaaagagtgcgtgcatttcattcaatcactaataaactattacttggtcccggtgaccgaagaagacaagacatggtcaagggcatttgttggtcatcacgtgagcggggaccttaagtggctggagactattggtgtcaaattccctggcagagggtatgaaggccatctggaccatacgctgcttttggctgaaactcccggtgatctagacgtgttcatcttggacactgagcagttttacaggaaatcgtatggcgaaaaggggagcagtctgggcaagattctgcggttgttcgagataccgcatgcgtttctacacaatgccggtaacgatgcctactataccctgcatttgttcatgaagttttgcgatgttaatttcaggaaaataagcggcatggacgatgttcttaaagtaatgggccaagtaaaagtttggggagaacgagacgtacgagagcctaaagtggtgcccatgtcgtatgccatctccatcgaggaggcagtcaaaaatcggacgtaccgcaagggcgtcaagagcagcaggaaggaaagagtctgccaaacggaattcggtgggttaacgtatttcggaaccgctaaagacgccttcataagcactcttccgacacactaa

SEQ ID NO: 75707 - DNA, 333 bp, Saccharomyces pastorianus
atggtatctcaagaaactatcaagcacgtcaaggaccttattgcagaaaacgagatcttcgtcgcatccaaaacgtactgtccatactgccatgcagccctaaacacgctttttgaaaagttaaaggttcccaggtccaaagttctggttttgcaattgaatgacatgaaggaaggcgcagacattcaggctgcgttatatgagattaatggccaaagaaccgtgccaaacatctatattaatggtaaacatattggaggcaacgacgatttgcaggaattgagggagactggcgaattggaggaattgttagaacctattcttgcaaattaa

SEQ ID NO: 75708 - DNA, 1065 bp, Saccharomyces pastorianus
atggggtttctttcggatcatccgcatacagctatcaccgagacgatctttcgaattgtctcttcaagggactatacgctagaagtggagttagctcccttgattcagcttatcaaagcagatcacaacgattataactataccgtgaaccaagaagaagctgcgcgagcacttagaaagaaaataaagtatgggaatcggctgcagcagtccaggactctggacctcttggatctattcatctcacaaggcgtgaagtttacagtcatgtacaatgatgacaagctgctgcaaagactgagagggatggctacgaactctgaaaacagcgggtccggtgaaaagtatgagcctaggattattaagaagtgcgcggcgtatgctatctcgtggctaaactatataacgcagaacaaccttgagaatgcgagggcgtattcaggtctttatcaattgggtcaaacagtcaaacagaggtactcgaagagcagccgttcccgccgtagcggcggaggctctggcggacggtctaacttcatggatgatagcgccgacgacactttgtaccagtccaactcgctgactaatgccgatagattgtataggattccacagatcaacatgaacaaagaggcacccaggattcggctcataatcagcgatgctctcgcgtctgctgtgtcgttacagaactcgctgatcggactgcccaagggcaagttctccacggacgatgaagaggccacgtccaagttcatccaggcaagggcgatcagaaggaaagttcttagatatctgcaattggtcacggagggtgagtttctgggtagcttaattcatgccaatgatgaactggtggctgcgttgactgcatacgacgaccgaagcgctcaggacgatagcagcgatgaaagtgatcacggctcgtacgatgacggtatttatgatgaaaacgagcaggataacagcaggtatattgatagcgagtcctcagaggaagagagcttgtcttcttatcagccgtccacgatctcaaacccattcggtgatcataacaaaatttga

SEQ ID NO: 75709 - DNA, 1041 bp, Saccharomyces pastorianus
atggaggacggtaaacaggctatcaatgagggatcaaacgatgcttcgccggatctggacgtgaatggcacaatattgatgaataatgaagacttttcccagtggtcggttgatgatgtgataacttggtgtatatccacgctggaggtggaagaaaccgatccattatgccagagactgcgagaaaatgatattgtaggagatcttttgccggaattgtgcttgcaagattgccaggacttgtgtgacggtgatttgaataaggccataaaattcaagatactgatcaataagatgagagacagcaagttggagtggaaggacgacaagactcaagaggacatgataacggtactgaaaaacttgtacactactacatctgcgaaattgcaagaatttcaatcgcagtacacaaggctgaggatggatgtcttggaggtaatgaagaccagctcaagctcttctccgattaacacacatggagtgtctactacggtaccttcttcaaacaacacaattatacccagtagtgacggtgtgtctctttcacaaacagactatttcgacacagttcataaccgacaatcaccgtcaaggagagaatccccggtaacggtatttaggcaacccagtctttcccactcaaaatctttgcacaaggatagcaaaaacaaagtaccccaaatatctacaaaccaatctcacccatctgccgtttcaacagcgaacacaccggggccatcacctaacgaggcgttaaaacagttgcgtgcatctaaagaagactcctgcgaacggatcttgaaaaacgcaatgaaaagacataacttagcagatcaggattggagacaatatgtcttggttatttgctatggggatcaagagaggctgttagaattgaacgaaaagcctgtgatcatattcaagaacttaaagcaacagggtttgcatcccgccattatgttaagaagaagaggtgatttcgaagaagtagcaatgatgaacggaagtgacaatgtcacccccggtggaagactctaa

SEQ ID NO: 75710 - DNA, 894 bp, Saccharomyces pastorianus
atgggtattgaagacattagcgccatgaagaacgggtttatagtggtgccgttcaaattaccggatcacaaggcactacccaaaagccaggaagcttcgttgcatttcatgtttgctaaaagacaccagagttcaaattccaacgagtctgactgtttgtttttggtcaaccttccattattatctaacatagagcacatgaagaaatttgtcgggcagctctgtgggaaatacgatacagtatcgcatgtagaggaactactatataacgatgaatttggattacatgaagtagatttatcagcattgacctccgatctgatgtcctccactgacgtcaacgagaagagatacacaccaagaaacacggcgctattaaaatttgttgatgctgcaagtataaataactgctggaatgctttgaaaaaatactcgaatttgcatgccaagcatccaaatgaactatttgaatggacatatacgactccatcattcacaacttttgttaacttctacaaaccactggatattgattatttgaaagaagatattcatacacatatggcaatttttgaacagcgtgaagctcaagcacaagaggatgttcaaagttctatagtggatgaggatggattcacattagttgtaggaaagaacaccaagtcattgaattccataagaaagaaaatattaaacaaaaatccattatccaaacatgaaaataaggccaagccaatttcaaatatagataaaaaggcaaagaaagatttctatagatttcaggtcagagaacgtaaaaaacaggagatcaatcaactgttaagtaaatttaaggaagatcaagaaagaatcaaggtaatgaaagctaagagaaaattcaatccatacacttaa

SEQ ID NO: 75711 - DNA, 582 bp, Saccharomyces pastorianus
atgtctgctgttgcaacttatttgaaaactttaactgctcgtcgtactatttacgctttgaaaccggagttacctggtgaaattactatcaacgacatccaatccgtcgtccaaaccatcattaaagaaacacccaccgctttcaactcccagccaaatcgcgctgttatcttgactggtgaaactcacaaaaaagtttgggacgaagtgactaaggctatagaaagccctgccggtcaaaagaggcctgcttcagcaagggatgaggcctttggttctgtaatcttcttcaccgacgacaaggtaactgaaaagctaaaggctgacttcccagcgtacgcagctgcattccctagtttcgcggaccatacctctggtgccgctcaaatcaactcgtgggttgccttggaggcaatgggcctgggtggtcacctacaacactacaatggttacataaaagctgctttgccaagcaaaatccctgagtcttggaccgtacaagctcaattagtcttcggtaccccagccgcacctccaggtgaaaagacctacatcaaaaacgatgttgaaatcttcaattaa

SEQ ID NO: 75712 - DNA, 582 bp, Saccharomyces pastorianus
atgtccccaactggaaactacttaaacgctattacaaaccgtcgtaccatctacaatttgaagcccgaattaccacaaggtgtcggtttggatgatgtaaagagaactgtacacgttattctcaagaatacgccaacagcttttaactcacaagtgaatcgcgctgtcattatcgttggtgatacacacaaaaggatatgggatgctgttgcgagcgcaatgccaactgctgaagccaagaagagaccagagtcttgcagagatgaggcttacggttcagtcattttcttcactgatgaaggaccaactgaaaaactgcaaagagattttccagccttggcagccgctttcccaacatgcgccgctcatacgaccggtgctgtgcaaattcagtcttggactgccctcgaactattgggattgggggctaatttgcaacactataatgactacgtcaaatctgctttgcctcaagatgttcctattgcgtggactgtacaatctcaattggtctttggtgttccaactgccttgccagaagaaaagacttttatcaataacgtaatcaacgtttatcactga

SEQ ID NO: 75713 - DNA, 348 bp, Saccharomyces pastorianus
atggcccgtgcgctcatgttgcgcaagttggaccttgccggtgctaccaaagcccagtgtttcaccaagcttccatgggcctatagtactcgatggtttagcagcagaatgggtctcggtattcactacagtcatactgcagtagttctggtaatttacgtcagcactattatcaagcctatacacgtttattgcacactatattatgctattctacgctgttgtatccaaatttacatcttcttttttagttttcatgtagttttcaagagagcccttttactgagactgcgttacgcgctttcttgcacagcacgcgaaaaaaagaacgagatgttttccttttaa

SEQ ID NO: 75714 - DNA, 378 bp, Saccharomyces pastorianus
atggttctaaccgatgccgaagaactgcgcagtccggttataacgtctgacatgtccttttttgatttggaatccaaccactcaagcgactctgttcatttactttgcgaaaaatatacccacaaattgcccatcgaaagtgaatcgcaaaccaccttcagactggcaccgacaaagcaaagattatacagacagagtactttacacgtaccgttaagtctcaagcaaagggttttcttatttactgaacgggtaaagagtatctgggccggcttgccaagatgcaaaccgaataagtatttcaaagttgcatttgccttagccgtgctgacaccattggctatttggatattttatattgactttcgtgtacattga

SEQ ID NO: 75715 - DNA, 1095 bp, Saccharomyces pastorianus
atgtctgcccctaagaagatcgtcgttttgccaggtgaccacgttggtcaagaaatcacagccgaagccattaaggttcttaaagctatttctgatgttcgttccaatgtcaagttcgatttcgaaaatcatttaattggtggtgctgctatcgatgctacaggtgttccacttccagatgaggcgctggaagcctccaaaaaggctgatgccgttttgttaggtgctgtgggtggtcctaaatggggtaccggtagtgttagacctgaacaaggtttactaaaaatccgtaaagaacttcaattgtacgccaacttaagaccatgtaactttgcatccgactctcttttagacttatctccaatcaagccacaatttgctaaaggtactgacttcgttgttgtcagagaattagtgggaggtatttacttcggtaagagaaaggaagacgatggtgatggtgtcgcttgggatagtgaacaatacaccgttccagaagtgcaaagaatcacaagaatggccgctttcatggccctacaacatgagccaccattgcctatttggtccttggataaagctaatgttttggcctcttcaagattatggagaaaaactgtggaggaaaccatcaagaacgaattccctacattgaaggttcaacatcaattgattgattctgccgccatgatcctagttaagaacccaacccacctaaatggtattataatcaccagcaacatgtttggtgatatcatctccgatgaagcctccgttatcccaggctccttgggtttgttgccatctgcgtccttggcctctttgccagacaagaacaccgcatttggtttgtacgaaccatgccacggttctgctccagatttgccaaagaataaggtcaaccctatcgccactatcttgtctgctgcaatgatgttgaaattgtcattgaacttgcctgaagaaggtaaagccattgaagatgcagttaaaaaggttttggatgcaggtatcagaactggtgatttaggtggttccaacagtaccaccgaagtcggtgatgctgtcgccgaagaagttaagaaaatccttgcttaa

SEQ ID NO: 75716 - DNA, 1143 bp, Saccharomyces pastorianus
atgtccatcaacctacattccgcacccgagtatgatccatcttataagctgatccagttgacaccaaagatactggatataatacaggatccggttcaaaatcaccagttaaggtttaagtcattggacaaagacaagtctgaagttgtactgtgttcgcacgacaagacttgggtgctgaagcagcgcaaacattcaaacacagttctactaatgagagaatttgttcctgaacagcctattactttcgacgaaacgctcttgtttggactgtccaagccgtacatggacgtcgtgggattcgccaagactgaatcagaatttgagaccagagagacacatggcgaattgaacttgaattcagtaccaatatacaacggagaactggatttctccgacaaaatcatgaagaggtcatctacaaaggttatcgggaccctggaagaactacttgagaactcaccatgttctgcgctagaaggtatatcaaaatggcataagattggtggatctgtgaaagacggtgtgttgtgtattctttcacaagacttccttttcaaagcactgcatgtactactgatgagcgcaatggcagaatcactcgatctacagcacctgaatgttgaggatacacatcacgctgtggggaaggacattgaggacgagttcaatccatacacaagagaaatcatcgaaacagtgctgaataaatttgctgttcaagagcaagaggccgaaaacaatacgtggcgcttgagaataccgtttatagctcagtggtacgggattcaagcgctaaggaaatatgtttctggaataagcatgccaattgatgagttcctcatcaagtggaagtcccttttcccacctttcttcccatgtgacattgacattgacatgctgcgaggctatcatttcaagcctaccgataagactgtccagtatatagcgaaaagcacactaccaatggaccccaaagaacggtttaaagtcctgtttaggctacagtcacagtgggacttggaggatatcaagcctctaattgaagaactaaattcaagaggtatgaaaatagacagtttcatcatgaagtatgcccgccgtaaaagactgggcaaaaagaccgtggtcacgagcaggtag

SEQ ID NO: 75717 - DNA, 1284 bp, Saccharomyces pastorianus
atggagagagagctagggatgtatggaaatgataggagtagatcaagatcacctgtacgtcgtcgtttgagcgacgacagagacaggtacgatgattataacgatagtagcagtaataatggtaatggcagtcgtcgtcagagacgcgaccgaggctcccgtttcaatgatcggtacgatcagagttatggtggcagccgctaccacgatgataggaactggccccctcgccgaggaggccgtggcagaggaggaagcagatcattcagagggggacgcggtggcggtaggggtcgtactttaggtccaattgttgaaagagacttagaaaggcaatttgacgcgaccaagagaaattttgaaaatagtatcttcgtgagaaacttgacttttgattgtacccctgaagaccttaaggaattgtttggtacagtgggcgaagttgtggaggctgacattatcacatcaaagggccatcaccgtggtatggggactgtggaatttaccaaaaacgaatctgtccaagatgccatatcgaaatttgatggtgccctctttatggaccggaaactaatggtaagacaggataatcctcctcctgaagctgccaaggaattttctaagaaagctactagggaagaaatagataatgggtttgaagtgttcatcatcaatttaccgtactctataaattggcaatccttaaaagatatgtttaaagaatgtggtcatgtcttgcgtgccgatgtagaattggatttcaacggattttcaagaggattcggttctgtcatttatcctactgaggatgaaatgattagagctatcgatacattcaacggcatggaagtagaaggtagagttttggaagttagagaagggcgtttcaacaagagaaagaacaatgatcgttataatcaaaggcgtgaggaccttgaagataccagaggtactgaaccaagtcttgcgcaggatgtcgctgtccacattgatgaaaccgcagcaaaatttactgaaggtgtcaatccaggaggggatagaaactgtttcatttattgtagtaatttaccattctcaacagcaagaagcgatttattcgacttgtttgggcctatcggcaaaatcaataacgcggaattgaaaccacaggaaaatggtcaaccaactggtgttgctgttgtagaatatgaaaatttagtagatgcagatttttgtattcaaaaattaaataattataattatggtggttgtagtttacagatctcttatgctagacgtgattaa

SEQ ID NO: 75718 - DNA, 780 bp, Saccharomyces pastorianus
atggacggatattgggatgttgtagtgtcgtccttgcaagacatatacaatgccaacgaggtcattccctttgatgatgagctgcaaacaaaaaaactaaatttccttaatatgtcaaaggatcagctgcaattgcatctcaacactttccaagaacacatggaaaacgtcaacagagtgcaccgaatccttgacaatgtacgttccaatttgtcgttgatgttgaatcagtcacgagaggaaaagagtgaggaaaatactgaagatgcagaagaaggagaagggacacgcatggcattgtcgcagggcaagaaagctgtggggaaagttggcagatcgtactggaccagcgaatacaacccaaatgcacctattttggtgggctcagaggttgcttataagcccagaaggggcagtgccgacggcgaatggatacagtgtgaagtactcaaagtcgtagcagatggtacacgatttgaagtgagagatcctgaacctgatgaattgggcaactcaggcaaggtgtataaatgtaattggaaagaactactgttgatcccgccaggctttcccactaagaactacccgccagggactaaggttctggcaagatatcctgaaacgaccactttttatcctgcaattgtcatcggaaccaagagggacggcacttgcaggcttcgatttgatggtgaagaggaggtggacaaagagacggaagtgactcgccgtctagtgctgccttcgccaacggcttcggcaaacctagcaaggaaatag

SEQ ID NO: 75719 - DNA, 771 bp, Saccharomyces pastorianus
atgtttgtggtggattggagcgtgcagctatgcatgggagtgatttcacctctcttccgtgccctcgtgcaactgcctttatcaattttcgtatggaatgggtttcagcttgtggcattgcctatcaacatcccattgaggttgttcctggggacgtcgctgagccgtttagttgcacaaacaagcacattagacttctatgtgatattgacgttgtttcaatattttgctgtgctttgtgcttttggcagcatcataggactcatctttgggtttatattgggtgtgttccactcaatctgcggggtacccagtgtatacataagtctagaatggaaacggtggtttgctccgatacgtacggtccttgaacgtgcttccactagtattgtcaacattatgcgaggacaaactattgcgccaatacccatgcctaagcccaatcccacgcatatatcaaagcctaacatgaaaaaattccacgatgagcctggagctgatgatatgactataacgcatgatgtgaactgctacatcaccccttgccaaacgcctactaacgaaaaaattcagcattataataatgattcattcaacacgaccaccacagacgatgaacccactgatatttgggataggtctgacacttaccaaaattcattcgtcaccaatgaaactttgatgtctctttctaatagagctaagcttcgaagaaatgccagtgatgcggacatcgttaatataaagattttacgaaggaattctaggtaa

SEQ ID NO: 75720 - DNA, 567 bp, Saccharomyces pastorianus
atggattacgatagctctgatacaatgaacggtggttcaagtaaccccttaatcactaagatgaatacaatgaaattattatatcaacactatttggataaagtcactcctcacgctaaggagaggtgggctgtattgggtggtttgttatgtttgtttatggttcgtattacaatggccgaaggctggtatgtgatttgttatggtctaggtctatttttattgaatcaatttttagcctttttgaccccaaaattcgatatgtccttacagcaagatgaagaaaacaacgaattggaagctggagaaaaatcagaagaattccgtccattcatcagaagattaccagagttcaaattctggtataacagcattagagccactgtcatttccctcttgttgtcgctattttcaatcttcgatattccagtattttggcccatcttattgatgtatttcatattattgttttttttaactatgagaaggcagattcaacatatgataaaatatagatatatacccttagatatcggtaagaagaaatattctcattcttctaactga

SEQ ID NO: 75721 - DNA, 315 bp, Saccharomyces pastorianus
atgttatatcttctgaagaaattgaaacatattgattcttatggtgagagctatttatcaatgttttatcttaagttctactgcccttggaaattatgtcctttgcttcccattttatatggaagaaacaaatcagtacaaaatgcttggtcatgtcataagcttcatcgatttattgacttcccaactccttcggctaatatgaatttttttttctttataagagtttgctatggaactgtctcgctgtttatttcaacgtttctaaagaaaatatccttttttatttatgtgaacttcactgtatacttttag

SEQ ID NO: 75722 - DNA, 969 bp, Saccharomyces pastorianus
atggatcctctcaggtcagtacagcctgcttcttatgttggttttgataccatcacgaatcagatcgaacatcgtctgttgaagaaaggttttcaatttaatataatggttgttggccaatccggattgggtaaaagtactctaataaatacattatttgcctcacatttgattgattctgctactggtgatgatatttctgccctgcctgttacaaaaacaactgaaatgaaaatttctactcatactcttgtggaggaccgcgttcgcttgaatattaatgttatagatacacctggatttggtgactttattgacaattctaaagcttgggagcctattgtgaagtacattaaggaacaacattctcaatacttacgtaaagaattgacagcccaacgtgaaaggtttattactgatacaagagttcatgcaattctttatttcctgcaaccaaatggaaaggagttgagccgccttgacgttgaagccttgaaaagattgacagaaatagctaatgttataccagttattggcaagtctgatacattgactttagatgaaagaacggagtttagggagcttattcaaaatgaattcgaaaaatacaatttcaagatttatccttatgattcggaagaactaactgacgaggaattagaactaaacagaagtgttagatctatcattccgtttgcagtggttggttctgagaatgagattgaaataaacggtgaaaccttcaggggaagaaaaactcgttggagcgctattaatgttgaggatatcaaccagtgtgattttgtatatttaagggaatttttgattcgaactcatctccaagacttaatcgaaacaacttcctacattcattatgaagggttcagaacaagacaattaattgccttgaaagaaaatgcgaatagtcgttcctcagctcatatgtctagcaacgccattcaacgttga

SEQ ID NO: 75723 - DNA, 744 bp, Saccharomyces pastorianus
atggtaaagattgcgataattacttactctacctacgggcacatagacgttttagcccaagctgttaagaaaggtgtggaggcagctggtggtaaagctgatatatacagggtcgaggaaactttacctgatgaagtcctcaccaagatgaacgctcctcagaaacctgaagatattcctgttgctactgagaaaacgttgctcgaatatgacgcctttttgttcggtgttccaactaggtttggtaatttgccggctcaatggtccgccttttgggataaaaccggtggattatgggccaagggctctttgaacggcaaagctgcggggatattcgttagtacttccagttacggaggtggtcaagaaagtaccgttaaagcctgtttgtcttatttagctcatcacggaattatctttttaccactgggttataagaattcatttgctgagttagccagtatagaagaggtacacggtggctctccatggggtgctggtacccttgcaggacctgacggctcaagaactgcgtctcctcttgaattgagaattgctgaaattcaaggtaaaacattctacgaaaccgccaaaaaacttttccctgcaaaagaagccaagccctccactgaaaagaagaccactacttctgatgcggctaagagacaaactaaacctgctgcagctacaactgcagaaaagaaggaggacaaaggattattatcctgctgcactgtcatgtaa

SEQ ID NO: 75724 - DNA, 720 bp, Saccharomyces pastorianus
atgcagcctcatttagacaacaacagtaataatgacgatgtcaaattggatacattaggggaacaaaatgtgttatcatccgcagaaaatatcactttacctgaagacacctttaaatcatatacgacctacttgctgtacgagatggctcattacaaaccgatgatattttccttcttggcactttcagtttcaattttaatagttgtgatctttcataatgttaaagcttgtgatgtcgtttttggtttttcaattttcgtcacttctattttgtttttgtccacgttgattccgtttaatgtgtatatctcggatgagggtttcagaattaagcttttgctggaagttatcatccacaggccagcggtaaagggaaaagaatggagagcaatcacagacaatatgaatcaatatttacttgataatggtttatggagtactcgctattacttttatagtagtgaaagatgctacaaattcttcagatttcttgtgaaagaaaaacccccaggtgtgaatgtaaattcatcggtaaaggacgccacaagtacgcagatagatgcaccagcaaatgaggcttcaaatgaggtaataaaatgctttagtttcagttctgacccaatattcgaagcatactttgttaaagcagtagaagttgagaaacaagcacaacaggaatattggagaaagcaatatcctgacgccgatataccatga

SEQ ID NO: 75725 - DNA, 798 bp, Saccharomyces pastorianus
atgagttgggaaggttttaagaaggctattaacagagctggtcacagtgtgataattaagaatgtcgacaagaccattgataaagagtatgacatggaagaacgtcgttataaagttcttcaaagagcaggtgaggcattacaaaaggaagccaaaggtttcttggactcattgagagctgtgacagcatcacagactaccattgccgaggtcatctctaacctctatgacgattcaaaatatgttgctggtggtggttacaacgttggtaactattatttgcaatgtgttcaagattttgatagcgaaactgttaagcaattagacgggcccttaagagaaaccgtactagatccaataacaaagttttcgacgtatttcaaagaaattgaggaggccataaaaaagagagaccataagaaacaagacttcgatgctgcgaaggcaaaagttcgtagattagtggacaaacctgctaaagatgcctctaaactgccaagggctgaaaaagaattgagcttagctaaagatattttcgaaaatcttaataaccaattgaaaactgaactaccacagttagtttcattaagagtaccttacttcgacccaagttttgaagctttaatcaagattcagctaaggttctgtactgatggttacactcgtttagcgcagattcaacaatatttggaccaacaatcaagagacgactatgccaatgggttattagacactaaaatcgaagaactattaggacaaatgacaagcctagatatttgtgcgctcgggataaaataa

SEQ ID NO: 75726 - DNA, 3150 bp, Saccharomyces pastorianus
atgggaagtcatcgacgttatctctactatagtatattatcatttctattattatcctgctcagtggtacttgcaaaacaagataagaccccattctttgaaggtacttcttcgaaaaattcgcgtctaactgcacaagataagggcaatgatacatgcccgccatgttttaattgtatgctacctatttttgaatgcaaacagttttctgaatgcaattcgtacactggtagatgtgagtgtatagaagggtttgcaggtgatgattgctctctgcccctctgtggcggtctatcaccggatgaaagcggtaataaggatcgtcccataagagcacaaaatgacacctgtcattgtgataacggatggggagggatcaattgtgacgtttgtcaagaagattttgtctgtgatgcgttcatgcctgatcctagtattaaggggacatgttataagaatggtatgattgtagataaagtattttcaggttgtaatgtgaccaatgagaaaattctacagattttgaacggcaaaataccacaaattacatttgcctgtgataaacctaatcaagaatgtaattttcagttttggatagatcagttagaaagcttctattgtggcttaagtgattgtgcctttgaatacgacttggaacagaatacctcccattataagtgtaatgacgttcaatgcaaatgcgttcccgacactatgttgtgtggtgctaaggggtctatagatatctcggatttcctgacagagacaataaaagggccaggagatttcagctgtgatttagaaacaaggcaatgtaaattcagtgagccttctatgaatgatttgatattgaccgtgtttggtgacccttatattactttgaagtgtgaatccggtgaatgtgttcattatagtgagattccaggttacaaatctccttcaaaagatccaacagtgtcatggcaagggaaattggtgttggcattgactgctgtgatggtcctggcactttttacatttgctaccttttacatttctaaatctccgttattcagaaatggattgggttcctcaaagtctcccattcgtttgccagatgaagatgcggtgaataatttcttacaaaatgaagatgacacactggcgacattaagttttgaaaatatcacttatagtgtcccctcgataaattcagatggtgttgaagaaactgtgctgaatgaaataagtggtatcgtgaagcccggccaaatattagctatcatgggtggatctggtgcgggtaaaactactttattagatatcctagcaatgaaacggaaaacaggtcacgtttcgggttccataaaagttaacggtattagtatggaccgtaaatctttctcgaaaataatcgggttcgtcgatcaagatgactttttgctgcccactttgactgtttttgaaaccgtattaaatagtgcgctgttaagattgccaaaagcattgtcattcgaggccaagaaggcaagagtttataaggtgttggaagaactaagaattattgatatcaaagatcgtattattggtaatgaatttgatcgtggtattagtggaggtgaaaaacgccgagtttccattgcatgtgaattagtgacatctccattggttttatttttggatgaacctacatctggtttagatgctagtaatgccaataatgttattgaatgtttggtaaggttatccagcgactataacaggacattggtgctatctattcatcagccaagatcaaatatattttatttattcgataaattggtcctgttaagtaaaggtgagatggtctattccggaaatgccaaaaaagtgtcagaatttttgagaaatgagggatatatctgtccggacaactataatattgctgattatttgattgatattacttttgaagccggtcctcaggggaaaaggagaagaatcagaaacatttccgatttagaagctggtacggatactaacgatattgataatacgatacaccaaacaacatttactagcagtgatggtacaacacagagagagtgggctcatcttgcagctcatagagatgagatcagatctttactcagagatgaagaagatgtagagggaacagatggaaggcgaggtgctactgagattgacttaaataccaaactactacacgataaatataaagatagcgtctattatgcagagctttcacaggagatcgaggaagttttaagcgaaggtgatgaggaaagtaacgttttgaatggagatttacccacaggtcaacaatctgctggttttctgcaacagttatcgatattgaattcaagaagttttaaaaacatgtacagaaaccctaaactattattgggtaattatttactgacgatcctattgagtttattcttgggaacactatattacaacgtctccaatgatatcagcggttttcagaacagaatggggctgttcttctttatactaacgtacttcggttttgttacattcacaggtctcagctcgttcgctctggaaaggatcattttcataaaagaaagatccaataactattactcgccacttgcatactacattagtaagataatgagcgaagtggtcccgctacgtgttgtaccacctatactcttgtcattgattgtttacccaatgactggtttaaacatgaaagacaatgctttttttaaatgtattggaatccttatactgtttaaccttgggatatcgttggaaatcctaactatcggcataatttttgaagacttgaataactccataatattaagcgtgctggtgcttttgggctcactactgtttagcggactatttatcaatactaagaatattacaaacgtggccttcaagtacctgaaaaacttctctgtgttttactacgcctacgaatctttattgatcaatgaggtcaaaacattgatgctgaaagagagaaagtacggcttaaatattgaagttccaggcgctactatcttgagcacatttggatttgttgtccaaaaccttgtatttgacatcaagatcctggctctgtttaatgtggtgtttttaataatggggtatctagcccttaagtggatagttgtggaacaaaagtag

SEQ ID NO: 75727 - DNA, 1251 bp, Saccharomyces pastorianus
atgtctttatcttcaaagttgtctgtccaagatttggacttgaaggacaagcgtgtcttcatcagagttgacttcaacgtcccattggacggtaagaagatcacttctaaccaaagaattgttgctgctttgccaaccatcaagtacgttttggaacaccacccaagatacgttgtcttggcttctcacttgggtagaccaaacggtgaaagaaacgaaaaatactctttggctccagttgctaaggaattgcaatcattgttgggtaaggatgtcaccttcttgaacgactgtgtcggtccagaagttgaagccgctgtcaaggcttctgccccaggttccgttattttgttggaaaacttgcgttaccacatcgaagaagaaggttccagaaaggtcgatggtcaaaaggtcaaggcttccaaggaagatgttcaaaagttcagacacgaattgagctctttggctgatgtttacatcaacgatgccttcggtaccgctcacagagctcactcttctatggtcggtttcgacttgccacaacgtgctgccggtttcttgttggaaaaggaattgaagtacttcggtaaggctttggagaacccaaccagaccattcttggccatcttaggtggtgccaaggttgctgacaagattcaattgattgacaacttgttggacaaggtcgactctatcatcattggtggtggtatggctttcaccttcaagaaggttttggaaaacactgaaatcggtgactccatcttcgacaaggctggtgctgaaatcgttccaaagttgatggaaaaggccaaggccaagggtgtcgaagtcgtcttgccagtcgacttcatcattgctgatgctttctctgctgatgccaacaccaagactgtcactgacaaggaaggtattccagctggctggcaagggttggacaatggtccagaatctagaaagttgtttgctgctactgttgcaaaggctaagaccattgtctggaacggtccaccaggtgttttcgaattcgaaaagttcgctgctggtactaaggctttgttagacgaagttgtcaagagctctgctgctggtaacaccgtcatcattggtggtggtgacactgccactgtcgctaagaagtacggtgtcactgacaagatctcccatgtctctactggtggtggtgcttctttggaattattggaaggtaaggaattgccaggtgttgctttcttatccgaaaagaaataa

SEQ ID NO: 75728 - DNA, 648 bp, Saccharomyces pastorianus
atggggaaagagaaaagaaaaaaattgatctatcgatttcaattcaattcaatttatttcttttcggataagaaagcaacacctggcaattccttaccttccaataattccaaagaagcaccaccaccagtagagacatgggagatcttgtcagtgacaccgtacttcttagcgacagtggcagtgtcaccaccaccaatgatgacggtgttaccagcagcagagctcttgacaacttcgtctaacaaagccttagtaccagcagcgaacttttcgaattcgaaaacacctggtggaccgttccagacaatggtcttagcctttgcaacagtagcagcaaacaactttctagattctggaccattgtccaacccttgccagccagctggaataccttccttgtcagtgacagtcttggtgttggcatcagcagagaaagcatcagcaatgatgaagtcgactggcaagacgacttcgacacccttggccttggccttttccatcaactttggaacgatttcagcaccagccttgtcgaagatggagtcaccgatttcagtgttttccaaaaccttcttgaaggtgaaagccataccaccaccaatgatgatagagtcgaccttgtccaacaagttgtcaatcaattga

SEQ ID NO: 75729 - DNA, 954 bp, Saccharomyces pastorianus
atgaaaaccattattatttcagattttgatgaaacaatcacaagagttgacacaatctgcaccattgctaaattaccgtatctactgaacccgcggttgaaacctgagtggggtcattttaccaagacatatatggacggataccataaatacaaatacaatggaacgagatcactgccgttgttatcttcaggcgtacctacgataatttcgcagtctaacttcaataagttgtttgcggacgaattaaaatatcaaaatcataacagggttgttgagttaaatagtgtaaatgaaattacaaaacaacagatttttaagtcgatttctttggatcaaatgaaaacgttcgccagagatcagaatcacgaagattgtttactaagagatggtttcaaaacgttttgctcttcagttgtcaaaaattttgaaagtgatttttacgttttatctataaattggtcaaaagagtttattcatgaagtcattggtgacagaagacttaaaaatagtcatattttttgtaacgatctaaaaaaagttagtgacaagtgttctcaaagctacaatggtgaatttgattgtcggttattgacaggctctgataaggtcaagatactgggtgaaatattagataagatcgactcaggttgcaataaagaaggaaattcttgcagctattggtatataggggatagtgagactgacttgttgtccatattacatccatctactaatggtgtactgctaataaacccgcaagaaaatccttccaaattcataaaaattaccgaaaagattattggtatcccaaaggataaaatctcgagttttgaagctgataatggtccagcgtggttacagttttgtgaaaaggaaggcggtaaaggtgcctaccttgtgaaatcctgggactctttaaaagatttgatcatgcaggtaacaaaaatgtag

SEQ ID NO: 75730 - DNA, 666 bp, Saccharomyces pastorianus
atgcgatataataattatgacaactctggaagttccttcttaactagagtagttaaaaagtcagatatagagaaaacgttattattaaatagagaaattgatgactggaagtcaaacgataaaaagaaggcatataaggaacgcggaagagtttatgcaagttgctcatttattgaagtatccttttctcaaataagggctgttgatgtagaaaaaaaaattgagaatgccgaacaactaagagatcttacaaggaatattgttaagaacaaaaccagctctttgcacgaaattacaccctcaaagaatcgtgtaactagtgcatgcaattccgagagacgtacgactagccaagaagcaaacaatcttgaaggctaccatagttgtgcacaaggaactagtcggtctgccagtattacgaagaaatacagcaaaaagactactagtcgtcctaaaagagaaaagagacaaacaatcctcccaaatggtgagataaaggaatgctctaaatgtaaagacacttggacaattcaatggcgtagtggacccgaccaaaacagggaactttgtagtccctgtggactcgcctatggaaaaagactgaagaaggagaatgaaaaaaaaaggcaagcagcagataaaaggatagatcgaaacaatccatag

SEQ ID NO: 75731 - DNA, 648 bp, Saccharomyces pastorianus
atgagctgtaccaccgataagttaatacaaaagtacgacgcccttgttaggaaaaccacagaacataaattcgctaaggaactatgtgccggaacattgaaggaccgtagtttgtacatctatttatcacaagatctgcaattttttgaaactagcttaaggttgatatgtaagacgacttctttagcaccaactactcacgctttaataaccttagccaaaaagattggatttttttctaatgatgaaaactcatactttcatgactgcttagaattattggcaccatccctcaccaaggaagaaagagataattttgacaataaagcgatccccggcgttgatgcgtatattaatttcttagatgagctgagaaaggactcctcaattacatggccatccttagtaaccagcttatgggttgccgaggaactctattggagatgggctcgtgatactcctagagccccagggttgcattggaaatatcaaaaatggattgatttacatgatggtgagcattttcaaacttggtgtgaatttctaaaggctgaagttgacaagtttcccgtcgaagaagtggaaagcatatttgtgaaggtttcacagttcgagttcgaattttttgaatcttgttacaacgcctaa

SEQ ID NO: 75732 - DNA, 237 bp, Saccharomyces pastorianus
atgtcacagaacaacacaatcagctcaatgaatcctgaaagagcttacaacaatgtaacgctgaaaaatttaacagcatttcagttattatctcaaagagaaaacatatgcgagttattgaacttggtagaaagtacggaaagacacaatagtattatcaatcctgaaaggcaaaggatgagcttggaagaaatgaaaaaaatgctcgatgctttgaaaaatgaaaggaaaaagtag

SEQ ID NO: 75733 - DNA, 1479 bp, Saccharomyces pastorianus
atgtttcatgctttcaccttccttaaaggtggtagattttactcttcactaacagttaaatcattgtacgagcaggtacaccatactagccatgatcccatttcaattaatggatggatcaaatccataagactattaaaacgtatagcgtttttggatttacaagatgggacttctgtgaacccattaagaatagttattccactcacaaatactgatgaagtacagttcctaaaaattctgaaaactggtcaaactttatctatatctaatgctacctggcaaagcacccctaatagaaaacaaccttttgaattgcaaatcaaaaatcctgtcaagtcaattaaacttgtgggtcccgtttcagaaaactatccattacaaaagaaatatcaaaccttacgttatttaaggtccttacctacactaaaatacagaaccgcttacttaagtgcaattttacggttaagatcatttgtagaattccagttcatgctatatttccagaaaaaccacttcaccaaagtttcaccaccaatattaacttcaaacgattgtgaaggtgccggcgagttgtttcaagtctccaccaatacgtcgccaactgcatcctcgtactttgggaagccgacttatttgactgtgtccactcaattgcacttggaaattttagcgttatcactgtcaaggtgttggacgttatctccttgctttagagccgaaaagagtgatactccaagacacctttcggagttttggatgcttgaagtggaaatgtgctttgttaatagcgtcaacgagctaacatcgtttgttgagactacaataaaacacataattaaagcttgtatagataaccaacaagaactcttgccgaagcaatttatctcttcacaagaaaataatgcatcgtcagagctatcaataaatcaagagacacaacaaattaaaacacgatgggaagatttaataaatgaaaaatggcacaatataacgtataccaatgcaatagaaattctcaagaaacgccacaatgaagtttcacactttaagtatgaacctaaatggggacagcctttgcaaactgaacatgaaaaatttttagccggagagtattttaagtccccagttttcgttaccgactatccacgtctttgtaaaccattctacatgaaacaaaattccactcctgacgatactgttggatgctttgatctactggttcctggaatgggtgaaataattggtgggagtttaagggaagatgactatgacaagttatgtagagaaatgaaagcacgcgggatgaatagatctggagaattggactggtatgtttctctgagaaaagaaggaagtgcaccacacggaggctttggtctagggtttgagagatttatctcatacttatatggcaaccataatataaaggatgccatacccttttatagaacatctgcagaatccatcgatttttga

SEQ ID NO: 75734 - DNA, 123 bp, Saccharomyces pastorianus
atgactttaccaggtggtgttattttagttttcattttggtcggtttggcttgtattgccattattgctaccattatctacagaaaatggcaagctagacaaagaggattgcaaagattctaa

SEQ ID NO: 75735 - DNA, 411 bp, Saccharomyces pastorianus
atgtcgtcatttggacatcgagcatttttcagctgttgtcctttaccagaagaagaaactttgcattcaataaaattgcgcaaagaggcaacataccaacctcaatccgggtggccggttcgatggccgattcggtatccgcgcgcacttcccctagaatcccacgtgcacccataccatatgatcgttaaattaccgcacccacgcacccaaccgcggctgtttctatggctgtcgttgcattggacaggaattccttttttgggaaagccgggaataggtcgcaatcgggtaaaatcaaaacaattttcgcatttccaacagagtaaaatcaaaacaactatgagaaaaaaaacaacaaacagaaagcagaaagcagaaagatgtcaatatagacttgtcactgcgtaa

SEQ ID NO: 75736 - DNA, 630 bp, Saccharomyces pastorianus
atggaatacgccactatgtcttcttcgaactccacacataactttcagagaaagattgctcttataggagctagaaatgtcggcaaaaccacattaacggttcgcttcgtagaatcgcggttcgttgaatcctattatcccactattgaaaatgaatttaccaggataattccttataaaagtcatgactgtactctggaaattctagatactgcaggccaagatgaagtttctctattaaacattaaatcgttgacgggcgtacgaggcataatgctgtgctatagtataataaatcgtgctagctttgatcttattcccattctctgggacaagctggtagatcagctgggtaaggataacctcccggtaatacttgtgggtaccaaagctgatttgggaaggagtacaaaaggtgtaaaaaggtgtgtcacgaaagctgaaggagagaaactagcttcgacaattggcagtcaagataagaggaaccaggcagcatttatagaatgcagtgccgagttagattataatgttgaagaaacttttatgctccttttgaaacaaatggaacgtgtcgaaggaactctggggcttgatgccgaaaataataataaatgttctataatgtga

SEQ ID NO: 75737 - DNA, 2613 bp, Saccharomyces pastorianus
atgacggaacaaagaaccaaatatgcagatagcatattgactactaagagtccttacgaggctaccgaaactattagaatcaggttatcgcaggtcaaattgttgaataaagacttttacctgttatttaaggaattggcaaatctgaagaggaactatgctcagcaattgagaaaaataatagctgaaaatgaagatataacaaagatcttaaacgctcaaatgattgaaagtaatgttttgactccgcaggaaatgagtgcattcagattcaactcgctgggagagctaagaaatgtatgggatactgtaattgaagaactaaaatcagatttgaagtcaagtacagaatactacaacactttggaccagcaagtcgttcgtgaattgaaggaatccgtggagaacaatactagctggagagaaagcaaggacttacattccaagcttagtaaaaatgcagcttcaattgagcactatagtaagaataacgaaaactctagtcacttagaagaggcaagaaggcaatgggaccagcaaagcccctatttgtttgagctgttcgagactattgactataaccgtttggacactttaaaaaactgtatgcttagatttcaaaccagttttagcgattatttactaaatactaccaaagaatgcgaaacggtgatgacgaaattcctggcattcgaaccgcaaagtgaaattgatcgttttgccaaagatgccagtcaatacaacttccaactatcctcttcttccaaagaagtagttcctaataatgcttcgccagcttctgccactggtgcccgcccggtctctgtatccaatggtgccgctaatacggaaagagaaaagaaatccccgcaaaaggataagcgtaagagtgcatttggaaacattggacatcgtcttgcctctgcatcttccagtctcactcataatgatctcatgaataacgaatattcagactctactaataattcttccttgaaatcaaaaaagtcgtcccacaccctaagatctaaagtgggctcaattttcggtagaaataagaccaagaacaagagacaacaacaatcatcatcaaactctcatattcaggcatccatcactgagactccgaataattcttccaccagagtgtcttcaactgcaacttcttctatttatcagaagcaacgtcgacccacctattcatcatcaaaatcaaacaattggaccccgggtgaagctaatgacactcctcctcttcctccccatgctactcctaaaaacgtagatgcacctgttactgccgatacacctcctgcacaaacttttactccttctgaagtgcctccttcaacgccacaacaaagttctccacccactgcgaaagaaccagactcaagtaagttacccaagacagtaccgatatcaatttctcaacctccactccagccacaatcaaaaacaaaaccattaccagttgagcctgcctctcccagtatttcacttcctactgctacggttgataacgaaccttcaggtcaagttgattcaaggcccttgcatatccgcgcacctgctttaccaccctcaaggaaacaaaatttcattcataacagggattctcaactctatgactctttgcctaatcacggctcaggcgctacccctacttcttcttccttgtcctctattccccaggaacgtccagcttccacactctcctctcagattactggcgagctaagagaactaaatcctcaagccacgggctcttcaacatctttagttggtcaatcgttgtttcagcactcctctttagatacatctcaatttgggttgaatgctagtatcgcagaagtgctcaatgcttctttcaaagacggtatgttgcagaactcccaactgattggggaaattgccctcaactatttacccaattctgtcatgaattcgcctttacctatcggtattaatttgagaatcaataatggcgctaagttcgaaaaggtcattctgaaccaagcctttattgagcgtgttgctccagaagaattcaaagttaacccttcatttatcgattctagaaccttaggagctattaaatattccataaaggagccgatcgcgcctattgttattcatccggtctggagatttgaatctcaccaggcaagtgttgtattgactgtcaagatgtcaccaagcttacccgatgaaatatcacaaatcgtaatagaagacctcgttgtctttgtgaatatcgatggtgctaatgcaacaagcgctttatcaaaacctcagggctccttcagtaaagaaaagaagagaataacgtggagatttaaagaaccagttgttttgacaagaaatggtgaaggtcaaagattaatcgccagatttattacagacggcctggcacatgaatccgctaaaggcgtgattaccaaattcactatcagtgagacggataacgtggctctaccccatagcggagccggcagtggaatcaccttgacttgtcaggagctggatgaaaacaatccatttggtggtgagtggctcgatgtaaacacaaaaagaactttgaccactggtaactaccatggtctcgcttga

SEQ ID NO: 75738 - DNA, 1044 bp, Saccharomyces pastorianus
atgaattcactcgttactcaatatgctgctccgttgttcgagcgttatccccaacttcatgactatttaccaactttggagcgaccattttttaatatttcgttgtgggaacatttcgatgatgtcgtcactcgtgtaactaacggtagatttgttccaagcgaattccaattcattgcaggtgaattaccattaagcactttgccccctgtgctatacgccatcactgcctattacgttattatttttggtggcaggtttttgttaagtaagtcgaaaccatttaaattaaatggccttttccaattgcataatttggttttaacttcactttcattgacgcttttattgcttatggttgaacaattagtgccaattattgttcagcacgggttatacttcgctatctgtaatattggtgcttggactcaaccgctcgttacattatattacatgaattacattgtcaagtttattgaatttatagacacctttttcttggtgctaaaacataaaaaattgacatttttgcatacttatcaccatggcgctactgccttattatgttacacccaattgatgggcaccacatctatttcttgggtccctatttcattgaaccttggtgttcacgtggttatgtattggtactatttcttggctgccagaggcatcagggtctggtggaaggaatgggttaccagatttcaaattatccaatttgttttggatatcggtttcatatattttgctgtctaccaaaaagcagttcacttgtatttcccaattttgccacattgtggtgactgtgtgggttcaacaactgccacctttgcaggttgtgccattatttcttcatatttggtactatttatttcattttacattaacgtttataaacgtaaaggcaccaaaaccagtagagtggtaaagcgtgcccacggcggtgttgccgcaaaggttaatgagtatgttaacgttgacttgaaaaacgttcctactccatctccatcaccaaaacctcaacacagaagaaaaaggtaa

SEQ ID NO: 75739 - DNA, 333 bp, Saccharomyces pastorianus
atgctgaagtacgtggtgacggatattgggaagatgtgtttgtacatttggccttatagagtgtggtcgtggcggaggttgtttatctttcgagtactgaatgttgtcagtatagctatcctatttgaaaatccccatcgtcttgctcttgttcccaatgtttgtttatacactcatatggctatacccttatctacttgcctcttttgtttatctctatgtatttgtataaaatatgatattactcagactcaagcaaacattcaattcttagcatccttctttgttcttatcttaaccataaacgatcttgatgtgacttttgtaatttga

SEQ ID NO: 75740 - DNA, 4218 bp, Saccharomyces pastorianus
atgatgtccttttccaaaaacgccactcctagagccattgttagtgaatctagcactttgcatgagatgaagtttagaaattttagagttgcccatgaaaaaatctcgttggatatagatctagctactcactgcattaccggtagcgctactataataatcattccgttgatccaaaacctagaatatgtaacttttgattgcaaggaaatgactattaaagatgttctggtcgaaaatcgtcgatgtgatcaatttattcatgacgacccacttcaaacaaatttgaatggattgacttcacaaaatgtattatacagcgacaattccattgaacagtcacattttttgagatctaagtttgctagcttgaatgaatacccagaaacggactctaaatcccagttaactataaaaataccatcttccatcaaaatatctttggaggacgccaatgcattaagtaattacactccgattactccttcaattaagactacccctgggtttcaagaatctgttttcactccaattacattacaaattgaatatgaaatcagaaacccaaagtcgggtattaaattcgatactgtgtatgctgacaagccctggttatgcaacgtttacacttcaaatggtgagatttgtagttctgcatcatattgggtcccatgtgtcgatttgcttgatgaaaaatctacatgggagttagaattcagcgtaccgagattggttaaaaatataggtacttcgaaattaatcggacaaaatggagaagagagtgaaaaagagaaggaggatacgcctgagcacgatgaagaggaagaggggaagccggcaagagttatcaaagacgaagataaggattctaacttgaaaaatgacgaagaaggcaaaaatagtaaaagcaaagatgcacaagataatgatgaagaagaagaggaaggcgaaagtgacgaagaggaagaggaagaggaaaggcggaatattgaggaaagcaacaatccgaatttgagggatgtgattgtgtgttgttcagaatattcaaatattaaagaacttccgcacccgattgatttgacgaaaaaaaaatgcatatttcagataattaatcctgtggctccacatcacattggttgggctataggcgcctttaattcatggtctttacctttgatatcacctccaagtgttgatgccgaggacgaagtagaggaggacaagttgagagagaatgttgtggacaatgttaacgatactatggatgacgacattggttcggatattatacccattcaaattttcacacttccgacgcaggaaacagatgagttaacagttataaattcgacagttgtctgccaaaaaattatagatttctactcgaaagaatttgggtcttatcctttcacttgttactctatggtgtttttacctaccgcaccttctaagcatatggattttgcagcattaggcatttgtaataccagattattgtaccctctagaagttattgataaagcattcagtactacgaatgagttagcatgggcacttgctaaccaatggtcttgtgtgaatataactcctttagatatgaacgactactggtgctgtcttggtattgctggttatatggtgtttcaggtaaccaaaaaattaatgggtaataacacgtataaatatcaattaaagcgtaatagtgaggcgattgtggaacaagacttcgagaaaccgcctattgggagcacttttaccggcagttctaggccaatatcttggtcttctaaagatttgtcctttatacaattgaaggcaccgatgatactacacatacttgacagaaggatgactaaaacagaacgatctttcggtatgtctcgagtattacctaaaattttccttcaagctatgtctggtgatttacccaataattcgttgacttcatcgcattttcaacatgtttgcgaaagagttaataaaagtaaattagagaattttttcaacgaatgggtatatgggtctggggtacccatattacgtgtcacccaaagatttaataggaagaggatggttatagaactgggtataaggcaagttcaagatgaagaacttggcgacgaaaaagtggtaggggaggaaggatttttcaaaagtgcactagaccacttagaacatccagatttgaaccgaaccgaatgcttcacgggctcgatgactataaggatccatgaacacgatggtactccgtatgagcatattgtggaaatcaaagatacattcacaaaaatagatattcagtacaatacaaagtacagaagattaaggaaaagaggtggtggtgcaaatgatgaaaatggtgttgaaaacaataatgaggagaagcctattgttgtggatgtgaattgtctaggaaatgtatacatgtcgcccgaagagtgttcccgattcagtttgacggaatttaatcgtacgtctgagagtaatgaattgcttaagcaaaacgaagcatttgagtggatacgcatagactctgatctggaatggatttgccaaatgcacattaatcagccggattacatgttttcttctcagttgagacaagatggggacatagaggcccaactagaagccatacgatattatgaggacgtcgttgttaatggtggtgtgaaatcacttgtttattcaagtattttgtttagaacggcgatcgacgagcgttacttttttggcataagactcgcggcgtgcgaagcgcttagtaaatacgtatatgatccggattttactggcggtgttaagcatttaattcagatttttcagattttgttttgcctagaagactctaatattccaaagagtaataactttgagaatcctaagttgtatttcttacagtgtaatattcccaaatatttggctaaagtgaaaaatgaaaatggtaaatgtccaaaattggtgaagcaatttttactggatattcttgtttataatgagaatggtgaaaataaatacagtgatgatgcgtacgtccgcagcttgattgaaaatgttgttaaagttgctttaaatgagtataaagataaagcatatatggaaaaagttaagactcagttattgaggtacgaaaatttggtgaattggctttcatcatacgagtctttgattaagactactatcatgtatgctaagtacaaattgcataaagtgggtgcttatgactttacggaattgacaggaatgataatgcatacattaacattaggtataaataacggagatatttccagggaaagctttcagaatgagtttttaatggttttgaaaatcatgcttttagaaggtggtttaaaaaacaaggatgcccttgttttgtttactgaaatactttgcttccatgaggattcttacattagggataaaagtgttgatgtgctttctgaatgtgtaaatctagttgttatggatggtagtttggataccataagtgacgatattaagtcctccgtccaatctgtgcacaatgaagttaaaaatataaaaagtgaggatgatattgagttgtttttaagtggtcattacgtcgatgatatgaaaataaaaatagaaaagattggccgtcaaaatattagtgggttaatacaaatatgccgagatatgtttaaagggtatagccctttgaagatattactctgggatgttttgaatttacctgttcttagcttgtaccagaggaagcaaatacatgaccttgttagggtgatgtacaccctaatcaacagttttgtagttagattggaagcaccaagggagagaagacttgtggcgaagatgaatagtaatgaagaaggtaaacttgatattgttataaagcgtgaaagtatcctaaaagtacatattaaaaaggaagtaacctctactgtggaggcacccaagaaggcgaataagataaagataagtttgaaaggtgataaacctgttagaaaagtggaaaaacaaattgtgaagccgaaggtaactagcaaacaaaggaaagtcaaaagtcatgtgaaccgcatgggcagtttacctttacggtttgttaagatccaacaacaacctagagtaatggtgcatttgtcatccgtcccatatagccaattcgttcaaattacaaaagtcacatcaagatcgtttatggttaagataagaacaaagaaggatgctaagaattga

SEQ ID NO: 75741 - DNA, 384 bp, Saccharomyces pastorianus
atgatcccagctccacttgatgcttccttattgagagaacatgcattccaaggaactaatgatctaagcacagttttgagtccaagtacgtttaccgatgaaggtggatataaacctgtattgaaatacggactcggttatttcaattatggactggttatagacgatgaagtgtatgattattcagtgtgtgatatcataaggggtcacgtttacgatcatttttggtgttatttctgttgtttcatgattttgtttactatctggttaataagtttaaattggtgtcccagcagcaagaaaagcaagtttgattggagcaagaagaaggacgactttaagatggaaggaggtgatttagagtaccaacatgtaaagatctaa

SEQ ID NO: 75742 - DNA, 1074 bp, Saccharomyces pastorianus
atgaggttagctgtggttgtgaccctacttgttcactgtttcctagtgacatgctctccaggagataatttagatgagtttatagactgtacgtatgcgtgcgagtataacagaagatgtccgaattcccaaataaactacattgaccctgaaaccaacatgtttcatgatattgagtttttcgataccccgcctttgtactctaagttattgttctgggattgtatctcagattgtgattaccaatgtcagcacatcattacgcgctggagaattgacgaagaggaagaaatataccaattccatgggaaatggccatttttgagagtattggggactcaggaattcttctcgacgatattcagtataggtaactttattccacattataagggatttgtaaagttttctagaatcatacgcgaagagggagataggaggagaaaaaacagcagaagtatactgatttggaactacctttacgttactgtggcgggaatgttggcttggacagcaagctcggtctttcactgtcgtgatttgatcataacggagaagctagattactttttcgcaggtttaactgtcctaacagggtttcatgcaatatttgcaagaatgacttccatgttcctgtaccccaagatagcacaagctttcactgcgtcagttgcggcaatctttgccctgcacatcttgagactctatgttgactggtcgtacacatacaacatgagattcaacatttttttcggtgttttacagtatattttattgataatgttatcatgccaaaactaccatgctctgcaaaagcaaaagctaatgggcgaattcaagaaaaccgcgtactccagcttcaaggggcaaatcttcaaactgtgtgtcattccaattcttcttgtgattgtaaccacaatggccatgtcattggaactgtttgacttttttagttacgaatggcagattgatgcccatgcgctatggcatctgtgcacaatatggccctcgtgggtattgtacgactttttcctcgaggattatgcctatgggggtaatagacaattgtactaa

SEQ ID NO: 75743 - DNA, 1476 bp, Saccharomyces pastorianus
atgaagccacagtgcatactcatctctttgctggtcaacctcgcatacgcagaggagtatttggtgaggttcaaaaatcccacagcattccaacaattcacttcgaattccaacaggtcatggagacagttcatcgacaacaaaattgagaagaaattctccatcggatccttccgcggcgtgaccatgaacctgtccaagaacttagtgaacaagctgaagaaaagcccactggtggctgatattgtgcccaacttcaggttcgaagcttttgaaggcgacagtgtaaatagcgccgagtcgagttatacgtttaacgctaccgccaaatactcgtacgaagacgtcgaggaagagcaaaatataacgtatcaaccagacgcaccccgtcacttggcccggatttcccgccactaccaactcccattcgacgttggggacaaggaccgctacaaaagctggttcaattactactatgaacacgactatcaaggtcaagacgtcaacgcctatatcatggatacgggtatcttcgcggaccatccggaattcgaagacagagtcatccaggggattgacttgaccaaagaagggtttggcgaccagaatggccacggaacgcacgtggcgggactcgtaggttccaaaacgtatggagcggcaaagagggtcaatcttgtggaggtcaaagtcttgggcaaagacgggtctggcgaggccagtaacgttcttagtggtctggagttcatcgtggaacattgcacaaaggtcagtcgcccacagggtaaaaaatgcgtggccaatctaagtctagggagtttcaggagccccataatcaacatggcagtggagggggccattgaagaaggtattgtatttgttgccgcggcggggaacttcaatttagacgcctactgggcctcacctgcgtctgcagaaaacgttatcaccgtaggggcctttgatgaccacattgacacgattgccaagttcagcaattgggggccctgtgtaaacatctttgccccaggcgtggaaattgagtcgctatctcatctgaactacaacgacactttaattttgtcaggtacatctatgtcgacgcccattgtcaccggagttgcagcgatcctactctcgaagggaattgagcctgaaatgatagcacaggagattgagtatttgtccacgcgtaatgttttccatagaagaacgttgtttttcaagccttctacgccaaaccagattctttacaacggcgtcgataaactggacgatccatatgacgacgaaacgttccctcgattgaacatagaggcaattgctaaggaactggaggagtacaatgccactttacaaactcctatgtctgagaatcttcaatctggttcaaaactgtggggttggaataacgatgtcacactacctcttggtgagattcgattgaagaggcgtgattttatgaaaaatttgtag

SEQ ID NO: 75744 - DNA, 351 bp, Saccharomyces pastorianus
atggccccctccactgccatgttgattatggggctcctgaaactccctagacttagattggccacgcattttttaccctgtgggcgactgacctttgtgcaatgttccacgatgaactccagaccactaagaacgttactggcctcgccagacccgtctttgcccaagactttgacctccacaagattgaccctctttgccgctccatacgttttggaacctacgagtcccgccacgtgcgttccgtggccattctggtcgccaaacccttctttggtcaagtcaatcccctggatgactctgtcttcgaattccggatggtccgcgaagatacccgtatccatgatatag

SEQ ID NO: 75745 - DNA, 510 bp, Saccharomyces pastorianus
atgtggagcaggaacgtcagattgcttggatcatggacaaggtcctacatggtccccgccaccaagagaaaaaccatccccgtgtacccacctgtgcagcgcatagcttcgtcgcagattatgaaacaggtggccctctcagaaatagagtctctggatcccggggccgttaagaggaagctcatcagtaaaaagaacaaggaccgcttgaaggcaggcgacgtggtccggattgtgtacgactcgtccaagtgctcgtacgacacctttgttggctacatcctttccatagaccgcaaacaactggtgcaagacgcctcgttgctgttgcggaaccagatagccaagacggccgtcgagattagagtgccattgttttcgccgctggtcgagagaatcgacttgctaaccccccacgtctcgagcagacaaagaaacaaacactactacatcagaggtacaaggttggatgtcggcgacctggaggcaggtctaagaagaaagaaatag

SEQ ID NO: 75746 - DNA, 828 bp, Saccharomyces pastorianus
atgtcacgtcctgaggagttggcaccaccggagattttctacaatgatagcgaagcacacaagtacacgggttcgaccagagtgcagcatatccaggcgaagatgacgctgagggcgttggagcttttgaatctgcagccgtgcagtttcattctggatatcgggtgcgggtccggactgtctggggagattttgacacaggagggagaccatgtgtggtgtggtttggatatatcgcccagcatgcttgcgaccggtcttagtagagagctggagggcgacttgatgttgcaggatatgggcaccgggataccgttccgggcgggctcgtttgacgcggctattagtatcagtgcgatccaatggctgtgcaatgcggacacttcctacaacgatcctaaacagcggttgatgaggtttttcaacacattgtatgctgcactgaagaagggagggaaatttgtggcccagttctacccgaaaaacgacgaccaggtggacgacatactgcagtctgccaaggtggcagggttcagtggcgggcttgtggtggacgacccagagtctaaaaagaataagaagtactaccttgtgttgagcagtggggccccaccgcagggggaggagcaggtgaatttggacggtgtgaccatggacgaggagaacgtcaacttgaagaaacaactgcgccagcgcttgaagggaggcaaagacaaggagtctgccaagagtttcattctaagaaagaaggagctcatgaaaagacgtgggaggaaagttgcgaaggactccaagttcaccgggaggaaaagaagacacaggttctag

SEQ ID NO: 75747 - DNA, 207 bp, Saccharomyces pastorianus
atgctgggcgatatatccaaaccacaccacacatggtctccctcctgtgtcaaaatctccccagacagtccggacccgcacccgatatccagaatgaaactgcacggctgcagattcaaaagctccaacgccctcagcgtcatcttcgcctggatatgctgcactctggtcgaacccgtgtacttgtgtgcttcgctatcattgtag

SEQ ID NO: 75748 - DNA, 429 bp, Saccharomyces pastorianus
atggcgctgtccaggagcgtggggcgaggatcaaaactcacgtccccaaaaaaagacacatacttgctagcatcctttcggtggaacctcgaccgagacttgctcttcaggtgtgaaaggtacttttgcatgtgggcgtccacagggtactcctcctcctgctcctgcttccctgccacacgttccgcctcactcgactccactggctccaccagcgacgtggtagacgaccgtggagaaacctccatggactcctgtggcaggatcacgttatcgtacgtgaccgaatgccgtttgttgggctctgcggaattgagtctgcggatcttaagaaactcttcgtcttgcaacaaatccttagtctccgtcattcttgcaatctgttttggcgctcttgctgcaagccgtgctgaacaaccacctgcgtga

SEQ ID NO: 75749 - DNA, 1815 bp, Saccharomyces pastorianus
atgacggagactaaggatttgttgcaagacgaagagtttcttaagatccgcagactcaattccgcagagcccaacaaacggcattcggtcacgtacgataacgtgatcctgccacaggagtccatggaggtttctccacggtcgtctaccacgtcgctggtggagccagtggagtcgagtgaggcggaacgtgtggcagggaagcaggagcaggaggaggagtaccctgtggacgcccacatgcaaaagtacctttcacacctgaagagcaagtctcggtcgaggttccaccgaaaggatgctagcaagtatgtgtctttttttggggacgtgagttttgatcctcgccccacgctcctggacagcgccatcaatgtgcccttccagacgactttcaaaggtccggtgctggagaaacagctcaaaaatttacagttgacaaagaccaagaccaaggccacggtgaagactacggtgaagactacggagaaaacggacaaggcagatgcccccccaggagaaaaaccggagtcgaacttttcagggatctacgtgttcgcatggatgttcttgggctggattgccatcaggtgctgcacagattactatgcgtcgtacggcagtgcatggaataagctggaaatcgtgcagtacatgacaacggacttgttcacgatcgcaatgttggacttggcaatgttcctgtgcactttcttcgtggttttcgtgcactggctggtgaaaaagcggatcatcaactggaagtggactgggttcgttgcagtgagcatcttcgagttggctttcatccccgtgacgttccccatttacgtctactactttgatttcaactgggtcacgagaatcttcctgttcctgcactccgtggtgtttgttatgaagagccactcgtttgccttttacaacgggtatctttgggacataaagcaggaactcgagtactcttccaaacagttgcaaaaatacaaggaatctttgtccccagagacccgcgagattctgcaaaaaagttgcgacttttgccttttcgaattgaactaccagaccaaggataacgacttccccaacaacatcagttgcagcaatttcttcatgttctgtttgttccccgtcctcgtgtaccagatcaactacccaagaacgtcgcgcatcagatggaggtatgtgttggagaaggtgtgcgccatcattggcaccatcttcctcatgatggtcacggcacagttcttcatgcacccggtggccatgcgctgtatccagttccacaacacgcccaccttcggcggctggatccccgccacgcaagagtggttccacctgctcttcgacatgattccgggcttcactgttctgtacatgctcacgttttacatgatatgggacgctttattgaattgcgtggcggagttgaccaggtttgcggacagatatttctacggcgactggtggaattgcgtttcgtttgaagagtttagcagaatctggaacgtccccgttcacaaatttttactaagacacgtgtaccacagctccatgggcgcattgcatttgagcaagagccaagctacattattcacttttttcttgagtgccgtgttccacgaaatggccatgttcgccattttcagaagggttagaggatatctgttcatgttccaactgtcgcagtttgtgtggactgctttgagcaacaccaagtttctacgggcaagaccgcagttgtccaacgttgtcttttcgtttggtgtctgttcagggcccagtgtcattatgacgttgtacctgaccttatga

SEQ ID NO: 75750 - DNA, 309 bp, Saccharomyces pastorianus
atggcggcagttcataaggtcaggtacaacgtcataatgacactgggccctgaacagacaccaaacgaaaagacaacgttggacaactgcggtcttgcccgtagaaacttggtgttgctcaaagcagtccacacaaactgcgacagttggaacatgaacagatatcctctaacccttctgaaaatggcgaacatggccatttcgtggaacacggcactcaagaaaaaagtgaataatgtagcttggctcttgctcaaatgcaatgcgcccatggagctgtggtacacgtgtcttagtaaaaatttgtga

SEQ ID NO: 75751 - DNA, 669 bp, Saccharomyces pastorianus
atgaacgctaatatatgggtggctgcttcagatggtaatttggaccgagtggaacatatcctccgcgagagtaacggcgccatgaccccgcaatccaaggacattaacggctacactccaatgcatgctgccgccgcatacggccacctggatttgctgaagaaaatgtgcaatgagtacaatggagacattaatgtgttggacaacgacggcgataccccgttgcaccatgtggaggatgtggccactgccaggttgatcgtggaagagctgggtggagacttcactatcaggaatgcggagggccaaacgccatacgactcgttcgtcgagaacggtgaagatggtgagctaatcgagtacatgaggattaagtccggcgtggccgaagttcacggagtggacggcgtgcagggtgagggtgtcatcgacagcaaattgctggaagagttcaaggacaacgtgagatacaccttggaaaatgaccctgaggaaggagccgacgaggccactctgcaacgcaggaggcagttggaacagatcattacgggagacaacgctgaggaggagttggaaaggtacatccgtgccatggtcagagagcagatgctgggccagggctccatggcgggttccggggacgaaccagattccaagagaagaaaataa

SEQ ID NO: 75752 - DNA, 1452 bp, Saccharomyces pastorianus
atggtaacacaaaccaatccggtccctgttacatacccaacggatgcttatatccccacgtatctgcccgatgataaggtctccaatctggcagatttgaaaaaattgatagaaatggattccagactagatttgtatctgacaagaaggaggctggatacgtccatcaatttacctacaaacaccaagaccaaggaccatccccccaataaagagatgctgaggatttacgtctacaacactacggaaagcagccctcgcagcgattctggcaccccagcggactcaggcaagactacatggacactgagaatagaaggtaagcttctgcacgagtctgcagacgggaaacacccatttagtgagtttttggaaggtgtcgcggtcgactttaaaagactgaaaccgctgggcatgggcaagaagaggaaacgcgattcgtcattgagccttcctttgaatctgcaacaacccgaatacaatgatcaagatatcaccatgggcgataacgataacggcgaggatgaggacagtgcagaggcagaatccagggaggaaattgtagacgcactggaatggaactacgatgaaaacaacgttgtggagtttgatggtatcgacatcaagaggcaaggcaaggataatttgcgatgcagtataaccatccagttgaggggtgtcgacggtggaaaagtacagtactcgcccaacttagctaccttgataggtatgcaaacgggctccgttaatgacgcggtttattcgatctacaagtacattttgatcaacaatctgtttgttacggaacaaacagaggctcaagatggttccaacgatgccgaagacagcagtaatgagaataacaataaaaacggtgctggtgacgatgatggcgtcgagggaagtactccaaaggataagcccgaattgggtgaagtgaaactagattcactcttacaaaaggtattggatacaaacgctgcgcacctccccttgatgaatgttgtgcaaaccgtgaacaaactggtatcacccctaccgcccatcaccctagattatacaattgatctttccaaagataccccctatggtgctaccaccttggatgtagatgtgtcgcacattctccaccagcctcaaccccagccaaatttacaaaaagaggaagaaacagatgctgaagacacagcaaaactacgtgaaatcacaaagcttgccttgcagttgaactctagtgctcaaaaataccagtttttccacgaattgtctttgcatccaagagaaacgctgactcactacttatggtcttccaagcaaaacgagcttgtgctgcagggcgaccaatacttcaatgaagatgctgcaagaacgagtgacatatacagtaacaacaacaatgacaggtctctaatgggcaatatctcactactctactcccaaggaagactataa

SEQ ID NO: 75753 - DNA, 1545 bp, Saccharomyces pastorianus
atgcctaacgcttcccaagtttacagatctaccagatccagctctccaaagaccatctcttttgaagaggctatcattcaaggtctggccactgacggtggtcttttcattccatcaactattccacaagtggaccaagccactcttttcaatgattggtcaaagctctccttccaagacttagcctttgctatcatgagattatacattgcccaagaagagattccagatgctgatctaaaggacttgatcaagagatcttattctactttccgttctgatgaagtcacccccttggtgcaaaacgtcactggtgacaaggagaatttgcacattttagaattattccacggtcctacctacgctttcaaagacgttgctttacaatttgttggtaatctttttgaatacttcttacaaagaaccaacgccaatttacctgaaggcgagaaaaagcaaatcactgtggtcggtgctacttccggtgacactggttctgcagccatctacggtttaagaggcaaaaaggacgtttccgttttcatcttatatccaaccggtagaatttctccaattcaagaagaacaaatgaccaccgttccagatgaaaacgtccagactttgtctgttaccggtactttcgacaactgtcaagatatcgtcaaagctattttcggtgacaaagaattcaactctaaacacaacgtcggtgctgttaactccatcaactgggcaagaatcttggctcaaatgacctactacttttattccttcttccaagccaccaacggtaaggactccaagaaggtcaagttcgttgtgccaagtgggaacttcggtgatatattggccggttattttgccaagaaaatgggtttgcctattgaaaaactggccatcgctaccaatgaaaacgacattttggacagatttttgaaatctggtctatacgaaagatcagacaaggttgctgctactttatccccagcaatggatatcttaatctcttctaactttgaaagactactatggtacctagctcgtgaatacctagctaatggtgatgatttgaaagccggtgaaatcgtcaacaattggttccaggaattgaagaccaacggtaagttccaagttgacaaatccatcattgaaggcgcatcaaaggactttacatcagaaagagtttccaatgaagaaacatctgaaacaatcaagaagatctacgaatcatctgtaaatccaaaacattacatcttagatcctcacacagctgtcggtgtttgcgccacagaaagattgattgcaaaagataatgacaagtccatccaatacatttctctatctaccgctcacccagctaaatttgccgatgctgtaaacaatgcattgtctggattttccaattattcatttgaaaaggatgttttgcctgaggaattgaagaaactatccacattaaagaagaaattaaaattcatcgaaagagctgacgttgaattggtcaaaaacgctattgaagaagaacttgctaaaatgaaattataa

SEQ ID NO: 75754 - DNA, 1692 bp, Saccharomyces pastorianus
atgcctatgaacaattttctagatgaattcaatttatttgattcaatcattaccatgatgaagaacgacccatgttgcgtcgaggattatgagccaatcgtcgaaaacctgaaccgtatatttcaaaggacgtttaatgatgaagaacataggaaatcaatggctaactcccagcttttttgggaacgattaagagacaccttggaagcaatgctgttgccagcgtcgttaaatgagaatagctcaataccgtatacaagaacagtgaggggccttatcttaatgatgagaaaccttgccgctgaaaaccaggaaataccccaaaagcttttactacaaaacctcgtaattcgtggttttctgcatgcaactagtgagtatgtcgttgacactccgctaatcaaacatctatacatcgcatgtttaacgtgccttttcaatatacagcagaactactctacagtggatatgactacttttccagctcttttacaatttcttcaatacccttatgggatcaaattggaagacggtgaagaagaagagcatttctggctaccatatttatttcttttcaagacgtatctcaacaatgatgaattttccaacgaatttttcagggataatgatacaccccagaaagactattattgtgttagggatagaatatttttcgatatagtgacagccaaattcatccaggatcaagagaattcctttttaattgagaagggcagaaactatctggatgattcaaaattggaaataacttctattgacctatctgtcttagaatgtattagcaaaagtcttataactgcttcttttggtaaatacctcaatgggttagaagaaagacagccaggaaaattcaccactttgttgcagatattgcaattggttgtaacgagtaaagaagattggaatacctatgagttgactgcaattatgtcatggtgctaccccattctgcaacgtcttgcatgcaaggatattcctgcctttttcaataaaagttgtaacgattatgctccttcagttgccatccaattacactccactttactttcttgcctggacataatttctgacttgtgcaaattcaatcatgttagaaaattcttaatttcgtatgactctgtgaaaatattggtatctctcttggatactttccaaaagaatttgttgaggattaattttttgaaaggaaacggtgatacggtgaatgaaattaaaatcacagatcatgaaggtaacaaaatcgaggaccggttattaattttcaaccgtgttaataccaacgaatcctttattagggctgataattttccccattgtaaattagtaataatcgaaatattggcatcgttagtgtatgcacatcctgaaatccaagatcaaataagagaattaggtggtcttgcattaattctttccaattgtgtcatcgatgataatgatccgtttatcaaggaaagatctattgtttgcttgaagtttttgttaaagaataatgccaagaatcaggaatatgtcaaaaaaatggaagctcaagacgttgttcaagacgatgcattgagcaaagctgggtttgaaatatcagttgaaaagggcgggaaagttagattagtatctaaagaagaagaccctgggaacgagaattctgagattattagcatagatgaagattaa

SEQ ID NO: 75755 - DNA, 2772 bp, Saccharomyces pastorianus
atgaaatccgatttcaagttctctaaccttttaggtacggtctacaggcaaggtaacatcaccttttccgatgatggcaagcaactactctcaccggtggggaatagggtcagcgtgtttgacttaatcaacaacaaatcgttcacgtttgaatacgagcatcgcaaaaatattgctgccattgatctgaacaaacaaggcacattgctgatttctattgacgaggacggtcgcgccatccttgtcaatttcaaagcccgtaacgtgcttcaccatttcaacttcaaagaaaaatgctccgctgtgaagttcagccctgatgggagactctttgcattagcctcaggcaggtttttacagatttggaagactccagatgttaataaagacagacagtttgctcccttcgtccgccatagggtgcatgcgggacactttcaagacataacgtctttgacgtggtcacaagattccagatttatccttacgacttccaaagacttaagcgcaaaaatatggtccgtagattcagaggaaaagaaccttgcggcgacaacatttaatgggcacagagactacgttatgggtgcgttcttcagtcatgatcaggaaaaaatctacactgtaagcaaagacggtgctgtctttgtctgggaatttaccaagaggccatccgatgacgacgaaaatgaaagtgaagacgaagacaagcaagaagaagtagatatttcgaaatacagctggagaatcacaaagaaacattttttttacgcaaaccaagccaaagtaaagtgtgtcaccttccatccagcaacaaggcttttagctgtcggatttactagtggggaattccgtctttacgatttgcctgatttcactttgattcaacagctttctatggggcaaaacccagtcaacaccgttagcgtcaaccaaaccggcgaatggctggcgtttggttccagcaaactgggccaattactagtttacgaatggcaatcggaatcgtatatcttgaagcagcagggccatttcgattccacaaatagtcttgcatactctccggatggttcacgtgtagtgacagcatccgaagatgggaaaatcaaagtttgggacattacatcagggttttgtttggccacttttgaagaacacacctcttcagttactgctgtacagtttgcgaaaaggggtcaggtcatgttctcatcatcgttagatggtacggtgagagcgtgggacttaatcaggtatcgtaattttagaacattcactggtactgaaagaatccaattcaattgtttagcggtggatccatcaggtgaagtggtttgtgccgggtccctggacaattttgacattcatgtttggtccgtgcaaactggtcaattattagatgctttgtccggacatgaaggccctgtttcgtgtctttcatttagtcaagagaacagtgtcttagcttctgcatcatgggataaaacaattagaatctggtccatatttggtagaagccaacaagtagaacctatagaagtttattccgatgttttagccttatcaatgagaccagatggtaaagaagttgcagtatctaccttaaagggtcaaatatccattttcaacatagaagatgccaagcaggtgggcaacattgactgtagaaaggatataatatctggtaggtttaatcaagataggttcactgccaaaaattctgaacgatccaaattttttactacaatacattacagttttgatggtatggctattgtggctggtggtaataataactccatttgtctatatgatgttccaaatgaagtcttgttaaaaagattcattgtgtccagaaacatggctttgaatggtactctcgaatttttaaacagtaagaaaatgactgaagcaggttcattagatttgattgacgatgcaggcgaaaattcagatttggaggatcgtattgataattctttaccagggtctcaaagaggtggcgacctgtccacaagaaaaatgagaccagaggttagagttacttcggtgcaattctccccaacggcgaatgcatttgccgctgcttcaacggaaggtttattgatatattccaccaatgacacgatattatttgatccctttgatctggatgtggacgtcaccccccattctactgtagaggcgctacgagaaaagcagtttttaaatgcattagtaatggcgttcaggttaaatgaagaatatttgatcaataaagtctatgaagccatacctattaaggaaatccccttggttgcaagtaatattcctgcaatatatttaccgaggattctgaagttcatcggtgattttgccattgaatcccaacacattgagtttaacctaatttggatcaaagctctattatctgcgagcggtggttacataaatgaacacaaatatctcttctcgacggctatgaggtcgatacaaagatttattgttagagtggctaaggaagtagtcaataccactactgataacaaatacacctatagatttttggtatcaactgatgggtccatggaagatggcgcggctgatgatgacgaggttctattaaaagatgacgcagatgaagataacgaagagaacgaagagaacgatgtagtcatggaatctgacgacgaggaaggatggattggtttcaatgggaaggataacaaattacccttgtctaatgaaaatgattccagtgatgaagaagaaaatgagaaagagcttccttga

SEQ ID NO: 75756 - DNA, 777 bp, Saccharomyces pastorianus
atggatgacgatcacgaacagttggtcgaagaactggaggccgtcgaggccatctatccggatcttctctccaagaagcaggaagacggaagcatcatcgttgtgaaagtgccgcagcatgaatacatgacactgcagatctccttcccgacacactacccctccgaggaggctcctaatgtcatcgaagttagtgtctgcacttctttggctaagcgcgacctctacgataccaagtaccttcagcatttgttccaggaagtgatggactctgttttccaccgcggatctgtctgtctatttgacttcctcacagaactcgacggtgtcttgtacgttgaaccagaggaggagacagaaccggtccagcagagtgacattcccacagaccccttcgagggctggaccgcgtcggaccccattactgatagaggctcgactttcatggcctttgcagcacatgttacctccgaggaacaagcgtttgtcatgctagacctactgaagaccgactccaagatgcgtaaggcaaaccatgtcatgagtgcatggcgaatcaagcaggatggctctgcggcaacatatcaagattccgatgatgacggtgaaacggccgccggctccagaatgctgcacctcatcaccatcatggatgtgtggaacgtcatcgttgtggtggcccgttggttcggcggtgcccacataggtcccgaccggtttaaacacatcaattctacggcaagagaagctgttgtcagggccggcttcgactcgtaa

SEQ ID NO: 75757 - DNA, 336 bp, Saccharomyces pastorianus
atgagccaatttgaaaagcagaaggaacagggcaattctttgttcaaacagggcctgtatcgcgaggctgtgcactgttatgaccaactaattactgctcaaccgcagaacccggtcgggtacagcaacaaagccatggcgctgatcaaactgggtgaatatacacaggctattcaaatgtgccagcaaggactgcggtacacctcaacggcagagcatgtagctatcagatccaaattgcaatatcgtctagagctggcacagggagcggtaggttcagtacagatccctgttgtagaggttgatgaactaccggagggatacgaccggtcctga

SEQ ID NO: 75758 - DNA, 1896 bp, Saccharomyces pastorianus
atggtgcgttttgtttcaattttaagtttattcggctgcgcggcgacgcttgtcacggcccatgatgacatggacatggacatggatatggacatggatatggacatgaatatcgatacgacaacgtctcaatccatagatgtctcatccacggcttcaatcgtccccgtgccacatgaaccaaaacatttgcatggccttcctatactgcaatcgccctcgcttacccctgcggagagattgtactgggaaaactacaacaccacaacctactttactacacaggctgggaataggtctgcccttcgctaccacattattacgctgctcttggttgcatttgtgctctaccctgtgtccctggcgctaagcgccgcccgttctaggtggtacttacccctgctgtttgttaatctatgcatttgtatttcgtccgtaatggcattgtccgtgttcaaaaatactttcccggaagaagactggtatgcgcataatatctatggcaccacttctgtgctacttctcgtttttatgcttgttcacttcttcgctgcggtgctttctgtccccgtctcattagcatcgaaaaaggagtaccgtccggttgacaccatccctctgaatgatcttgaatctacgcccgtcatggtgaataatgcacgtggctctccaagtccttcttccaacagagacacgttgttctcgctctcttcagacaccacgaccgccacggccaccaataataataaacggagacgcgctgaaggcgaagacgagggtgataacacctccaaccacgacactttgcgcgacgaagactacgataatgatgacgacgaaattgcttccattgaagcgccacctctgcttcctcaagacatacccgttttccgaatcttgtttaccaacacgaagtaccagatgcttgccgcgcacctctcgtgcgtcgccaacgtggtctttcacatgcttacctacccgctattcatgtacatctttgtagacctaatcatcggcttcgctgtaggtaacttgctcggcaagggcatccgcatctttaatctcttggcccactggattaagggcggcgtattttttactctgggcgttgtctctttagcaagatactgcggtttcgcagctaagtacggctgggcatggaacaacatcagcttcacctctcaactcacacaaacgcgttcctccaatcttcttttccggtttgctcctgcggggactttcaccatggaattcgttgaatccttcctcattttcttttacgggtccaccaacatcttcttggagcacctggcaggaaacggcggcgcatggactgccaaggatttacagcatgtgtcgatcgcgtttatgttcataggaaccggattgtgcgggctactcacggagtacaagctcaaccattggcgattcgagcatgcccgcaaacggccacagaccgatgtagttgctgccacaccggggtactctccaaacccgttccccgctttcaccatattttggactgggactctgatgtcccagcacgcacagtcctcgcaattttctactaccattcacacgcaatggggatacttgttgtcctatgggtccttcttccgtctgctaacatttttgattctgtttttggtgcccaacaccaacagtgccgcatccaagcctttcacggagttgatcacctcgttctgtctcctctgtggtggtctggtatttatggagtccacggatcagtccattgaagccatggaatatagggggtttacccccatgttcactttcaacctcagtgttggattcgtttctttgttgatggcttgggaaatgattttatttatttggaaagactggctcatcaaaaccaggaaaaccagtctttaa

SEQ ID NO: 75759 - DNA, 411 bp, Saccharomyces pastorianus
atgtatctagagcgctggtggtggagttgcattatctcccagagctgctcattgaactttgctgcgagcttagacgacttgtccttttgggcatctctgagttggatttcgaaatctgtgagggttggcttgattttttcgaacccgtcaggtgcaggcttggatcttctggtctttatgcgcggcatgtcgttttgtgaggtgagctttgctagtcttgacggctgtagaggtgtttacattgatgatgagtccctaagaaaatttttctttttttttcagtatttcactttccgttgtgaacgacaaatgtactatgcgttcaagagccaacgcagtatcatcgtcaaagttcctaccacaacgcgtgtaattaatcttgtactggttgtaaatgtgctaagtctgtga

SEQ ID NO: 75760 - DNA, 474 bp, Saccharomyces pastorianus
atgccgcgcataaagaccagaagatccaagcctgcacctgacgggttcgaaaaaatcaagccaaccctcacagatttcgaaatccaactcagagatgcccaaaaggacaagtcgtctaagctcgcagcaaagttcaatgagcagctctgggagataatgcaactccaccaccagcgctctagatacatatatactctgtactacaagagaaaggccatctccaaagacctttacgattggttgataaaggaaaagtatgctgataaattgctaattgccaaatggcgcaaaaccgggtatgaaaaactgtgctgtctgcgctgcattcaaaagaacgaaactaacaacggtagcacttgcatctgcagggtgcctcgtgcacagttagaggaagaagcacgcaaaaagggcacacaggtgtccttccatcagtgcgtccactgcggctgccgtggatgtgcaagcacagactaa

SEQ ID NO: 75761 - DNA, 1695 bp, Saccharomyces pastorianus
atgatgaatgaagacatatccatcattgatggccataatagttttttaacggaaaaaagcaccgtgctattaacccaagccaagagaacactagaagacgaaaaggaaatgattactcccccgagctcaactgtgagaaaaacaatgaaggaagtaaataagaggccgtcgcatcccctctcaccggatcactcgtccccaattgctccatctaaggccaagcgccaaagatcggacacatgcgctcggtccaatggtaacctaaccttggaagaaattcttcaatctttggaaagaagaagaataaatggtgaactcgccaagaaacctccatattcgtatgcaactttgatttgcttggccattttgcaatctcaggagggaaagctaacgctatcccagatatatcattggatccacgttcacttcccttattacaagcagaaagatgctagttggcaaaattcaataagacataacttgtctttaaatgatgcgttcatcaagactgaaaagtcctgcgatggtaagggtcatttctgggaggtcagaccgggtgccgaaacaaaatttttcaaaggtgaaaatcgtggttatgaatttgtaaaggactccttacaagacattgggaagtattttgaaatagattctacacttgatgaattagaacaagttgagagtggagaaggcaatgatgatcttcctgacgaggaagaaagagaggaagcagggaaattcccttccattgaaattcaattgaactcctcccctatactgagagtttcccagttacatcacataccgcaattgaaaacagacaacagtgtactgaaccctcacgaaaacctagaatcgatgcggaacatgatagaaaacgatgtcaacaatatagattccttggaacctccttatgtcatgaagaaatatcatacttctttaggcttaccgtcgctggtggatgccaaagatcatttccaggcgggtgtgaaaaacaataatatcacccaggcaaatagatttaatacactccctataactagcgcaaagtctcctcagaatttcagaaaatatttcacctcattcaattcaaattttgaagatttatctccacttcgaagtaatgtaggggctggttctctactcgacccacttccgtattccccattgaagctgtacgatcagaaaaatcttgcgctcatgtcgaaaccacaatctcagcaatcatattccaattctcaacttccacctccaccttcctctcatggttcggacttacttaaaacacccaagatgaggcattccgatggcttagagaaaacgccatcgcggttgataagcacacctaaggacggtaactcgattttgaggaaatggcagactccttcacacctttttgaagatttgtactgttctccgctatttagagctatagagactccaatcaggtatatcacgacgccggggggcactttggaaacccaaatttcaccaagaaagtcctctgcacccgatgtcctcacaagcgcaacgaattccaaatttgcttcaagcgggctgtttggcgtggatgtttattctgtttggaagcgcgcaactgaaaagatttctgatggtaacaatactacggatagcaatcaaaaacatcatccttatcataatcacccttccaacgatagcggtaatgaaaagaattga

SEQ ID NO: 75762 - DNA, 1464 bp, Saccharomyces pastorianus
atggaccaccaaataaccactgcaagcgacttcacgactacttcaataccgagcctgtaccaattggatacacttttgagatgtcacatttgtaaagattttctaaaagtccccgtcttaacaccttgtggccatacattttgttccctttgtattagaacacatttgaataaccaaccaaattgtcctctctgccttttcgagttcagagagtccttgctgagaagtgagttcctggtcagtgaaataattcaaagttatacatccctacgatcttccttactagatgcactaaggataccgaagcctacccctgtccctgagaatgaggaagtaccaggtcctgaaaattcttcattgatagaactcatatcagagtctgaaagtgacagtgtaaatgccgctgatgatgacttgcaaattgttgcaacaagtgaaagaaaacttgccaaaagatccatgactgatatattaccactgagttccaaaccatccaaaaggaattttgcaatgttcagaagtgaacgtatcaagaaaaaatcaaagccaaatgaacaaatggcccagtgccccatatgtcaacaattttatcctcttaaagcccttgaaaaaacacatttggatgaatgcctaactttacaatcactaggcaaaaaaccaaaaatttctaccactttccctacagagtcaaatccacataacaaaagttcatccagattcaaggtacgaactccagaagtcgacaaaagctcatgtggtgagacctcacatgtggataagtatttaaactcaatgatgagtgcagaacaccaaagattgccgaagatcaattttacgtctatgactcaatcccaaataaaacaaaaactgtcatcgttgggactgtcaactaatggtactaggcaaaacatgattaaaagatacaatcactacgaaatgctttggaattctaatttttgtgattctctagaacctgttgatgaagctgaactaaaaagacagttgttaagctgggatgtttcacacaataaaaccccccaaaatagtagcaacaagggtggaatttctaaattaatgataatgaagagtaatgggaaatcttcttcatataggaaattacttgaaaatttcaaaaacgataaatttaataggaaaggatggatggttatgtttcggaaggattttgctaggcttatcagggaagcaaaaatgaaaataaaaacaggttcatcggacagttcaggttcagtgggacattctaatgatggagatggtgttgaaaaagttcaaagtgaccagggaaccgaggatcagcaaatggagaaggatcaggacactgttatcaacgaagatagagttgctggtgaaagaaatttgcctaacgaagattcaactgatgctgactcatcaagagaattaatggacttgaatgaatatagtaaagacccacccggtaacaattaa

SEQ ID NO: 75763 - DNA, 3165 bp, Saccharomyces pastorianus
atgagtggcaactctgcaaactatgacgtcggatatccgatatatggtgctaaatttataaatgaaggcactctactggtggctggtggtggaggccagttcaattcctcgtttccaaacaaaattacagctttaaaggtgaacttccagaaaaagaaacacattagaaggtttcgtgagatcacattagattcgattgacgatgcgcccacttcattggattgtaataataacctgattctagttggttgcaatgaactgtttaatgattcctccatggagaacgttaaccaccacttgaggaagtttgtgtttgaacaagaacatctaaaattcgtggccagtattgatttcaacagaactacagacccatccgttttcactaagtttgtttacattaatcaaagggccacagtagctgcaattgcgtcctctgaagtgcccactgtgataagaatcattgacccgcgtaatttgacggaaaattacgaaattgaaacgggtagggaagttaatgatttgcacttcgcccctaacggtattcttttgtcatatatcacttctaattctttggaagtagcgtctgttagggacggaaattttgtagcaaggaaaacggattttgataaaaatcttgttctttctaatatcagatttctcaatgacaatacgctattggtggctgcatcattatcgaactctgatggagtttccttgttaaaactaggtgtgagttccaaaggtgttaaaattttaaaaactgcatccttcatgttcgatttgaatggaataacatcgatggatgtctccccaaataagaagttcgttgcattatcatctaacgataactcggttgccatcgtcagcgttgaaaagctaaagcttgttcagttggttccaagagtacatgaatctactataacaaaagttactttttctccagattctagatatttggcaagcacttctatggggaacacgatcaacgttctgaagctttccggtacatcgtcatcaattttacgaaatatttggaaatttttcttgaattttgttttgttagtggttttggctggcgctattcaactaggctacaaacataatgtgcacggctttatttacaaacatgctcatgatatatataagtcgaaattcaaggaaaacattaccatagaccaaggatcttcttcttatttcactattaatgacgattacagaggcattactgaaagtgcagatatcatcagcgctacagatgttgctagcgatatagagactgaattttcctcatttgacactagcactatgagaaccaccacagaagatgagcaaaaatttgtttggatatcgtcatcagctgattcacaattcacttctgcagatatcccaacatcagcttcttcttcttcttcttcttcttcttctttctatgaagagagtgtcactaatgaaccaattgtgtcttcacctacctctgaaattacgaagccgctagcctctcctacagaaccgaatattgtcgaaaaaccatcgcttccactgaattcagagtcgatagatttgttatcctcatcttcaaattctatcacagaatatcctgagccgactcctgacttggaggagaaattgtcctcgttaatagtagaacaatcagaaagcgaaataacaacagatagagaaagcgtttcaaaactcttaagtactgaatcaccttcgctatcacacatgccgtcttcatcttcatcttcattatctctttcctcatcgtcaacaactagccctactacagcattatccacaagtaccgcgactgcggttaccaccacacaaacaaaccccaccaatgatgcagccaacacatcttttctagacaactcaaaaccggcatccacgagagagatttataagacaaaaataatcactgaagtcattacaaaaattgagtataggaatatacctgcatcagattccaatgcagaagccgagcagtatgttacaacatcttcttcaatgttgttgacgcccacagacactatggtttcttcgcccgtctccgaaattgatcccatagcatcagaattagagcgtatggttgaaacacctacgcattctatttctatagcatccgaatttgactcagttgcgtctaatttgatcccaaatgaagaaattttgtcaacatcagcatcccaggactctatttcctcgcatccgagtacattttctgattcatctataacctctggcttccagtcaatagaagtatcgactgtaacttcttctgttcttgcttctgaatcaatcccttcaatctcagattccactttttctaaatttcattccatctctgaacctgtttcatcagctattgtggagacggcaactagctcattctcaaaaacagaaacgaagacttcgagagtaattgctttctctaccgaggattcagaacgctccagtgccttgattgataattcggaatacaccagtgtgttggctgacaatttggaacccactagtgttttggctgacagttcggaacccactagtgttttcactgatgctgtacaatcacctaagacgagtgttggtcaatcttccctatcagaatccacaaatattgaagggacttctatggcatctatgatctttagtagtagtggtgcttcaattggcgctctgtctgatataggcaagggaactttatccgtggagagcgcgtcaagcacagtagctcagccgatgccaggtgtaaccacaacagcaccatcttttgtaagtagccctcacaaaatatctgctagttcaattgatgcatcaggatttgtacagaaagaaataatgatagaagtacagtcatcaaaagattcatctgaagcgtttggggtacgccacaaaatcagcgaaaatgtaaatactcctgtttcccgaatgcttacgacggaaatgcaggcatctggtacggtagatgttaccgaagacgtctctctatctagtgaagttatttcagcacttaacgtggagatcacttctttgcctaatccagtggcccctccgcaaacaattgcagcacctttgaataataattcgaatacaaacattgtcaacgatgataatgcagtagcaggaaccgtaaactacgctggccttcatgacgaattgtga

SEQ ID NO: 75764 - DNA, 1563 bp, Saccharomyces pastorianus
atgttgcataaaagcccttcaagaaagagatttgcttctcctttgcatctaggatgcattctaacgcttacagtgctctgccttattgcttactactttgctttaccagattatttatcggtagggaagagctcatccaggggtgccatggatcaaaaatctgatggaacctttagacttaagtctatctacaggcatggcgtcggagcaaaccatcggctacaccagaggctggaggtcactccagaagttatttctgccgctggaatgctgtatcaagaaaccacaactcaaggacaggatttcgaagaccaagaacccctatggactactaatgccgaatatgccaccactaacccattcgattttgagtttgagctacgaaggatgccgctaatgatgaagcggatgaaggaaagagatcctgaatttatagagtcgtacatttacggagaaacatacatgacggaggaggaagaacacgccatgtggatagatgatgacattgtggcacccaacatcacagatagaggtacagtagtgtcgttagcattaatgtcgtctaatgcttacgtgagaataccgcaaacgggagactggcgtaacgtcacggagccgtggaatgaaacagagccggaagattttggttgggatggtgatggtatacgtggtcacgtcttttacaatgaagtggagaatatcgtggtactctcgataaagggaaccagcgctcagggtttgccaggatctggcgaagatgagacaactggaaacgacaagatcaacgataatttgttattttcgtgttgttgtgcaagagtgagctacctgtggactactgtgtgcgattgctatgtgaagtcgtatacatgcgatgagtcttgcctggaaaaggaactgagacgtaaggatagattttactctgcagtcgttgacatatacaaaggcgtcctcaaagaataccccgatgcggccatatgggtcacaggccactcactgggaggcgcattggccagtttactgggccgcacttttggattgcctgcggtcgcattcgagtcccctggagagctactaccttcaaaaagacttcacttaccattcccaccgggacttccctcatacatggagggtatttggcactttggtcacaacgcagacccaatcttcatgggtacatgcaacggagctagttcaagttgctcactggtgggctacgctatggaaaccgcgtgccacactggtagagtctgtgtctacgatgtggtcaacgacaagggctggagtgtaaacatgttcaaccacagaatccacaaagtcattgacgaagttctccttggatacgagcgggctgccaagtgcgttgaaccagagccctgcgtagattgctacaactggaagtttattccaagcagagactgggaatcctcatcgaggctcattaccaagactaaaagccacgccgcaccaaccacgacgactcgcaccactgctactactacctcttcatctacctgtgtaggccgcaattggcttggcttctgcaccaaatacgagttgtaa

SEQ ID NO: 75765 - DNA, 957 bp, Saccharomyces pastorianus
atgtggttgaaatccttgctgctctgcctgtactccttagtactctgccaagtccacgctgcaccttcatcagggaagcagattacctccaaggatgttgatcttcagaaaaaatatgagcccagtccccccgccacacatcgtggaataatcactatcgaatactttgatcccgtttcgaagtcgatgaaagaggcggatctgacttttgagttgtacggtactgtcgtgtccaaaactgtgaacaactttgctatgctggcccatggtgttaaggcagttatcgaagggaaagatcccaatgatatacatacttactcgtaccgtaagaccaaaatcaacaaggtttaccctaacaagtatatccagggtggtgtggttgcctcagatgtgggtcctttcaccgtctatgggcccaaatttgatgacgaaaacttttacttaaaacatgacaggcctggaagactcgcaatggcctattttggacctgattctaacacctcggaattcatcatcaccactaaagccgatggaaatgaggaattggatggcaaaagtgtcgtgtttggtcaaataacttctggtctagatcaactaatggatgctattcaatacacagaaacagacgaatatggaaagcctcagcatgaattacggttcctgtatttcgttctagaaatcttaaaaattagtaacatcttagatttgcacgctgcgtacacagaaaaagtcgagaagtttagaaatggcgatgtgtctgttggctccactttggaaaacatcttccgtaacgataaagcctacacacctttaaccacctccactggaaccaccgcctatgatttaaaccacccaatttccagagccttgatgtgtttaactgttcttggcctttgtttcattgcctacaagggcatgcacgaaaagcctcatacggtttcattaagacacaagtaa

SEQ ID NO: 75766 - DNA, 441 bp, Saccharomyces pastorianus
atgatcagttcgtgtgttactagatgttttggtaggggtaaatgccttccagggcctgccactgcctcgatatatcaaacgataagatgtatatccactaattcaaataaagctgctgaggcgccaatatttccaaagctggaagacgtgaagatgcatgagctcataggaaacaacaattttggtaaaaagacctactacgtggaaagaagcaggaccggaaatctaccggtgtattccgcttataaaaatggaggtaacaaaattatcacggagatcagaaagattgaaggagatgtaattcaactaagaaatgacttgcaggagcaactgcctttcatacccaaaaaatcatggtctgtggtgatgcaatcgaaaaaaattattatcaagggcaatgcagtagaggctgtcaaaagggtattaaccaagaaattttag

SEQ ID NO: 75767 - DNA, 1548 bp, Saccharomyces pastorianus
atgtccaccctgattcctccaccttctaagaaacaaaagaaagaggctcaacttcccagagaagtagctattattccgaaagatttacccaatgtttcaatcaagttccaagctttagatactggtgacaatgtaggtggcgccctgagagttcccggtgctatctccgagaaacagttagaagaacttttaaatcaattgaacggtacttcagacgatccagtgccatataccttcagctgtacaattcaaggtaagaaggccagtgaccctgtgaagacgattgatataacagataacctatattcttcattaataaaaccaggctataacagtacagaagatcagatcacgctactgtatacgccaagagcagttttcaaagtcaagccggtaactagaagttcatcagccattgcaggtcacggttccacaattttgtgttctgccttcgcaccacatacgagttctaggatggtaaccggtgcaggtgataatactgcaaggatttgggactgtgacacccaaacgccaatgcatactctaaagggtcactacaattgggttctctgcgtttcctggtcccccgatggagaagtaattgctacgggatccatggacaataccataagattatgggacccaaaaagcggtcagtgtctaggtgatgctctcagaggtcattccaagtggatcacttctttaagttgggaacctatacatcttgtgaagccgggctccaaaccaagattagcttcatcttctaaggatggtactattaagatttgggacactgtgagcagagtttgccagtatacgatgagtggtcacacaaattcagtgtcttgtgtcaaatggggcggccaaggtctattgtatagtggctctcacgatagaaccgtacgtgtatgggacatcaattcgcagggcagatgtatcaacattttgaagtcgcatgcgcactgggttaatcacttatctttatctacagattacgcattgcgcattggtgcattcgatcatacaggtaagaagccttctacaccagaagaagcccagaaaaaggcattggaaaattatgaaaaaatctgtaaaaagaatggaaattcagaagaaatgatggttactgcaagcgatgattataccatgtttttatggaacccactaaaatctaccaagcctatagcaagaatgactggtcaccaaaaattagtcaatcatgtggcgttcagccctgatggtaggtatattgtctcagcgtcttttgataactctatcaaactttgggacggtagagatggtaagtttatctccacatttagagggcatgtagccagcgtataccaggttgcgtggtcatcggactgccgactactggtgtcatgttccaaagataccacgttgaaagtgtgggatgtaagaactagaaagctttctgttgacctccctggtcataaagacgaagtttataccgtcgactggagtgtcgacggtaaaagagtgtgtagtggtgggaaagacaagatggtaagattgtggacgcattga

SEQ ID NO: 75768 - DNA, 948 bp, Saccharomyces pastorianus
atgactacgacggtacccaagatattcgcgtttcacgagttttcagacgtggcagaggccgtagctgaccatgtagtccacgcgcaagacggtgcattggctccaaagaacgagaggaaacactctgttcccaacatcagcatgaatgcactggatatgacgagagaggcgtcttgcaaaagcacagcatctgccgcggaagggaaaagtggcagcagtggtagtggcagtggtagcagtaagcccaaaaaggagaaacggttcaagattgctctctccggtgggtcattgatcgaagtgctacacgaaggtctgctaaaacgagacgatgtacggtggggagactgggacatttactttgcagacgagagacttgtacccttcagctcgaatgaaagcaattatggatgcgccaaaaggaagattttggacctgatagacacggcgaagtatgggactccgaaggtgtaccacattgacgagtcattgattgacgacccgcaagaatgcgctgataactatgaaaagatgctaatccgcgggtttgccggtagagattccgtcaaacttccgatgttcgacttgttcctgcttggttgtgcccccgatggtcatatcgcatcactcttccctaacttccaggacaatctacgtgagaaacttgcatgggtggtgcccgtggagaacgctcctagtgggccctcgaccagaatttcgctgactatacctgtaatctgccattctcacagggttactttcgttgtcgaaggtgcaaccaaggcgcccatcatcaagaccattatggaaaggcctgaaaagggcctacctagcagtattgtcaacgaaggtgctgctggtcgtgtatcatggtttgttgacgacgatgctcttacggacgtcctcgtcaccaaaaaaaagtataaatttcaccaaggtttgtctatttaa

SEQ ID NO: 75769 - DNA, 783 bp, Saccharomyces pastorianus
atggtgtcgttagacgatatactaggtatcgtgtatgttacgtcatggtcgatatcgatgtatccaccgataatcaccaattggcgccataagtcagcgagcgcgatatcgatggattttgtcatgttaaatacggcaggttactcttacctggtcatatccatatttttgcaattgtactgctggaaaatgacgggtgatgagtctgacttgggcaggcccaagttgacgcaatttgatttctggtattgcctgcatgggtgcttgatgaatgttgtcttattgacccaggtggtagctggagcgagaatctggcgatttccaggtaaaggtcaccgcaagatgaatccatggtacctaaggattttactcgcatcactggccattttttcactgctaaccgtacaatttatgtactccaactactggtacgattggcataactcaagaactctggcgtattgcaacaatttgtttttactcaaaatatcgatgtcactaatcaagtacatcccacaagtgacgcataactcgacaagaaaatctatggattgtttccccattcagggtgtgtttctagatgtcactggcggtatcgcctcgctgctccaattgatttggcagttgtctaacgatcaaggtttcagtctggatacgttcgtgacaaattttggaaaagtgggactgtcaatggtaactttaatattcaacttcatctttatcatgcagtggtttgtatatcgatctcgaggccatgacctggcgtcagagtacccgctgtag

SEQ ID NO: 75770 - DNA, 228 bp, Saccharomyces pastorianus
atggaagcggaaaaacaatctgatattaagggaaccattgctttcgatactcacggtaacgttatagagtctaccggcgtgggcagtcaaaggatcgaagatatcggtgatttatcgaaagttacgctggatgcagaaggttttgctcaagttcaaggagattcgctactcgtacacctgtacaaacgcaatgatatcactttagctgtatataccagcgctcaataa

SEQ ID NO: 75771 - DNA, 753 bp, Saccharomyces pastorianus
atgattgagaataaggttgaactggtagcagaactagtgttggagtccatcggtaaaactgaggtggtgtcacgccatacagagggaaccaaatcatgccaagtgagttttcgcattaaagattctcccagtgagaagggttcaacatcgtttctctctgagctagtggtgattcagactctggatgacaatgacaagtatactgttgttattcgtcatggtacgtcgatcaccatggcatgtgtggtgggttacagcgattttaaattgcccacagaattgaaatggccactagaaagagaaagcttacctgtggagccagacctgaaacctataatgacacaacttaaaagacaaactgcaggtagtgcggacatgccaaaatttgacgatgagtaccaggcacaagcaagacaaaaccagggaacagcaccgttgaacccatatcccggacttacggtaactgaaccgagcttcgctaacccagcaggagggtatgcggatcgtgatctgtatcctgttggcacaagccatccggattggtctggagggcttcccaatcctctggggaatccaagtagccaaggcggtatgattttcgatccaaatagaagacctgccccaagatgggaagatatgccgccaggatggatgcctggatccaagtacgacgaaccatttggtcctggatctggcggatttggaggttcaggatccggcggatttggagggtcaggatctggctttatttaa

SEQ ID NO: 75772 - DNA, 2391 bp, Saccharomyces pastorianus
atgtccttctttgggttagaaaatagcggtaatgcgcgggatggtcctctggactttgaagagagttacaagggctatggcgagcacgaacttgaggagaacgactatttgaacgacgaaacatttggtgataatgttcaggttggtaccgactttgattttggaaatcctcacagcagcggcagcagcggcaacgcaattggcggtaatggcgtcggtgccacggctagatcatatgttgcagctactgcggaaggaattagcggccctaggaccgatggaacggcagcagcaggacctctagacctgaagccaatggaatctttgtggtctactgcaccacctccagcaatggcgccctcaccccaaagtacaatggctccggcgccggctccgcagcaaatggcccccctacagccaatcttgtcgatgcaagacttggaaagacaacaacgtcaaatgcagcaacagtttatgaatttccacgccatgggtcatccgcagggtctcccacagggtccgcctcagcagcaatttccaatgcagcctacgtcgggtcaaccaggtccctcacaatttgcgcctccacctccacctcctggcgttaatgtgaatatgaatcaaatgccaatgggtcctgtacaagttccagttcaagcttcgccttcacccatcggtatgtctaacactccttctccaggccctgtggttggcgcaactaaaatgcctctgcaaagtggacgcagatcgaagagagatttgtcgcctgaagagcaaagacgtttgcagattcgtcatgccaaagtggagaaaatcttgaaatactcaggtttaatgactcctcgtgataaggacttcatcaccagatatcagttgtctcaaattgtcactgaggacccttacaatgaggatttctacttccaggtctacaagattatccaaagaggcggtatcacgtccgaatccaacaagggtttgattgctagggcgtatttggaacattctggacacagactcggtggtcgctataagagaaccgatattgccctacagagaatgcaaagtcaagtagaaaaggctgtcactgtggctaaggaaagaccttctaagttgaaggatcaacaagcggctgctggtaactctagccaggataataagcaagcaaacacggttctgggcaaaatctcttccactttgaacagcaagaatccaagaagacaactgcagatccccagacaacagccttctgaccccgatgcgctaaaagacgtcactgactctctgaccaacgtggacttggcctcttcagggtcctcctctacgggctcttctgccgctgctgttgcttctaagcaaagaagaagatcttcatacgcgttcaacaacggtaatggtgccacaaatttgaacaaatctgggggcaaaaaattcattcttgagttaattgaaacagtttatgaagagattttagacttggaagctaacttgaggaatggccagcaaactgacagcactgcaatgtgggaggcccttcacatcgacgacagttcatatgacgtaaaccctttcatttcgatgctatcatttgataaaggtatcaagattatgcctagaatttttaatttcttggataagcagcaaaaattgaaaatcctgcaaaaaatcttcaatgaattatcacacttgcaaatcatcatattgagttcctacaagactacaccaaaaccaactttgacacaattaaagaaagtcgatctgttccaaatgatcatattaaagatcattgtctcgtttttgtctaataactccaattttatcgaaattatgggtctgttgctacagttaatcagaaacaacaacgtttcgttcttgaccacctccaaaattggtctaaatttgatcaccattttgatttctcgtgccgcattaatcaagcaagattcatcaagatctaatattctttcctctcctgaaatctccacatggaatgagatttatgataaattattcacttcattggaaagtaagattcagctgattttccctccaagggaatataacgaccacatcatgcgtttacaaaatgacaagtttatggatgaagcatacatttggcagttcctagctagtttagcactaagtggaaagctaaaccaccagagaatcattattgatgaagtacgtgatgaaatctttgccactattaacgaggcggagaccttacaaaagaaagagaaagaattgagtgtattacctcagaggtctcaagaattagacacagagttaaaatctattatttataataaagagaaactataccaagatttgaatttgttcctaaacgttatggggttggtgtatcgcgatggtgaaatttcagaactaaagtaa

SEQ ID NO: 75773 - DNA, 1329 bp, Saccharomyces pastorianus
atgcggctggggaatgcttatgcgtattgcaagccgtcgcaaaatgttgggctgaagctggacttgttacggggtcttccagggtacgtgggtcacgccacgagtaggatcaaccggttagagaaccaggacaattactccattaaaatgatgcggtcgtggcctaatgcttatggaagtgccctgaactgctctgtattcgatggccatggggagaaaggtgcgcaactgtcacagttgttagccgataaattgtgcagtagcctggatttccctgaaccctcctgggacaagcaggacttgaagaagttggtacaggaatatgcaagaaggtttcccgagggaaattactggaaacataagctgtccacgtttgaaaaattctacaacaagtttataaagaactgcaactcgaaacaagaactgctgctgatgaaggagggcgatagtgcgatccttggacaaaatggtggcaggatgatttttgataaaatggggaatattattgacaaaattgcactgctcactgagctagaccgtctgcgattgttctacgggtttgccaggttcgatctcgaccaatgctgcggcctgggcaccgcagcggggtccacagcgtcgtccatatttctatatccgtatgatgatccgaatgcacccattgatgaggggaaagacgatgactcgtggatcatatcgcactctggattgctcaaactcattgtcacgcaggtgggcgactctaagatcatcctctgcgatcaagacgggattgcacacgcattaacaacaactcaccacatcaattccagtagggaacgacaccgtttgagcatagacccttctcgattggacccagacgcctttggagagacaaggtttttgaataatttcgccaacactagatcgtttggtgatgtcgctgggaaaccgtatggtatatctagtgagccggatattttctcgtttcttgtcggaaataccttgcatttgccgcgatctgaaaggtcgaagctgcccttcaatggtgatgaatgcttcctggcgcttgtcaccgacggcatcaccaataaacttgcagaccaagaggttgttgacctcatcacctctacggtgaactcctggggactgaaaaaggcgactcctcaatttgttgcagaggagacaatcaaatttattcaggcaatagccactaaacactcagacaacgccacttgcgtggtggttaggctttccaattggggcaactggcccaatgttgacagaactggcccccaaagagaaaccaaactaatgaatgcacaatctaacgaaacaaaattaaactaa

SEQ ID NO: 75774 - DNA, 4284 bp, Saccharomyces pastorianus
atgaataacggttctggtcgatacttgctgactcccccagatgatcttcacccctatgtgccaagctcgaaacctcaggaacaagtataccctgatttcaagccttgggagcacactgcagcagaagatcaaatcctagcaaactttgtggctaagggcttttaccatacaccaatggtaagtttcgagtccatatctgcgagatcatctgttcatgaatcattagtcactcaatccaacattctttcccagcaattcgacaaaattatcaagattagagaagaccacattaataagatcccctcaaattccgcgacgacattacacgggcctggttttcagttgcctaatagaataacccttactgatcatagaaaggaaacgtggttgcatgaattgagttcgtctcacacttcgctggtcaaaattggcaagtttatacctcacggcttgaaaagaaggcaagtcatcgagcagtgctatttaaaatttataccattgaaaagggcgatttggttgataaagtgctgctattttatcgaatggaaatcgaaccacaaaaagaagaggtcaaatgctgctggggcagacgatgccatttccatgcacctgctaaaggactggacggatacctttgtatacatcctggaaaagctcatctttgatatgacaaatcactataacgattctcaacaactgcgtacgtggaagaggcagatttcttattttttaaaacttttggggaattgctactcactaagattgatcaataaggaaatctttcatcattggcttgtagagtttataaataagatggaaaacttcgaatttttgccattatcattacatattttgatgattttttggaacgacatctgccaaattgatacaaatgctcctgttgcggctacaataacatcaagtcaaaaagagcccttctttctggtaacaaaaatcactgatatgctattgcacaaatattatattgtttccagcagcaaatcaatgataaatgacgagaactacatcatcaatgatataaagaaaaacaacaagataaagttgaatattctcaaaatattatccagtttaattttgaaaatttttcaagaacaatctttagaggtgtttatatttcccacatctaactgggaaatttacaagcccttactttttgaaatagtctcaaacgccgacactaatcaaaattctgatatgaagaaaaaattagagttaattagttacagaaacgagtcattgaagaataattcttctatacgaaacgtaataatgtctgccagcaacgcaaatgactttcaattaactatcgtcacctgtaaacaatttccaaaactatcatgcattcaattaaattgtatagatactcagttcaccaagctactggacgataaccctacagaattcgattggcccacttacgttgaccaaaatccccttacaatgcataaaattattcaattaattctctggtccatacatccatcaaggcaatttgatcactatgaatctaatcaactggtagcgaaattattactattgcgaataaattcaacagatgaggatttgcacgaattccagatagaagatgccatttggtcattggttttccaattagccaaaaatttttcggcccaaaagagggtggtatcatatatgatgccttctttgtatcgcctgcttaatatactaattacttatggcatcattaaggtccctacgtatatcagaaagctaatcagttccggcctactttatctccaagattccaatgataagtttgtgcatgtccagctgttaattaacttgaaaatttcaccgttgatgaaaagtcaatacaatatggtattgaggaacgttatggaatatgacgttaaattttatgaaatttttaatttcgaccaactcgtggaaatcacagaacaaatcaaaatgcgaatactctccaatgatataactaatttgcaactgtcgaaaactcctctgagcattaaaatcatggttgcagaatggtacttatcacatttatgttccggtattttatctagtgttaaccgcacagtgttgctaaaaatattcaagattttttgtatcgatctggaggttttccaccacttttttaagtggatcgagtttattgtctaccatcaattgctaagtgatatagaatctctggaggcattgatggacatcttgctatgctaccaaaaattgttctcacaattcattaatgaccatattctttttacgaagacgttcatattcatttacaagaaagttttgaaagaaaaagacgtgcctgcttataatgtgacttcatttatgccattctggaaattttttatgaaaaacttcccttttgttttaaaggtggataacgatttaaggattgagttacaatctgtttacaatgatgagaaattgaaaactgagaagctgaagaatgataaatcagaagtcttgaaggtgtattccatgatcaataattcaaaccaagctgttggacagacttggaattttcccgaggtgtttcaagtaaacatcaggtttctactacacaactccgagatcattgatacaaatacaagcaaacagttccagaaagcacgaaacaatgtcatgcttttgattgccactaacttgaaggagtacaataaatttatgtccattttcttgaaaaggaaagactttactaacaaaaatttaattcaattgatctctctaaaacttctaacttttgaagtgacgcagaatgtgttggggctcgagtatattattcgattattaccaataaacttggaaaataatgacggctcatatggtctgtttttgaagtatcataaagaacaattcataaagtcaaattttgagaaaattttacttacatgttatgaattagaaaaaaaatatcatggcaacgaatgtgaaataaattattatgagatcctattgaaaattttaataacttatgggtcatctcccaaattacttgcaacatctacaaaaatcattatgttgttattaaatgatagcgtggaaaactcatctaatattttggaggatattttgtactactcaacttgtccgtcggaaaccgatcttaacgatattccattgggtagtggacaaccagacaatgacactgttgtaaccaacgatgataaaagtgacgatgatgatcacacagtcgacgaaattgatcatgtagaatattacgttatgatggactttgccaatctttgggttttccaagcgtttacctgtttctgcatcaaaaaaatcatggagaataatgagccagcaatggcaatggaagacttgaagaacttcatattccaaattatcgaaataactaattctaatgatttatgttcacaaatatttgaccaactgaaggatatgcagaccattgagatgataacccaaatagtggagaaagatttctgcacttcttgtttgcaaaacaacaaccaaaagatagatgataattacatcgttgtggtgatcgagattataacgtcattatcgatgaggtttcaaagagaaacttctggtatgatagttatttccacggagaactatcatttactaataaagatcataagacaattaagtgaactgaacgaaggaaatttatctaagagagaaatccaaatagatgccgtcttgaaaattttcagctttcatcaggattccattttccaacgcatcatcgctgatttatcagctgataaacccacaagtccattcattgatagcatatgcaagctgtttgataaaatatcatttaatttaagattgaagctgttcttgtacgaaattttgtcttcattgaaatcattcgccatctattcatccacaattgatgccccagcattccacacaagtggtaaggtcgaactaccgaagaaattgctcaacttaccaccattccaagtgtcctctttcgttaaggaaacaaaacttcatagtggcgactacggggaagaagaagatgcagaccaagaagaatcgtttagtttaaatttaggaatcggcatagttgaaatagcgcacgaaaacgaacagaaatggctcatttatgacaaaaaagatcataaatatgtctgcacattttccatggagccgtaccacttcatctccaactataataccaagtacacagatgacatggctacaggcagtaatgacacgactgcgtttaacgattcctgtgtaaacctgagtctttttgatgctcggtttgagaggaaaaatccacattga

SEQ ID NO: 75775 - DNA, 237 bp, Saccharomyces pastorianus
atgtggatttttcctctcaaaccgagcatcaaaaagactcaggtttacacaggaatcgttaaacgcagtcgtgtcattactgcctgtagccatgtcatctgtgtacttggtattatagttggagatgaagtggtacggctccatggaaaatgtgcagacatatttatgatcttttttgtcataaatgagccatttctgttcgttttcgtgcgctatttcaactatgccgattcctaa

SEQ ID NO: 75776 - DNA, 387 bp, Saccharomyces pastorianus
atgatcaccccaaagggaacgcacgatgctgtagccaagtttcaaaaaactgacctgcatcaagatctcgattacatcgtactgcaacaacgaagaacacagctagagacgcttattaacgaaagagaatcttttgtcaagaatctgtgttctcttttccacaaaattcaaaataccaagaattaccaggaatttgttgatgtattggcggagaatagggatttactgcgagaaattttcactgtagagaacggatttcaaaagcaaaaatggattagcaacgacgacattccccagatagactgggacaagtttgccctagatatcaacgcttatatagcagagaacgatcaattgttggctttgtatgaagatggcttattatga

SEQ ID NO: 75777 - DNA, 384 bp, Saccharomyces pastorianus
atgttgttctataagcctgtgatgaggatggcggtgagaccgctaaaaagcataagattccagtcctcatacaccagtattactaaattgacgaacctaacagaatttaggaatttgatcaagcaaaatgataaactagtcatcgacttttatgctacttggtgtggcccctgtaagatgatacaaccacacttaacgaaattaattcaggcttatccagatgtaagatttgtcaagtgcgacgtggacgaatcaccagatattgccaaagagtgtgaagtgacggctatgcccacctttgttcttggcaaggatggccaactcatcggcaagatcattggagctaaccctactgctttagagaagggaatcaaagatctataa

SEQ ID NO: 75778 - DNA, 2142 bp, Saccharomyces pastorianus
atgactgccagcgtttcgaatacgcagaataagctgaatgagcttctcgatgccatcagacaggagtttctccaagtctcacaagaggcaaatacctaccgtcttcaaaaccaaaaggattacgatttcaaaatgaaccagcagctggctgagatgcagcagataagaaacaccgtctacgaactggagctaactcacaggaaaatgaaggacgcgtacgaagaagagatcaagcacttgaaactagggctggagcaaagagaccatcaaattgcatctttgaccgtccagcaacagcagcaacagcaacagcagcaacaggtccagcagcatttacaacagcaacaacagcagctagccgctgcatctgcatctgttccagttgcgcaacaaccaccggctactacttcggccaccgccactccagcagcaaacacaactactggttcgccatcggccttcccagtacaagctagccgtcctaatctggttggctcacagttgcctaccaccactttgcctgtggtgtcctcaaacgcccaacaacaactaccacaacagcaactgcaacagcagcaacttcaacaacagcaaccacctccccaggtttccgtggcaccattgagtaacacagccatcaacggatctcctacttctaaagagaccactactttaccctctgtcaaggcacctgaatctacgttgaaagaaactgaaccggaaaataataatacctcgaagataaatgacaccggatccgccaccacggccaccactaccaccgcaactgaaactgaaatcaaacctaaggaggaagacgccaccccggctagtttgcaccaggatcactacttagtcccttataatcaaagagcaaaccactctaaacctatcccacctttccttttggatctagattcccagtctgttcccgatgctctgaagaagcaaacaaatgattattatattttatacaacccggcactaccaagagaaattgacgttgagttacacaaatctttggatcatacttcagttgtttgttgcgtgaagttcagtaacgatggtgaatacttagccacaggctgcaacaaaactactcaagtgtatcgcgtttcagacggttctctggtggcccgtttatctgacgattctgctgccaataaccatcaaaattcgatcactgaaaataacaccaccacgtccacggataacaatacaatgacaaccactactaccaccacaattactaccacagcgatgacttcggcagcagaattggcaaaagatgtggaaaacctgaacacttcgtcttccccatcatccgacttgtatatccgttcagtgtgtttttctccagatgggaaatttttggcaacaggtgctgaagacagactgattagaatttgggatattgaaaatagaaagattgttatgattcttcaaggccacgaacaagatatttattcattggactactttccctcaggtgacaaattagtctccggttctggtgaccgtaccgttcgtatttgggacttacgtacaggccagtgttcattgactttatccattgaagatggtgttaccaccgtcgctgtatcaccaggtgatggtaaatacatcgctgctggttctctagatcgtgctgtgagagtttgggattccgagaccggattcttggtggaaagactagattcggaaaacgaatccggtacaggccacaaggactctgtttatagcgttgtcttcacgagagatggacaaagcgttgtatccggctcattagatagatctgttaagctctggaatttgcagaatgcaaacaacaagagcgattcgaaaactccaaattccggcacttgtgaagttacgtatatcgggcataaagactttgtattgtccgtggccaccacacaaaatgatgagtacatcttgtccggttccaaagatcgtggtgtcctgttttgggataagaaatccggcaatccgttattgatgttgcaaggtcataggaattcagttatatctgtggctgtggcaaacgggtctccgctgggtccagaatataacgtttttgctactggtagcggtgattgtaaagcaaggatttggaagtataaaaaaatagcgccaaattaa

SEQ ID NO: 75779 - DNA, 354 bp, Saccharomyces pastorianus
atgttgttcttatatacatatgtttatgtctttttatgtacaaataatgatgtttacaatgaaacatctgttatgctatcaaaaacgtcagcgcattgttttatagctgaagaggttacaacggataacggtctgatttgcggcctggcaatgcttggtaaaactaaatatcaattttacgaattatttactgtatatagtattcagtccctcactcaactggcgtcaagagtgaagaagggcggcctcattatggctcgccttattctgttcaccctctgcgctcttcccgtattatttcattttattttgtttatgcttcaatatcttgtatttgtttacattgaaaaatga

SEQ ID NO: 75780 - DNA, 573 bp, Saccharomyces pastorianus
atggatccattgactgtatacaaaaactcagtgaaacaacagatcgattccgcagacttactagtggcaaatttggtaaatgagaatttcgtactgtcggagaagctggatacaaaagcaaccgagatcaaacagctgcagaagcagatagactcgctaaacgcacaagtcaaggagctgaagactcagacttcccaacaggcagaaaattcagaagtcataaaggacctttacgagtacctctgtaacgtacgtgtacataaaagctacgaggatgattctgggttgtggttcgacatctcgcagggcacccactcagggggatcttccgatgattattcgataatggactataaactcggatttgtcaagggccaggcccaagtcacagaagtcatctatgcgcccgttcttaaacagcgatccaccgaggaactatactcgctacagtcgaaactaccggaatacctcttcgaaacgttgagtttccccctctcgtcgctaaaccaattctataacaaaatcgctaaaagcctgaataagaaaagagagaaaaaagatgaaaccgagtaa

SEQ ID NO: 75781 - DNA, 435 bp, Saccharomyces pastorianus
atggttacgttcaactgtgaggtgtgcaatgatactgtgcccaagaagaataccgaaaagcattattatagatgtcctaacgcgtactatacatgcatagattgctccaagacgtttgaagatggcgtgagttacaagaatcacacgtcttgcatcagcgaggacgagaagtaccagaaagcgttatacaagggcaacaagaagcagaagcagaagcagcagcagcagccagtggcaactcctgcaaagaaagtggagaagcctgtgatcaagaaggcagagaaagtggaaaagacctcgaacggaatcgagcttcacaagggcaagtcgttgtacaaaattttgaaaaccatgaaggataaaggggcaaaaaagaccttcttgaaaagtctggttgtggattctgaggggcaaatcaggtatgcaaaggaataa

SEQ ID NO: 75782 - DNA, 1779 bp, Saccharomyces pastorianus
atggctttggaacctattgattacactactcactcgagagagatcgacgcagagtacctgaagattgtcagaggctccgatcctgacaccacctggttgattatttcacccaatgcgaaaaaagaatacgaacctgagtctaccggttcctcctttcacgatttcttgcaatcgtttgatgaaaccaaggtccagtacggactggcacgtgtgtccccaccagggtcagacgttgagaagattattatcattggttggtgtcctgattctgcgccattgaagacgagggcctctttcgccgccaattttgctgcagttgctaataatctgttcaagggttaccacgttcaagttaccgccagagacgaggacgatcttgacgaaaatgaactgttgatgaaaatcagtaacgcggccggtgcccgttattctattcagacttcctccaagcaacaggggaaggcttccactcctcccgtgaagaaatccttcacaccttccaagagccctgctccagtttctaagaaggaaccagtcaagactccttccccagcacctgctgctaagatttcttcccgtgttaacgacaacaatgacgacgacgattggaatgagcctgaattaaaggaacgcgacttcgatcaggctcccctgaagccaaatcaatcatcttacaaaccaattggcaaaatcgacttgcaaaaagtgattgctgaagaaaaggctagggaggacccacgtcttgttcaaaagccaaccgctgctggttccaagattgatcctagttctgatatcgctaatttaaagaacgaatcaaaattaaagagggactccgagtttaactcctttttgggcaccactaaacccccctccatgacggaatcttcattaaagaatgatgatgataaagtcattaagggttttagaaacgagaaatcacctgctcaattatgggccgaaagaaagacaaagcaaaacagtggcaacgccgaaactaaggctgaggcaccaaaacctgaagttccagaagatgagcctgaaggtgaacctgacgtcaaagatttgaaatcaaaatttgaaggattggccgcttcagaaaaagaggaggaagaaatggaaaacaaatttgctcctcctccaaagaaatcagaaccaactattatctcaccaaaatccttctccaagccacaagaacctgtgaaaactgaagaagctcagcagcctaagactgattacaagaagatcggcaacccattacccggtatgcacattgaagcggataatgaggaagaaccagaagaaaatgatgatgactgggatgatgatgaagaggaggctgctcaacctcctttgccttcgaggaatgttgcgtcaggagcaccagtgcaaaaagaagagcctgaacaagaagagatcgccccaagcttaccttctagaaactcgatcccagctccaaaacaagaagaagcacctgaacaagcacctgaagaagaaattgaagaagaagctgaggaagccgctccacagctgccatcaagaagctctgcagctcctcctccgcctccaagacgagcaactccagagaaaaagccaaaggaaaatccttgggccacagcagaatatgattacgatgctgcagaagataacgaactgacctttgtggaaaatgacaagattatcaatattgaatttgtcgacgatgactggtggctaggggaactagagaaagacggctcaaaaggtctcttccccagcaattatgtgtctttgggcaactag

SEQ ID NO: 75783 - DNA, 4911 bp, Saccharomyces pastorianus
atgaactcatttgcgtcattaggtcagatatattcagtagtaaaccttttaactagagtagaggctcaaattgtgttctaccagaatagtagtacttcactgcctgtctctactttagtatccacctcaatagcagattttcacgagtcctcatcaactggcgaagtgcagtattcatcctcttattcgtatgtgcagccctcaatagactccttcacttcatctagcttcttaacaagttttaaagctcctaccgaaacttcttccagctatgcagtttcttcctcattgataacttctgatactttttcttcatactctgatatcttcgatgaagaaacaagttcattaatatcaacgtcagctgcctcatcggagaaagcctcgtccaccctttcttcaactgcacaacctcataggacatctcactcttcctcttcattcgagctaccagtcactgctccatcatcctctagtttaccgtcctcaacttcattgacatttacgtcagttaatccatctcaaagttggacttcatttaactcagaaaaatctagcgctctttcctcaaccatagattttacttcttctgagatttcaggttcaacatctccaaagagcctggaaagtttcgataccaccggtactataacttcatcttattctccttctccttcttcaaaaaattctaaccagacctcactactcagcccattggagcctctgtccagttcttcaggagatttaatattgagttcaactattcaagctactaccaatgaccaaacttcaaaaactattccaactcttgttgacgccacatcgtcattaccaccaacattgaggtcatccagtatggcaccaacaagtggttctgattcaatctcacacaactttacgagccccccctctaaaacaagtggtaactacgatgttttgacttcaaactcaatagatccttctctatttacaactacgagtgaatattcatctacacaattgtcgagtttaaatcgggcctcaaaaagtgaaacagttaatttcactgcttctattgcttccacaccatttggtacagattcggctacttctctaatagaccccattagttcagtgggttctacagcatctagctttgtgggaatttcaaccgccaattttagtacacaagggaactcgaactatgttcctgaatcaactgcaagcggaagttcacaataccaagactggtcaagctcttctcttccgctgtcacaaaccacttgggttgtcatcaacacaactaatacacaagggtctgtaacgtcaaccacatccccggcttatgtttctacggccaccaaaacggttgacggggtgatcaccgaatatgttacatggtgtcctctaacacaaaccaaatcacaagcaattggggtcagttcgtctatttctagcgttccacaagcctcctcattcagcggtagttccaattccaccactcttgctgcctcgaacaacgttcctgaatcaactgcaagtggaagttcacaataccaagactggtcaagctcttctcttccgctgtcacaaaccacttgggttgtcatcaacacaactaatacacaagggtctgtaacgtcaaccgcatccccggcttatgtttctacggccaccaaaacggttgacggggtgatcaccgaatatgttacatggtgtcctctaacacaaaccaaatcacaagcaattgggatcagttcatccacgattagcgccacacaaacctctaaaccatcttcaatattaacattggggatatcgaccttacaattgtctgatgccacatttaaggggactgaaactataaacacccttctcatgaccgaaagtactttaatcacagagcccacctattttagtggcacatcggatagcttttatttgagcaccagtgaagttaatcttgcgtcttccttatcttcttatccaaatttttcatcttcagaaggctctacggcgaccattactaactctaccgttacatttggatcgaccagcaagtatccatctactagtgtatctaacccaacagaagccagccaacatgtgagctctagtgtgaactcactcactgattttacttcaaattcaaccgaaaccatcgcagttatatctaatattcacaaaacttcgtcaaataaagactattcatcgacgactacgcaattaaagaccagcggaatgcaaacgcttgagctttctactgtcacaacaacggtgaacggtgctgctacggaatacacaacgtggtgcccggcaacaagtattgcttatacgacatccatatcatataaaacattagttttgaccactgaagtctgctctcattctgagtgtactccaacggttattaccagtgttactgcaacaagctctacaatcccccttttatcaacctctagctctacggtattatcttctacagtatccgaaggtgcaaaaaatcctgctgcttctgaagtaactattaatacccaagtttctgctacttccgaagctactactactagcactcaagtgtctgctacttctgcgacggccactgctagcgagagttcaaccacatctcaagtttctgctacttccgaagctactactactagcactcaagtgtctgctacttctgcgacggccactgctagcgagagttcaaccacatcccaggtttctactgcttccgaaactattagcactctcggtactcaaaactttaccactactggaagcttacttttcccggctttgtctactgaaatgataaatactactgtggtttcccgaaaaaccctaattattagtacagaggtatgttcccattccaaatgtgtcccaacagtcattaccgaggttgttacttcgaaaggcacgccttctaatggacattcttctcaaactctacaaacggaggcagtagaggtgacattgtcatcccatcaaaccgtaactatgagtaccgaagtatgttctaattcgatttgcacaccgactgttattacatctgtgcaaatgagaagtattccttttccatacttaacttcttcaacgtcaagttcctctttagcctccaccaaaaaaagttccttagaagccttctcagaaatgtccaccttttctgtcagtacgcaaagtttgcctttggcattcacaagttcagaaaaacgctccaccacatctgtctctcaatggtcaaataccgtttcaactaatacaataatgtcctcttcttctaatgtcatatcaacaaatgaaaagcccagtagtactacctctccatacaacttctcttcggggtactctttaccttcttcttctacaccttcccaatattcactatctacagctactacaacaatcaacggaatcaaaactgtgtacacaacttggtgtccattggcagaaaaatctactgtagctgcttcttctcaatcttcccgcagtgttgacaggtttgtttcgtcgtcaaaaccatcctcatctttatctcagacctctattcaatatacattatctactgctaccaccaccataagtggtttgaagactgtatacacgacttggtgtccattaacaagtaaatcgactttaggtgctactactcaaacttcctcgacagccaaagttagaattacttccgcttcatctgcaacatctacttctatttctttgagcacttcaacagaatcagaatcttcatctggatatttgtcgaaaggagtatgctcaggtactgaatgtacgcaagatgtgccaacacaatcatcctcacctgcttcaacgttagcatattccccctctgtttctacatcatcatcatcatcattctcaacaacaactgcatcaacactaacgtcaacacacacctctgtcccgttattaccatcatctagctctatatcagcatcttcgccatcatcaacttcgttgttatccacttctttaccatctcccgcttttacgtcatcaacacttccaacagcaacagcagtatcttcctccactttcatagcgtcttctctaccattgtcctctaaatcatcattgtcgttatcgccagtctcgtcgtctattttgatgtctcagttttcatcatcatcatcatcatcatcatcattggcatcgttgccatctctttctatatcaccaactgttgacactgtttctgttctacaaccaactacttccatcgcaacactaacttgcacagactcacaatgccaacaggaggtatccactatctgtaatggatccaactgtgacgatgtgacttcaactgccactactcctccatctacggttactgatactatgacatgtactggatctgagtgccagaaaaccacatctagcagctgtgatggttactcgtgtacagtatccgaaacgtataaatcaagcgctacaatatctgcatgtagtggagaaggatgccaagcttccgctacaagtgagctaaattctcaatacgtcacgatgacgtctgtcattaccccaagtgccataacaacaacatcagtggaagtgcattcaactgaatccactatatcaattactacagtgaagccagttacatatacatccagtgatactaatggagaactgataaccataacaagttccagccaaactgtaattccatcagtaacgacgataataacgagaacaaaagtggccataacttcagcaccaaagccaacaactacgacctatgtcgagcaacgactttcctccagtgggattgctacttcttttgttgctgctgcatcctcaacttggattactacacccattgtcagtacgtatgctggttcggcgtcaaaatttctctgtagtaagttctttatgataatggtaatggtgatcaacttcatttaa

SEQ ID NO: 75784 - DNA, 549 bp, Saccharomyces pastorianus
atgccgttatttttggttctgaaagcaacattatcagaaaacgtgaccaaggtttcaattgagaatacaaacgaatcaagggcagaatttgccttcgatctacaatgtaccagttgtagagaattacacgattctaaagtcatcatcaatacatttgaagaatatgctatgccggcatcaaaaggtaccgcatctttcttgatgaagtgtaaattttgttcaaaagaattgtcagttaacctgtgcgcttttgaggatgaatatttaactgatcagagtgacgacaaatgggctaagataaaagatgtgcggaagaagcatggtttatcgaaggtcaaagacgattctttcattcctttaagccttgattgcagaggttgtgagttaatcaaattttatcccgacaccataacgtttgaagtttctctaagttcggggaaagtaatgtcatgccaactagaggataatgaatggtatgattatgatgacaaccttggggaagaagtaacaatgactgatttctcatcaagcattattaaaggtaagtaa

SEQ ID NO: 75785 - DNA, 2163 bp, Saccharomyces pastorianus
atgactcagcaagaataccgttccccctcacaacgcttatccaaggggaggggcatgtcgctacccaaaatatttgctcgtaatttgagatctctgcaaaacaatgcacctcctggcaaaaacatcgatgtcaattgtttgaacgtcaattcttgttcgttgtccgcaagcccaagctcacaaattaatatggcttgtaatggaaacaagcaagatcttcccataccgtttcccctgcatgcagaatgcaacgatagctggtcaagctccaaactcaacaagttcaaatcaatgtttaatcataacagatcaaagagcagtggtactacagatgcgtcaacttcagaaaaaggtacgcataagcgtgaaccccggtcgacgatacatacagagctgttacaaagttccattatcggtgagccaaatgtccatagtactacaagtagcacacttatacccaatgaggcgatatgctccacacctaatgagatctcaggtagctcttctccggacgcggagttatttacctttgacatgcccacagacccgtcatccttccacactcctagctccccaagttatatagcaaaggacagtagaaacctgagtaatggatctttgaatgatattaacgaaaatgaagagctccaaaatttccatagaaaaatcagcgaaaatggcagtgcctcccccctggctaacttgtcattatccaattcaccaattgattccccaaggaaaaatagcgaaaccagaaaggatcaaatacctatgaacataacaccacgtttaaggagggccgcttccgaaccgttcaatacggcaaaggatgggttaatgcgggaagattacattgccttgaaacaacctccaagcttgggagatattgtagaaccgaggagatctcgtcgtttaagaaccaagtcattcggtaacaagttccaagacattactgtcgaacctcaatccttcgaaaaaattagactacttggccaaggtgacgtaggtaaagtgtatttagtgagggaacgcgataccaaccagatattcgccctgaaagttttgaataaacatgagatgatcaagaggaagaaaattaaacgagtactcactgaacaggaaattctcgcgacaagtgatcatccatttattgtgacactgtatcattcctttcaaaccaaagactatttgtatctctgtatggaatactgcatgggaggggaattctttagagccttacaaacaagaaaaagtaaatgcattgcagaagaagatgcgaagttttacgccagtgaagtagtagcagctttggaatatttacacctactgggcttcatatacagagatttgaaacccgaaaatatattactgcatcaatctggtcatgtcatgctttctgactttgatttatccatccaagcaacgggatcaaaaaaacccaccatgaaagactctacgtatttagatacaaaaatttgttcagatggattcagaactaattcctttgttggtactgaagagtatttagctccagaagtaatcagagggaatggccacactgcagcagtagactggtggactttaggaatattgatttacgagatgctatttggctgtactccatttaaaggagataattcaaatgaaacattctctaacattttaaccaaggacgtcaaatttccacatgataaggaagtttcgaagaattgtaaagacctgataaagaaactactaaacaaaaacgaggcaaaaaggcttggttccaaatcaggagctgcagacataaagagacatcccttcttcaaaaaagttcagtggtcgttcttaagaaaccaagacccccctctaatacctgcattaaatgataacggctgcgaacttccttttatattgtcttgcaataaacacccgaaaaggaactcagtgagtgaacaggaaaccaaaatgttctgtgagaaagttgcaaacgatgatgaaattgatgaggctgatccattccatgattttaattctatgagtttaacgaagaaagatcacaatattttaacctactctgaaaattatacctacggaaaaattctatacaaagcaacttgtacaaggccaaggcataacagctcacatagaagtttctttaaagacattatacctgaactataa

SEQ ID NO: 75786 - DNA, 3144 bp, Saccharomyces pastorianus
atggtgataggtaatgcacctaaactggtacttttgagagccaaaagcagtgcaaatagatttattttgttgaatctattaacaataatggcgggacaacccacaataagcaggtttttcaagaaggcggtaaaagcagagctgacgcataagcaagaacaagaagttgcggttggaaatggcgctggtagcgaatccatctgccttgacactgatgaagaggacaatttatcttctgttgcaagcacaacagtaactaatgatagctttccactcaaagacagtgtttcttccaagaattcgaaaaattcagaaaagactagtggtacttcgacaacatttaatgatattgactttgctaagaaattggataggattatgaaaagacgaagtgatgaaaatgttgaggctgaagatgatgaggaagagggtgaggaagatttcgtaaaaaaaaaagccagaaagtcccctacagcgaaacttactcccttggacaaacaggtgaaggacctgaaaatgcatcatagagataaagtgcttgttattagagtaggctataagtacaaatgttttgcagaggatgcagtaacggttagcagaatacttcacatcaaacttgtgcctggaaaattgactatcgatgagtctaatcctcaagattgcaatcataggcagtttgcgtactgttctttcccggatgtcagattaaacgttcacctagagagacttgtgcaccataatttaaaggttgccgtggtggagcaagcagaaacaagcgctattaagaagcatgatccaggtgccagcaaatcaagcgtttttgaaagaaagatttcaaatgtctttaccaaagctacatttggtgttaattccacctttgtccttagggggaaacgtattctcggtgatacaaacagtatatgggctttgtcccgtgacgtacatcagggaaaggtggctaaatattccttaatttctgtcaatttaaataacggggaagtcgtgtatgatgaatttgaagagcctaatcttgctgatgagaaactacagatacgaatcaaatatttacagcccatagaagtactgataaatacagatgatcttccattacatgtagcgaaatttttcaaagatacttcatgtcctttaatacacaagcaggagtatgatttggaagatcatgtagttcaggcaataaaagtaatgaatgagaaaattcaactctcgccgtctctcatacgcttagtttctaagttatattcgcatatggttgagtacaataatgagcaggtgatgttgattccttctatctattcgcccttcgcatcaaaaatacatatgttacttgaccctaactccctgcaaagtttggacatttttactcatgatggtggtaaaggttctttgttttggttattggaccacacaaggacatcgtttggatttagaatgttgagagaatggattctcaaacctttgattgatgtacaccaaattgaagagcggcttgatgccattgagtgcattacatccgaaatcaacaacagtatattttttgaatcgttgaatcaaatgttgaatcatacccctgacttattaagaactttaaatcgcataatgtatggtacaacttctagaaaagaagtctatttctatttaaagcaaataacttctttcgttgatcacttcaagatgcatcaatcttacctgtcagaacatttcaagtcatcagatggaaggataggcaaacaatcccctttactttttagactatttagtgaattgaatgaactactttctaccactcagttgcctcattttttgaccatgatcaacgtttctgcggtaatggaaaaaaattcagataagcaagtaatggatttttttaatttaaataactatgattgttcagagggtataataaaaattcaaagggaaagcgaatcagtacggtcacagttaaaggaagaattggcagaaatacgaaaatatctcaaacgtccatatctaaattttagagatgaagttgattacttgatcgaagtgaaaaactcgcaaattaaggacttgccagatgattggataaaagttaacaatacgaagatggtcagtagatttaccactcccagaacccagaaactgactcaaaagctagaatattacaaggacttattaattcgggaatctgaactacagtataaagaattcttgaacaaaattacggcagaatatacagagctccgtaaaattacactcaatttggcgcagtatgactgtattttgtcgttagcagccacatcatgcaacgtaaattatgttagaccaacttttgtgaatggtcaacaagccataatcgcaaaaaatgcaagaaatccaattatcgagtcgctggatgttcattatgtaccaaatgatatcatgatgtccccagaaaacggtaaaatcaatattataacggggccgaatatgggtgggaaatcatcttatattagacaagtggcactgcttactataatggcacagatcggctcatttgtccccgcagaagagatcagattaagcatatttgaaaacgtactcactcgaatcggtgcgcatgatgatattataaacggtgattctacttttaaggtggaaatgcttgatatcctacacatcttgaaaaattgcaataaacggtctttactattattagacgaagtgggaagaggtactggcacacacgatggtatagcaatttcttatgctttaataaagtatttttctgagttaagtgactgccccttgatattatttactacccattttcccatgctgggagaaatcaaatctccgttaataaggaattatcatatggattacgtggaagaacaaaaaactggcgaggactggatgagtgtaatttttctatataagttaaaaaaaggattgacttataatagttatgggatgaatgtggcgaaattggcacgcctggacaaagatattataaatcgggcattcagtatttcagaagaattgcggaaggaatccattaacgaagacgcgttgaaattattcagctctttgaaaagaatattaaaaagtgataatataacagcaacggataaactcgcgaaattactatcattggatatccactga

SEQ ID NO: 75787 - DNA, 6327 bp, Saccharomyces pastorianus
atgctatcggccacataccgtgatttgaacacagcatctaatttagaaacatcaaaggaaaaacaggccgctcaaatcgtcattgcacaaattagtttattattcacgactcttaacaacgacaattttgaatccgtggaaagagaaattagacatattttagacaggtcgtccgtagatatttacataaaagtttgggaacgattattaaccttaagttctcgggatattttacaagcgggaaaatttttacttcacgaaaatttactacacagactactattagaatttgcgaaggatttaccgaagaaaagcacagaccttattgagcttttgaaagaacgaaccttcaataaccaggagtttcaaaaacaaacaggaattacattatcacttttcattgatctatttgataaatctgcaaacaaggacattatagagtcacttgaccgctcctctcagattaacgatttcaagacaattaagatgaatcatacaaattatttaaggaatttttttcttcaaaccacaccagaaacactagagtccaatctacgcgacttattgcattccttggaaggtgaaagtctaaatgacttattagctcttttactgtccgaaatactttcacctgggtctcagaatttacaaaatgatcccacacggagttggttgacacctccgatggttttagacgcaacgaaccgtgggaacgttatagcaagatctataagttctctgcaagccaaccagataaattggaatcgtgtgtttaatttaatgtcaacaaagtatttcttgagcgcaccattgatgcctactacagcatctttgagttgcttatttgcagcattacacgatggtccagttattgatgaatttttcagttgcgactggaaagttattttcaaactagatttggccattcaacttcataagtggtcggtacagaatggttgctttgacttattaaatgcagaaggtaccaggaaagtttctgaaaccatcccaaacacaaagcaatctttactctacttattatccattgcatcattgaatttagaattgttcctacaaagggaggaattgtctgatggtcctatgctagcttattttcaagagtgcttctttgaagatttcaactacgcccctgaatatcttattttagcattagtcaaagaaatgaagcggttcgttttattgatagaaaacaggacagtcatagacgaaatacttattaccttattgattcaagtgcataataaatcaccatcatcgttcaaggacgttatttctacaataaccgatgattctaaaatcgtagatgcagcaaaaatcataatcaactcgtatgacgcacctattgccaactttttaaaatcgttgttagatacgggaagattagatacggtcattaataaacttcctttcaatgaagcttttaaaattttgccatgcgcaagacaaattggttgggaggggttcgatactttcttaaaaacaaaagtttctccatctaatgtcgatgtagtgctggaatcactagaggctcaaacgaaaatgactgatacaaacactccatttaggtcattaaagacatttgacttattcgcttttcattcattaattgaagtattgaacaaatgcccactagatgttctccaattacaaaggtttgaatccttggaattttccttattaattgcttttcctagattgatcaattttggttttggacacgatgaagctattttagccaatggtgacatcgcagggattaataatgatattgaaaaggagatgcagaactatttacagaaaatgtatagtggtgagttagccattaaagatgtaatcgaacttctgagaaggttaagagatagcgacttgccaagggaccaggaagtcttcacatgtattacccatgccgttatagcagaatcgacattcttccaagattatccattggatgcattggctactacatctgttctttttggatccatgattctctttcaactgttacgtggattcgtattagacgtcgcatttaggataatcatgaggtttgccaaggagcctccagagtccaagatgtttaagtttgctgtacaagctatttatgcatttaggatacgtttggccgaatatccacagtattgtaaggacctcttgagagatgttccggctttgaagtctcaggctcaagtttaccaatctatcgtcgaagctgctaccctagcaaatgctccaaaggaaaggtcaagacccgtccaggaaatgatcccattaaaattttttgctgtagatgaagtttcatgtcagatcaatcaagaaggtgctcctaaagatgtcgtagaaaaagttctttttgttctcaacaacgttactctggctaacttgaataataaggttgatgaattgaaaaaaagtttgacaccaaattatttttcttggttttccacatatttagttacgcaaagggctaaaacagaacctaactatcatgatctttatagcaaggttatagttgctatggggtcagggttgctacatcagttcatggtcaacgttactttgagacaattatttgtcctactatctacaaaagacgagcaagccatcgataaaaagcacctaaagaatttggcttcatggttaggatgtatcacattagctttgaataaaccaattaaacacaagaatatcgcattcagggaaatgttaatcgaagcttataaggaaaatagacttgaaatagttgtgccttttgtaacaaagattttacaaagggcttctgaatcaaaaattttcaagcctccaaatccctggactgttggcatattaaagctgttgattgagttgaacgaaaaagcaaactggaaattaagtttgactttcgaagttgaggttttattaaaatcttttaatttgaccaccaaatctctcaagccctcgaatttcatcaatactccggaagttatagaaactttatccggtgctttgggatcaatcactctggagcaacaacaaacagagcaacaaaggcaaattatactaatgcaacaacaccagcaacagatgctaatatatcaacagagacaacaacaacaacaacaaaggcaacaacaacaacaacatcatattagtgcaaatacaatcgcagaccaacaagcggcatttggcggcgagggttcaatttcacacgacaatccttttaacaacttacttggttctactatttttgtaacccaccctgacttgaagagggtatttcaaatggctttagccaagtcagttcgcgaaattttgttggaagtagtcgaaaagtcatcaggaattgctgttgttacgacgacaaaaataatacttaaagactttgccactgaagttgatgagtctaagttgaagacggctgcaatcattatggtaaggcatttggcacaaagtttagctcgagctacttcaattgaaccattgaaagaaggcatacgttctactatgcaatcactagcaccgaatttaatgtctctttcttcttcacctgcagaggagcttgacacggcaataaatgaaaatattggcattgctctagttttgattgagaaagcatctatggacaagtctactcaagatttagcagaccaattgatgcaagcgattgctattcgtcgttatcacaaggaaagaagggcagaccaaccatttattacgcaaaataccaatccatattcactgtctttaccagaacctcttggtttgaaaaacactggtgttactcctcaacaattcagggtatacgaagaatttggtaagaatattccaaacttggatgttattccgtttgcaggattgcccgctcacgctccaccgatgactcaaaatgtgggtttaactcagcctcagcaacaacaagcgcaaatgcctacccaaatcctaacctccgaacaaataagagctcaacaacaacagcagcaattacagaaaagccgtttgaatcagccatcccagtcggctcaacctccaggagtgaatgtcccaaatcctcaaggtgggattgctgcagttcaatcagatttggaacagaatcaacgtgttctcgttcacctcatggacattttagtttctcaaattaaagaaaatgctacgaagaataacttagctgaattaggcgatcaaaaccaaattaaaaccatcatttttcaaattttgacattcattgcaaaaagcgcacaaaaggatcaattagctttaaaggtatcccaagctgtcgttaatagcctttttgccactagtgagagtcctctctgcagagaagttttgtccctacttttggaaaagttatgttctttatccctcgttgctagaaaagacgttgtctggtggttagtttatgccttggacagtaggaaattcaatgttcccgttatcagatcccttctagaagttaatttaattgatgctacagaattagataacgttttagttactgcaatgaaaaataaaatggagaactcaactgaatttgctatgaaattaattcagaatactgtcttgtctgatgatccaattttgatgagaatggacttcattaaaaccttagaacacttggcctcttcggaagatgaaaatgtaaagaaattcatcaaagagttcgaagatactaagataatgccagtgaggaaaggtaccaaaaccacaagaacagaaaagttttacttagtatttacggaatgggtaaaattacttcaaagagttgagaataacgacgtaatcacaactgtttttatcaagcaattaatcgaaaagggtgttatcagcgatactgataatttacttacatttgtcaaaagttctcttgagctatcagtttcttcattcaaagaaagtgacccgactgatgaggttttcatcgctattgatgctctaggatcgctaattataaaattgttgattttacagggtttcaaagatgatacaagaagagattacataaatgcaatattttctgtgatcgttttagtgtttggtaaggatcatagccaagagggtaccacattcaatgaacgaccatatttcagactattttctaacatcttatacgaatgggctaccatcaggacgcacaattttgttagaatatctgattccagcactaggcaggagctgatcgaatttgattctgtattttacaacactttctcaggatatttgcacgctctgcaaccatttgccttccctggattctcatttgcatgggtgacactattatcacacagaatgttattaccaattatgctaagattacccaataaaataggttgggaaaagttaatgcttttgattatcgatttgtttaaatttttggaccaatacacaagtaaacatgcagtctctgacgctgtttcggttgtttataagggaacactgcgtgttattttaggcatttcgaatgatatgccatcctttttgattgaaaatcactatgaattaatgaacaatctacctccaacatatttccaactaaagaatgttattttatctgctattcctaagaatatgaccgttcccaacccatatgacgtggatcttaatatggaggatattccagcatgtaaagaactacctgaagtcttctttgatcctgtaattgatttacactcattgaaaaagccagttgacaactacctacgtattccctcaaattcattattaagaacaatactaagcgctatttacaaggatacctatgacataaaaaagggcgtaggctacgactttttatctgttgatagtaaattaattcgcgctattgtattacatgtgggcattgaagctggaatagagtataagagaacttcttcaaatgcggtatttaatacgaagtcttcttattatactttattgttcaatctgattcaaaatggtagcatcgaaatgaaatatcaaattattctgtctattgtggaacaattgcggtatccaaacatccacacctattggttcagctttgtgttaatgaatatgttcaaaagtgacgaatggaatgatcaaaaacttgaagtccaagaaattattttaagaaactttttaaaaagaattattgttaacaaaccacatacctggggtgtttcagttttctttactcagttgataaacaataacgatattaatcttttagacctgccctttgtacaaagtgttcccgaaattaaactaattttacaacaattagtaaaatattccaaaaaatacacaaccagtgaacaagatgaccaatccgccaccatcaatagaaggcaaacccctctacaatccaacgcataa

SEQ ID NO: 75788 - DNA, 1176 bp, Saccharomyces pastorianus
atggtttcattgttcaaaagaggtaaggctccaccgctcacgaaagaaggccccacttctaaaaagcctcctaacacagcgtttagacaacaaaggcttaaggcatggcaaccaatactgtctcctcaaagtgtgcttccgttgttaatattcgttgcatgtatatttactcctattggtattggactcattgtaagcgctactaaggtacaagatctaacaattgattatagtcattgtaatacaaaagcatctacaactgcttttgaagatataccaaagaagtacattaaatatcactttaaaagtaaagttgaaaataaaccacaatggaggctaaccgaaaatgaaaatggcgaacaatcatgcgaactgcagttcgaaatcccaaacgatatcaagaaatccatttttatatattataaaataaccaatttttatcaaaatcatcgcagatatgtccaatcgtttgacacaaagcaaatattaggggagcctatcaaaaaagatgatctggatacaagctgtagtccaataagaagtagggaagacaaaataatatatccctgtgggttgatcgctaattccatgtttaatgatacattttctcaggtgttgagtggtatagatgacacagaagactataatttaactaacaagcatatatcatggagtattgatcgtcacagatttaaaaccaccaagtataatgctagcgatattgttccaccgccaaactggatgaagaagtatcccgatgggtacacagatgaaaatcttcctgatatccatacttgggaagagttccaggtatggatgaggactgcagcctttcccaagttttacaagttggcgttgaaaaatgaatctgcttctttaccgaagggtaaatatcaaatgaacattgagttgaattatccgatttcactctttggtggcacaaaatcatttgtactgactacaaatggagctattggtggtagaaatatgtcactaggcgtactgtacctcatcgttgcagggctttgcgccttatttggcatcatttttttggttaaattaatcttccaaccaagagcgatgggtgatcacacttatttgaattttgatgatgaagaaaacgaggattatgaggatgtacacgcagagaatacaacattgagggaaattttatag

SEQ ID NO: 75789 - DNA, 1089 bp, Saccharomyces pastorianus
atgctggttccacctgctaactttgggattgctgaagaaggaatatatagatgttctaaagtggagacattaaatttatcctttctggaaactctcaatttaaagacagctatatttattggaggtcaagaaccatccaagtttttcaaagattttttcacaagatcatccataaaatggattgttttaaggatgtctgatttctcggctgcggcagttccggtaaaaagctcttctgtatctaacgcaaatttatattcgaataataacagtactctatcattacaggaagaaaagaaaaaatccactgcaaatgggtcacaaaattctactacaggggatcctgtaattcaggaggaattggcttaccacttgactgacaatgatgacttaatgctgattaagagcacgtgtttaaaaagaactttcaaaacattattgaatgtggataattataatgttttattggtagataagaccgcgttggtcattggtatacttcgaaaaattcagaaatggaatattgcatcaatcataaatgagtacagattattttctggtaagaatagaaattattttgcggaaacatttctagaaataattaacattgagatagaacaggagaaggataataagacaattgtggacaacaaagcaaaaaaattgccccttgagaataataggacgcattcgatagagtataaggccaattctggcaaacttattagagtaaatgaagatgacctttgcagagagccagaagtgcctcagcggcttttgacattaataaatcaaatcgaaaccaaagtgaaaaataataaagtattacaagtaagtggagttctaggagacgatttgaagaaaacctcttctgaccttggaatatttggccataggtatagattagcatttaataaaaaagaaaatggagattatggctattataaagcaaggggaaaagataacgtcaaaataaggataccctgtgattctgaattaccagattggttcaagtttcaacgagatttgtgggaaaaagaaaacgttccggaagagcatcacttttatagggaacatatttttacatag

SEQ ID NO: 75790 - DNA, 267 bp, Saccharomyces pastorianus
atgctgaagtacgtggtgacggatattgggaagatgtgtttgtacatttggccttatagagtgtggtcgtggcggaggttgtttatctttcgagtactgaatgttgtcagtatagctatcctatttgaaactccccatcgtcttgctcttgttctcaatgtttgtttatatactcatatttctatgtgtttatacaattgctattgtttatataatgtagtgacattttctcttaatcttatactaatttctatgacatttatataa

SEQ ID NO: 75791 - DNA, 1557 bp, Saccharomyces pastorianus
atggaagataaagatatcacatcggtaaatgagaaggaagtgaacgagaacactaattctagaataataaaatatgatgccgagaggcgtgcaacccgtactgaaacctcaaagaaagataaatggaaaaacatagttacaatcattgcgtccggttttgctctaataagtgatggttacgtaaatggttcaatgagtatgctgaacaaggtttttgttatggagtacggtaagaaaaactatagctcaaaagtgtcgactagagtttccaacgcagccttagttggtattatttttggccaattctttatgggtatcgctgctgattattatagtagaaaatcttgtatccttgtggccactgctatcttggttattggtagtgctctgtgtgctgcctctcacggtactactgtacctggcatgttttggatgttaacagttatgagaggtttggtaggtattggtgttggtgcagaatatcccactagtacattaagtgctaatgagtctgctaatgaatataccactaccaaaagaggtggtatcctggttatggtgacaaatttgccactagccttcggtggtccatttgctacgatcatctttttaatcgtctacaaaatctgttcaggaacaaaacatttagaggcgatctggaggactgtttttgcaatagggtgcttttggccattgagtgtgttctattttagatggaagactgctactacagaagtctatgaaaaaggtagaatcaagagaaatataccatatttcctagcattgaaattttattggaaaaggttacttggtacatgtggtacatggtttatgtatgattttgttaccttcccaaatggtattttcagttcaacaattataagttccgttatcaaggaccaaaatgatttagtaaaagtggcagagtggaacttactgttgggagttttagctgtactgggtgtaccaattggtgcttatctgtccgatcgtattggtcgtaaatatacgttgatgtttggtttctctgggtacatcatctttggtctaatcattggatgtgcgtacgaccaattgaaaaaaatcacccccttgtttattatcttctacgcattcatgaatatgttaggtaatgctggaccaggtgatatgcttggtgttattagtagtgaagcgtcagcaaccgctgttagaggtgttttctatggtttatctgctgtgactggtaaaatcggttctgtagtaggcgtcgaatgtttccaacccattagggataatttgggtgcaagatggacttttattattgctgcaatttgtggtcttattggtatcattattacatatttctttgttccacattctcttgaaagcgatttaatgaagcaagacgttgaatttcacaactatttggtatccaatggctggactggtaagatgggatttgatgagacagatgaagaatcaatggttagaactattgaagttgaagagaatggtactaattgtagtaagaaaaacgcagaaataatttcagtcagacaggtcgatcaaagttga

SEQ ID NO: 75792 - DNA, 468 bp, Saccharomyces pastorianus
atgcgatcgatttttctgctgcatttgactataaaacgtgtgaggaggaagattttcgaagactggaatttggcagatgggaaatgccttaatggcgccaaatacatgtataaaaggaggaaagaggacgcccgttgtttggtaaaaaggacattcaaagatatgattttgcatgaaataccttgtgacagttgtactgaatccgactacgaatgctcttctgaatttgttagagatgcaaagggtgactgtataccagattatgatcagattgccctttccgatatatgtgacaaagctaatggcgaaactgtatcattagagccattacaattaattaaaggagataaatgcaaaaagcccatggaaattgaggccatgaacattccatgtgaaaaaatcctgagggagagctcgaatggcaagaaaatagtaaccattgaaaacaagtttgactttgaaatttaa

SEQ ID NO: 75793 - DNA, 1107 bp, Saccharomyces pastorianus
atgaaggctgtcgtcattgaagacggtaaagcggttgtcaaagagggcgttcccattcctgaattggaacaaggattcgtattgattaagacactcgctgttgctggtaacccgactgattgggcacacattgactacaaggtcgggcctcaaggatctattctgggatgtgacgctgccggccaaattgtcaaattgggcccagccgtcgatcctaaagacttttctattggtgattatatttatgggttcattcacggatcttccgtaaggtttccttccaatggtgcttttgctgaatattctgctatttcaactgtggttgcctacaaatcacccaatgaactcaaatttttgggtgaagatgttctacctgccggccctgtcaggtctttggaaggggcagccactatcccagtgtcactgaccacagctggcttggtgttgacctataacttgggcttgaacctgaagtgggagccatcaaccccacaaagaaacggccccatcttattatggggcggtgcaactgcagtaggtcagtcgctcatccaattagccaataaattgaatggcttcaccaagatcattgttgtggcttctcggaaacacgaaaaactgttgaaagaatatggtgctgatgaactatttgattaccatgatattggcgtggtagaacaaattaaacacaagtacaacaatatctcgtatttagtcgactgtgtcgcgaatcaaaatacgcttcaacaagtgtacaaatgtgcggccgataaacaggatgctaccgttgtcgaattaactaatttgacagaagaaaacgtcaaaaaggagaataggaggcaaaatgtcactattgacagaacaagactgtattcaataggcggccatgaagtaccatttggtggcattactttccctgctgacccagaagccaggagagctgccaccgaattcgtcaagttcatcaatccaaagattagtgatgggcaaattcaccatattccagcaagggtctataagaacgggctttacgatgttcctcgtatcctggaagacattaaaatcggtaagaactctggtgaaaaactagttgccgtattaaactag

SEQ ID NO: 75794 - DNA, 198 bp, Saccharomyces pastorianus
atgtatttgctgagaggaaaagtttggaagaacaaaaagtatttctttaatggagctgattatcaagcattctttacggggagctttcgaaattttttatattcaaggacatttatgttgtgtgggttattaaacgtgggactttggaaatacatccaagaagcacaattgagctctaacgatgaaccgttaccataa

SEQ ID NO: 75795 - DNA, 198 bp, Saccharomyces pastorianus; identical to SEQ ID NO: 75794

SEQ ID NO: 75796 - DNA, 372 bp, Saccharomyces pastorianus
atgaacgtaactgaaaatgctctattgtttaagtgcggtagcaagggctatattaatcaaacctatacgccgacagaaatttataattgtggggtagctgaaggaaagaaaactgctaaagaaaagaacccaacttattcaattttttatgatacatttctcactgggcagcctgctgaaagtcctgaaacgtttacgtgtggttcgcatggcttcacaaatgcgagttatgtggcaagcgacttttatgcatgtggttttctgcaagggaaaggtacagaaaccaatgcgggaatacataatacaaggccttctcattctctcgccaaatttatcatactgttcatgctagtgttgtatacaattgtctaa

SEQ ID NO: 75797 - DNA, 138 bp, Saccharomyces pastorianus
atgacgtttcagatcctgttcttatttgttttccattttgtttacatcttccgtgcccatcaatacccggcatactttgaagacgaaaaagatacctacataaagataaggatatactcgccaagattgatttcttga

SEQ ID NO: 75798 - DNA, 939 bp, Saccharomyces pastorianus
atgactgctcaacaaggtgtaccaataaagataaccaataaggagattgctcaagaattcttggacaaatatgacacgtttctgttcgattgtgatggtgtattatggttaggctctcaagcattaccatacaccctggaaattctaaaccttttgaagcaattgggcaaacaactgatcttcgttacgaataactctaccaagtcccgtttagcatacacgaaaaagtttgcttcgtttggtattgatgtcaaagaagaacagattttcacctctggttatgcgtcagctgtttatattcgtgactttctgaaattgcagcctggcaaagataaggtatgggtatttggagaaagcggtattggtgaagaattgaaactaatggggtacgaatctctaggaggtgccgattccagattggatacgccgttcgatgcagctaaatcaccatttttggtgaacggccttgataaggatgttagttgtgttattgctgggttagacacgaaggtaaattaccaccgtttggctgttacactgcagtatttgcagaaggattctgttcactttgttggtacaaatgttgattctactttcccgcaaaagggatatacatttcccggtgcaggctccatgattgaatcattggcattctcatctaataggaggccatcgtactgtggtaagccaaatcaaaatatgctaaacagcatcatatcggcattcaaccttgatagatcaaagtgctgtatggttggtgacagattaaacaccgatatgaaattcggtgttgaaggtgggttaggtggcacactactcgttttgagtggtattgaaacggaagagagagccttgaagatttcgcacgattatccaagacctaaattttacattgataaacttggtgacatctacaccttaaccaataatgagttatag

SEQ ID NO: 75799 - DNA, 504 bp, Saccharomyces pastorianus
atgtctactattccctcagaaatcatcaattggaccatcttaaatgaaattatatctatggacgatgatgattccgatttttctaaaggtctaattattcaatttatcgaccaggcacaaacaacttttgctcaaatgcaacgacagctggacggtgaaaaaaatcttaccgaattagacaatctgggccattttttaaagggttcttctgctgcattaggcttacaaagaattgcctgggtttgtgaaagaattcaaaacttgggaagaaaaatggaacatttcttccccaacaagaccgaattggtcaacactctgagcgataaatcgattattaatggaatcaatattgatgaagatgacgaggaaataaagatacaagtggacgataaagacgaaaattccatatatctcatcttgatagcaaaagctttgaaccagtctaggttcgagttcaaactggcgagaattgagttatctaaatattacaacacaaacctataa

SEQ ID NO: 75800 - DNA, 111 bp, Saccharomyces pastorianus
atgatctctgatgaacagctgaactccttggccatcaccttcggtattgtgatgatgactttaattgtcatttaccatgctgttgactccaccatgtctcctaagaactaa

SEQ ID NO: 75801 - DNA, 1008 bp, Saccharomyces pastorianus
atggcagctgcaccatggtatattagacagcgtgacacggatttattgggtaaattcaagttcatacagaatcaagaagacggcagattaagggaagctacaaacggaacggtgaattcacgatggtcgttgggggtcagcatagaacctcgtaacgatgctagaaacagatacgttaacattatgccgtatgagaggaaccgcgttcatttgaagactctatccgggaatgattacattaatgcctcgtatgtcaaagtgaacgtgccagggcagagcatcgaaccgggctactatattgctactcaaggtcccacgcgtaaaacttgggatcagttttggcaaatgtgctatcacaattgtcctttagacaatattgtcattgtgatggtcacgcctctggtagaatacaatagggagaagtgctaccagtactggcctcgcggtggtgtagacgatacggttagaatagcatcaaaatgggaaagtccgggcggcgccaatgatatgactcaatttccctctgatttgaaaatagagtttgttaacgtacataaggtgaaggactattatacggtcaccgatatcaaactcacacccacggaccctcttgtaggacctgtcaaaactgttcaccacttttacttcgacctttggaaagatatgaacaagccagaggaagtagtacccataatggaattatgcgctcactcccacagcttgaattcccgcgggaaccccattatcgtacactgttccgcaggcgtgggcagaacggggacgttcattgccctagatcatctcatgcatgataccttggattttaaaaatattacagaacggtcaaggcattcagacagggctacagaggagtacacacgggacttgatcgaacagatcgtgttacagttacgctcgcaaagaatgaaaatggttcagacaaaggatcagttcctatttatctaccatgctgccaagtatcttaacagtctttccgtgaaccaatag

SEQ ID NO: 75802 - DNA, 642 bp, Saccharomyces pastorianus
atgaatgcagtctcaacgagaagacatggccttggtgacaactctcttcaaaccaacttcagcctttctcaattcatcagcagatgggtcttcgatttgcaaagcagccaaagcgtcggacaaagcagcttcaatcttggacttggaacctctcttcaatttagaagacaagactgggtcagtgacagtttgttcgatggaggcaacgtaggattccaatctttgtctagcttcgtgcttcttggcaaaagcttcatcggcagccttgaactcttcagcttggttaaccatcttttcaatttcttcagaagacaatctaccaacagcgttagagatagtgatgttagaagacttaccggtagacttttcgacggcagtaaccttcaagataccgttagcatcaacttcgaagatagcttccaagactggttcaccagctggcatcattgggatgttcttcaagtcgaattcacccaacaaagtgttttctttacagttaacacgttcaccttggtagactgggaattgaacggtgttttggttgtcagcacatgtagtaaaggttcttctcttgatggttggaacagtagtgtttcttggaacaacgataccgaacatgtcaccttgcataccaacacctag

SEQ ID NO: 75803 - DNA, 1761 bp, Saccharomyces pastorianus
atgctttctgaaaacacgactattctgatggctaacggtgaaattaaagacatcgcaaacgtcacggctaactcttacgttatgtgcgcagatggctccgctgcccgcgtcataaatgtcacacagggctatcagaaaatctataatatacagcaaaaaaccaaacacagagcttttgaaggtgaacctggtaggttagatcccaggcgtagaacagtttatcagcgtcttgcattacaatgtactgcaggtcataaattgtcagtcagggtccctaccaaaccactgttggaaaaaagtggtagaaatgccaccaaatataaagtgagatggagaaatctgcagcaatgtcagacgcttgatggtaagataataataattccaaaaaaccatcataagacattccaaatgacagttgaaggtgagtttgccgcaaaacgcttcatagaagaaatggagcgctctaaaggagaatatttcaactttgacattgaagttagagatttggattatcttgatgctcaattgagaatttctagctgcataagatttggtccagtactcgcaggaaatggtgttttatctaaatttctcactggacgtagtgaccttgtaactcctgctgtaaaaagtatggcttggatgcttggtctgtggttaggtgacgatacaacaaaagagccagaaatatcagtagatagcttggatcctaagctaatggagagtttaagagaaaatgcgaaaatctggggtctctaccttacggtttgtgacgatcacgttccgctacgtgccaaacatgtaaggcttcattatggagatggtccagatgaaaacaggaagacaaggaatttgaggaaaaataatccattctggaaagctgtcacaattttaaagtttaaaagggatcttgatggagagaagcaaatccctgaatttatgtacggcgagcatatagaagttcgtgaagcattcttagccggcttgatcgactcagatgggtacgttgtgaaaaagggcgaaggccctgaatcttataaaatagcaattcaaactgtttattcatccattatggacggaattgtccatatttcaagatctcttggtatgtcagctactgtgacgaccaggtcagctagggaggaaatcattgaaggaagaaaagtccaatgtcaatttacatgcgactgtaatgttgctgggggaacaactttacagaatgttttgtcatattgtcgaagtggtcacaaaacaagagaagttccgccaattataaaaagggaacccgtatatttcagcttcacggatgatttccagggtgagagtactgtatatgggcttacgatagaaggccataaaaatttcttgcttggcaacaaaatagaagtgaaatcatgtcgaggctgctgtgtgggagaacagcttaaaatatcacaaaaaaagaatctaaaacactgtgttgcttgtcccagaaagggaatcaagtatttttataaagattggagtggtaaaaatcgagtatgtgctagatgctatggaagatacaaattcagcggtcatcactgtataaattgcaagtatgtaccagaagcacgtgaagtgaaaaaggcaaaagacaaaggcgaaaaattgggcattacgcccgaaggtttgccagttaaaggaccagagtgtataaaatgtggcggaatcttacagtttgatgctgtccgcgggcctcataagagttgtggtaacaacgcaggtgcgcgcatctgctaa

SEQ ID NO: 75804 - DNA, 1059 bp, Saccharomyces pastorianus
atgtcagattggaaagtggacccagatacccgtaggcgtcttttgcaattgcaaaagattggtgcaaataagaaatgtatagattgtggtgcgccaaatccacaatgggccacgcctaagtttggagctttcatttgccttgaatgtgccggtatccatagagggcttggtgtgcatatatcttttgtaagatctatcactatggatcagtttaaaccggaggaacttcttcgtatggaaaaaggtggtaacgaacctttgactgaatggttcaagtcgcataatattgacctgagtttaccacaaaaagtgaagtacgataaccccgtcgcagaggattataaagaaaagttaacatgtctttgcgaagatagagtatttgaagagcgtgagcatttggattttgatgcttccaagttatcagcaacctctcaaacccctgcatccgctacgcctggtgttgctcaaagtcgagaagggacaccactggagaaccgtcgatctgcaacaccagcaaactctagtaatggtgccaattttcaaaaggagaagaacgaagcttattttgctgagctgggcaagaagaaccaatctagaccagatcatttgcccccttctcaaggtggtaaatatcagggctttggaagtacacccgcaaaacctccacaagaacggtctgcagggtccagcaatactttgagcctggaaaattttcaagctgatcctttgggaacattgagcagaggatggggcctcttctccagcgctgtaaccaaatcgttcgaggacgtaaacgaaacggttattaagcctcacgtccagcaatggcaatccggagagttgtcagaagaaacgaagagagcagctgcccagtttggccaaaagtttcaagaaacgagtagttatggattccaagcatttagtaacttcactaaaaatttcaatggtaatgcagaggatagctctacagcagggaatacaacccatacagaatatcaaaagattgataataacgataagaagaatgaacaggacgaggacaaatgggacgatttctaa

SEQ ID NO: 75805 - DNA, 930 bp, Saccharomyces pastorianus
atgattttcaaaaggttcgttaatttgcttgtgtttttattcctactcggtgctggcttattgacgttttttcttattctgtcaggaggcagagaatctggaacgctgaaaaatttttattggttacaggctgatacaaacggctttaacagcgctccatcgaccacgagatggtacaattacaattggtgcggctacgaagacggccagctagctaattgctctagcagggcgcccgccaagcctttctctcccagagacaattttggtaactctgtcaatttaccatcgtcgttcagaaacaaccgggatacctactattatctatccagggttggatgggccatgctgctgatttccctatttttcatcgtactggcgctggtacccggctttctggctaccttccttcctttcaaggcagtgccagtcctgtactgtgtgttgtcctggttggcctttttcttcattatattggctgcatgcttgtacacaggttgctatgtgaaggccagaaagaccttccgcaacagcgggaggtctgcaaggctgggacccaaaaactttgcgttcatctggacttcggtcttcttgatgctcgtgaacgccatttggtccactatattcagtgctacccacaaggcccactctacctactcggaccacgacatgtatgcccaatatgaaagcccttctgttgacaccggtgctcaaatggagaaatccacttacaatagtggggcgacggacggcgcgggccctgtcacagccgcacctgtggttggacagcctcaacctacaaccaccactactccggctggcaatggcaagttctttcaaaaactgaaaacaagaaagcaggtgccatcagctgagttagaaccagctggggatggtggtcttgccgggccagtgacggtacgcgactag

SEQ ID NO: 75806 - DNA, 552 bp, Saccharomyces pastorianus
atgcccctcctcattccagactatccttgttttagcatcaagaaggaaggaagacccttcattggctcttgcttcttaccactcccctctttcccttttccttcgtgtgaaaacgttccactcccttatattcagagcacccttaaatttggttatttggtcttttttttttatattactccgagacgtcactgcaatttggcaccgccgcgttgggctgcgcggatcatgtcttacgaggtgggaacggctccggcgtcatcgttattatcctcctcctttttcacggtgacgccattttgcgcggcaagaagtctcagaggattgacggtagcattaattgcgcaatcaagactccctgaatcaggagccgctgcaaccttcggatgggccagctgttgttgcaattcccgaaaggtgcattcaattgggcaccagatctggagtgccacggtagtgtcagggaacagcgtgagcgaggaggttatattgaatttaaatgaatggccgagaaattgtgccaattgcgtatatttttcctcaagaggctga

SEQ ID NO: 75807 - DNA, 624 bp, Saccharomyces pastorianus
atggtgtacacaggatttggtttggagcagataagtccagctcaaaagaaaccttataatgaactaactccggaagaacagggtgaacggggtgctgaaatgatcatgaacttcatgacttcctgtcctggaaaatcagttgtgagtggtgtaacagggtttgcactgggtggtgttttaggcctgttcatggcgtcaatggcatatgatacacctcttcatacacctacacctgcaaatacagcagcaactgcaactgcgggaaatataggcgtgggtggaatatcaagaacagttcagcaaatatctgatttacctttccggcagcaaatgaaacttcaatttaccgatatgggtaaaaaatcctactctagtgctaagaattttggctacattggtatgatatatgctggggttgagtgtgtcatagagtcacttagagctaaaaatgatatttacaacggagtaaccgcagggttttttaccggtgctgggctggcatacaaagctggaccacaagctgctttaatgggtggtgccgggtttgctgccttttcagctgcaattgatttgtatatgaaaagtgaggatggtagaccaccacaaaacgattttaaagaatga

SEQ ID NO: 75808 - DNA, 3279 bp, Saccharomyces pastorianus
atgctttttgataacaaaaatcgcggtgctttaaactcactgaacacaccagatattgcttctttatcaatatcatccatgtcggactatcacgtgtttgattttcccggtaaggacctgcagagagaggaagtgatagatttgctagatcagcaaggatttattcccgacgatttgatcgaacaagaagtagattggttttataactcattgggtattgacgatttgttcttctcgagagaatctccccaattaatctcgaatatcatacattctttgtatgcttcaaagctagatttctttgcgaagtccaaattcaacggaattcagccaaggctattcagcattaaaaacaaaattataactaatgataatcatgccatctttatggaatctaatactggtgtcagcataagcgattctcagcaaaaaaactttaaatttgctagtgaagccgtcggaaacgatactttggagcatggtaaggataccatcaaaaaaaataggattgaaatggatgattcttgtccaccttatgaattagattccgaaattgatgaccttttcctggataacaagtctcaaaaaaactgcagattagtttctttttgggctccagaaagcgaattaaagctaacttttgtttatgagagtgtttaccctaatgatgatccagccggcgtagatatttcctctcaggatttgctgaaaggtgatattgaatctattagtgataagaccatgtacaaagtttcgtcgaacgaaaataaaaaactatacggtctcttacttaagttggttaaagaaagagaaggtcctgtcattaagactactcgctccgtagaaaataaggatgaaattaggttattagtcgcttacaagcgattcaccactaagcgttattactctgctttgaactctttgttccactattacaagttgaaaccttctaagttctatttggagtcgtttaatgttaaggatgatgacatcattatcttttccgtttatttgaacgagaaccagcaattggaagatgttctactccatgatgtggaggcagcattgaaacaggttgaaagagaagcttcattgctatacgctatcccaaacaattctttccatgaggtttaccagagacgtcaattctcgcccaaagaagctatatatgctcatattggtgctatattcattaaccattttgttaatcgtttaggctctgattatcaaaaccttttatctcaaatcaccattaagcgtaatgatactactcttttggagattgtagaaaacctaaaaagaaagttaagaaatgaaaccttaactcagcaaactattatcaacatcatgtcgaagcattacactataatttccaagttgtataaaaattttgctcaaattcactattatcataatagtactaaagatatggaaaagacattatcttttcaaagactggaaaaagtggagccttttaagaatgaccaagagttcgaagcttacttgaataaattcattccaaatgattcacctgatttgttgatcttgaaaacactgaacatcttcaacaagtctattttaaagacaaatttctttattacaagaaaagtagcaatatcattcagattggatccttccctggtgatgacaaaattcgaatatccagagacaccctatggtatattttttgtcgttggtaatactttcaaagggttccatatcaggttcagagatatcgcaaggggcggtattcgtatagtctgttccaggaatcaggatatttatgatttgaattccaagaacgttattgatgagaactatcaattggcctctactcagcaacgtaaaaataaggatattccagagggtggctctaaaggtgtcatcttattgaacccaggattggtagaacatgaccagacatttgtcgccttttcccaatatgtggatgcaatggttgacattctaatcaacgatccattaaaggaaaactatgtcaaccttttaccaaaggaggaaatattattttttggcccagatgaaggaactgctggtttcgtggattgggcaactaacaatgctcgtgtgaggaactgcccatggtggaaatcatttttgactggaaaatccccatctttgggtggtattccccatgacgaatatggtatgacttctctgggtgttcgtgcttatgttaataaaatttacgaaactttaaacttgacaaattctactgtttacaaattccaaactggtggtccggatggtgatttaggatccaatgaaattcttttatcttcgccaaacgaatgttatttggcaattctggacggttcaggtgtcctgtgtgatcctaaaggtttagataaagatgaattatgccgcttggcacatgcaaggaaaatgatttccgatttcgacacttccaaattatcaaacaacggattttttgtttctgtggatgcaatggatatcatgctaccaaatggtacaattgtagctaacggcacaaccttcagaaacacctttcatactcaaattttcaaatttgtggatcatgtcgacatttttgttccatgcggtggtagaccaaactcaattactctaaataatctacattattttgttgacgaaaagactgggaaatgtaaaatcccatatattgtggagggtgccaatctatttataacgcaacctgctaaaaatgctttagaggaacatggctgtattctgttcaaagatgcttctgccaacaaaggtggtgtcacatcttcatcaatggaagtgttggcctcactagcgcttaacgataacgacttcgtgcacaaatttattggagatgttagtggtgagaggtctgcgttgtacaagtcgtacgttgtagaagtgcagtcaagaattcagaaaaatgctgaattagagtttggtcagttatggaatttgaatcaactaaatggaacccacatttcagaaatttcaaaccaattgtccttcactataaacaaattgaacgacgatttagttgcttctcaagagttgtggctcaatgatctaaaattaagaaactacctattgttggataaaataattccaaaaattctgattgatgttgctgggcctcagtccgtattggaaaacattccagagagctatttgaaagttcttctgtcgagttacttatcaagcacttttgtttaccaaaacggtatcgatgttaacattggaaaattcttggaatttattggtgggttaaaaagagaagcggaggcaagtgcttga

SEQ ID NO: 75809 - DNA, 678 bp, Saccharomyces pastorianus
atggggtccgaggaagataaaaagttgaccaagaagcagctcaaagctcagcagttcagaaaaagtaaggaggaaaaagatcaagagaaagacgtaaaaaaagagcaagcaccagaaggaaaaagacccaacagtgcagccggaaatgatggtgaagaacccgtgaagaaaaaaagaaaaacacgtagaggccgtggtggtaagggcaaaaatggtaaaaagggcaacagatttattgtctttgtcggtagcttacctagagacatcactgctgttgaattgcaaaaccattttaaaaatagttcacccgaccagatccgtctcagagctgacaaaggtattgcatttttggaattcgatgctgacaaagatcgcaccggcattcaaagacgtatggacattgccttattacaacatgggaccttactgaaagagaagaagatcaatgtcgagctaactgttggcggaggtggtaacagtcaagagcgtctagaaaaattgaaaaacaaaaacatcaagttggatgaagaacgtaaagagaggttgacgaagatgattaacgacggcaaccaaaagaaaatcgccaaaactaccgccactgcagctcaaacctctggaacagacaacaagcctgttcctgcaggaattcatcctgatagagccaaactactcaaatga

SEQ ID NO: 75810 - DNA, 633 bp, Saccharomyces pastorianus
atgttctcatattcagatttctgttctatcggtacggccatgatcttatcggccacaacgttcctaatgggtgttttcttcagtaacatgccatacgattatcatcttttatttaatcctaactctactcaagagcatttcgatttggcactaagacattatcagattttacatgagactccattgccggtgattgttactttgtgcgttgttgccggaattggcttagttggtggtacaattaaggttttcaagccaaaccctgaactgcagatgtttgagtattgttcattggggttgtacgtgttggctatctgtgtgtttctcactaatgtgaaaacaggtatcgactgttctgtgagccataattggggagaagttacggaaaatcagggtttggcagttattgcttcctccaacataattttattagttatgtttgccggtgtaatcatcctacaaattggtttgtggtacagtaactgggatttgcaaaaaagattaaaggagttttatgctgaagaagaaagagaagctgccaatgcctgtaaaaagactgagaaagttgacaatgcgaaaaagaatgataacaaatctaaaggtgctcaaaagaggaagaacgccaaaaaatag

SEQ ID NO: 75811 - DNA, 1119 bp, Saccharomyces pastorianus
atgctactaaatgtaacgtcttcgcaatacataggcacgcctcaatccagaagtctgagtgaaattgacacgtcagaaaccgccagcttatcatcagctaaagaccacatttttgcattatccactgtggttgtatcctcaattacgacgaacctcattgatagtttagaaagttcgattcaggtccccatatcaaccgcatatggtacgacttccttccgcaacaacacttcaagtccacaatatctggttagcaattacacttcctctgttcaaagcaatatcactatcgatagaggactgttaagtacattgaagacttttactacttcacaggtgccaaccatagagccttcaacgactaaactaacaacaccattatctaccacatttacctcaacctctacatcggaaatatactccgtattcaccagcgagaactcagtttatatcatctatgaccaagaatacaaatttacagagcgatcgacaacatttaacactcactttccccaaacatctgtgcttcaagaatcaaatcctccgttaactttcaccatcccatccaataccattaccggggatgctaaactttatcaatatctatctggcgcactaaacactcaagatgcctcagatgccaataatagaaggaccggagttattataggttctacggttggagttgtcattggagttgtaatagtaatttttatcggattcattattattagaaacagacgaaacgtgaaaaatcacagcaaaaagggctttagccatgatattggcaaaagggtaagttgtgatgaggtgacagaaacagaagcaccgccaaatccgttcctaaatgtccttaattataaagtaacaaccaacggcgagggcaaacgagattcctttgaaaatggtagagatttacacagagctagttcctcagatggtatatatatagcacatccttattatgggatggcggatcacgaatccgggagattttcatacgtatcgtcatacaatgaatctacagagtcatccattgaagaaacaagttccagtgcgtctactattactcggccaaatattcagcaaactaatagctttttgagagaaattatttaa

SEQ ID NO: 75812 - DNA, 1020 bp, Saccharomyces pastorianus
atgacatcttggagggataaatccgcgaaagtgcaagtgaaggagtcagaactgccctcctctataccggcgcagactggattgacgtttaatatatggtataataaatggtcccaagggtttgcggggaatacacgatttgttagtccatttgctttgcagccgcaacttcattctgggaagactaggggcgataatgatggccagttgttcttctgtctattttttgcaaagggtatgtgttgccttggccctaaatgtgaatatctgcatcatataccagacgaagaagatataggtaaactggccctgaggacagaggtattggactgttttggtagagaaaaatttgctgactatagagaggatatgggcgggatcggttcatttaggaagaaaaacaagacattgtatgtaggtggtattgatggagcattgaatagcaagcatttaaagccagctcagatagaaagcagaattcgatttgtattttctcgattgggtgatattgatagaatacgatacgttgagagcaaaaactgtggatttgtgaagtttaaatatcaagctaatgcagaatttgccaaagaagccatgagcaatcagacattgctgctacccagcgataaagaatgggatgatagaagggagggtactggactattggtgaaatgggcaaatgaagatccagaccccgctgcacagaaaagactgcaagaagaactgaagttagagtctttaaacatgatggttcatctaatcaataacaataccaatagtgctggcactgaggttaataataagaataatgaaaggttagacaggacatttccagaagcaagtgttgataatgtcaagaaaagactattgccattagataatggaatggagagtgatgatttcatagaaaaattgaagaaagtgaaaaaaaatatcagtagagaaaatatttcatcaaagccatctgttggtaagcttggtggtcccttgctcgattacctctcctctgatgaggattag

SEQ ID NO: 75813 - DNA, 522 bp, Saccharomyces pastorianus
atggtcaatggatcattgggtaacagagaaacggaaacaagtgcagtaaaaatgggtaaagacaacaaggaacataaggaaagcaaagaaagcaaaaccgtagacaactatgaggccagaatgcctgctgtgttgccattcgctaaaccattggcctctaagaaactaaacaagaaggtcttgaagaccgtgaagaaggcttccaaggccaagaatgttaaaagaggtgtcaaggaagttgtcaaggccttaagaaagggtgaaaaaggtttagtcgtcatcgccggtgacatttctccagctgatgttatttcccacatcccagtcttatgtgaagatcactctgtcccatacatcttcataccttcaaagcaagacttaggtgccgctggcgctacaaaaagacctacctcagttgtctttatcgtcccaggtagcaataagaaaaaagatggaaaaaataaagaagaagaatacaaggaatctttcaacgaagttgtcaaagaagttcaagctttatga

SEQ ID NO: 75814 - DNA, 1182 bp, Saccharomyces pastorianus
atgaataggaatacgactaccaataagaacgcgaatttgaataacagtagaaatgctaacgctcccggtgaagcaggtcatcggaacaagacgggattgatatactggactaaccctagcaagtcgggtgcgagctttgctgcgactctggtgagtttgctgatcctcagaaatgtcaatgttatttctgttttacttaagatcggatacatggtgttgttcacgagttttgcggtggagctttctacaaaggtgctatttgataaaggagtagtgtctaggtttggcatgcaagagtctccggaccttgttggcgtcttaaagcctcatatcgaccgcgaattggatcgtctgcctgcgttagaggacagaatcagaaagttagtgtttgcacacagaacaagaaacaattttaccattggtgtttcgctctatttcttgcacggcctatttgctatattctctatgaacactgttttgataatgaccaccatctttttgtacactgtgcctttaatctacgatagaaagcaggctagaattgaccgtgctatcgacaggatgaaggatctagttattcatatgtttcacaaaaattacaacaaggtggttgaaaagactgaaccatacattgacaagattatcccaccccaaaccgatgaaggcagctactcaacctctatcagtaacgaaaacaaatcttctacttctcaacgtaacaagagcggcctttcctcttctgagtttgacaacatgaacgacatgtcagcctctaaaagtggcaaagacagctattctacctctcaatataaccgagccgaatatccggtttctcagaatgagaatattggcaccttaaaatctgggaagcaggaaataccaacagagaaggatttcaacaacaggcatgaaaacttcagtaaaccagatgtcaagacatatgatccaagaacagttgatattgaagaagaattagcagctcatcagcgtgaactggagcaaaacctaaaagatggtgattacaatctggtaggaagcaaggaaatccctgatctaatcaccgttccagctccaactagacacaccactaaacccgccgaaagccaatcgattcccatcaagaataatgaaaccttacacaaaaccacgcacggcctaaagcaaaaattgcaacgcgcataa

SEQ ID NO: 75815 - DNA, 750 bp, Saccharomyces pastorianus
atgttgcagctaaggtttgtgcctggatgggttcccagaaatggtttttttggtttgaaggagacaattggtacagtacataagagattttatgctctggcttctgaacaaccctcaagaaagacagtaaagccgctggactcgaggaagacgtttctcatcgatacatacaagcatttaatggagaacagttctatgattttttttgtccattacaataatctttccaaaacagaagatcaccatttcagattcaagattaaacagacgggagggaaactcacaaaagtaagaaacaacctgttcgaagtctacttgagaaattcgcatctacccgacccatgtggattcgtgaagcgtaaagagcaaaactggaaacatccactcttgccactactgaagggtcctacggccacaattacatacgaagacaccaaccctcaacaagtagccaagctattgaaggttctgcagtcagcacaagacaagctgatggtgattggtgcaaaagtagaaaacgaagttttgaatgtggaaaaaataaacacttttaagactctccccacaaagccggaaatgcagtcgcagttagtcagcgttttgcaaatgctaagtgggttgggtttggttcgtacgttggaaaacagttcaaatgcattgtatttaacactaaaatctcacaatgacaaccaaaaacctaaagaggatgtggagtcaactacagatgcagaatcgaagggatcaaagtaa

SEQ ID NO: 75816 - DNA, 2655 bp, Saccharomyces pastorianus
atggatcctaatagtaacagttctagcgaaacattacgccaagagaaacagggtttcctagacaaagctcttcagagggtgaagggcatagcactgcgacgaaacaatagtaacaaagatcatacaacagatgatatgacaggtagcatacgaacccctacgagcttgcagcggcaaaattctgacaggcaatctaatatgacatccgtgtttacggatgacatttctaccatagacgacaactcaattttattttcagagcctcctcagaaacaatctatgatgatgtctatatgcgtaggtgtttttgttgcagttggcggatttttatttggttatgatacaggtctgatcaacagtattacatctatgaactatgtgaagtcacacgtagcacctaatcacgattcatttaccgcccaacaaatgtccattttggtgtcatttttgtcattgggaactttttttggggctttaactgcaccatttatatctgattcgtatggcaggaagcctactatcattttcagtacaattttcattttctctatcggaaattctttacaggtaggtgctggaggaatcacattattgattgtgggaagggtcatttcaggtatcggtataggcgcaatttcagcggttgttccattgtatcaagcagaagctacacataaatcattaagaggtgctattatttctacctaccaatgggccattacctggggtttgctcgtgtcaagtgcagtgtcgcaagggacacacgcaagaaacgacgcatcttcgtatcggattcccatagggttgcaatatgtctggtcgtcatttctcgctatcgggatgttctttctccctgagagtccacgctattacgttttgaaagacaagctagatgaagcagctaaatctttatcgtttttaagaggtgtaccagttcatgattctgggttactggaagaactagttgaaataaaggcaacgtatgattacgaggcatcttttggttcttcgaacttcattgattgttttatttcaagtaaaagtagaccaaagcaaactctaaggatgtttacgggaattgcccttcaagcatttcaacaattttcaggtatcaactttatattttactacggtgtcaatttcttcaataagacaggagtcagtaatagttatctggtttcatttataacctatgctgttaatgttgtctttaatgttcctggtttgttctttgtggaattttttggtagacgtaaggtgctggttgttgggggtgttatcatgactatagccaactttattgtggccattgttgggtgttccttaaagactgtagcggccgcaaaagttatgatagcatttatatgtctattcatagctgccttttctgctacatggggtggtgttgtttgggttatttcagcagaactgtacccattgggtgtgagatctaaatgtacggctatatgcgctgctgctaactggcttgtaaactttatttgtgctttaattaccccttatattgtagatactgggtcgcatacatcatcattaggtgcaaaaatattcttcatttggggctccttaaatgcgatgggggtgatagttgtttacttgaccgtttatgaaacgaagggtttgacattagaagagattgatgaattatatattaagtcatccactggtgtcgtgtcaccaaaatttaataaagatatcagggaacgcgcacttaaattccaatacgatcctttgcaaagattagaagacggaaagaacacttttgttgctaaaagaaataattttgacgatgaaacaccaagaaatgattttcgaaatacgatatcgggcgaaatagatcatagccccaatcaaaaagaaattcattctatccctgaacgtgttgatattcctcctagtacagaaattcttgaaagcccgaacaaaagtagtggtatgacagtccctgtaacacctcctctgcaagacgttccaatcccgcaaacaacagagcctgctgaaattcgaaccaaatatgtggacctaggaaatgggcttggtcttaatacgtataatagagggcctccctcactctcaagcgactcaagcgaagattacacagaagatgaaataggcgggccctcatctcaaggcgaccaaagtaatagaagtactatgaatgatattaatgattatatggcacgtctcattcacagtacttctactgcaagtaacacgacagataagttctccggtaaccaaagtacccttcgttaccacacggcttcctcacattcggatacaactgaagaggacagcaatttgatggacctgggaaacgggcttgccttgaatgcttataacagaggtccaccttcaattttaatgaattccagtgatgaagaggcaaatggtggtgagtcgtctgataatgtgaacacagctcaagacttggctggtatgaaggaacgaatggcgcagtttgcgcagagctatattgacaagagaggcggtctggaacctgaaactcgatctaatattttgagcacttctctctccgtgatggcagatactaatgaacataataatgaaagcctccactcaagcgaagaaaacgccactaatcaacctgtaaatgaaaataatgatttgaaataa

SEQ ID NO: 75817 - DNA, 1374 bp, Saccharomyces pastorianus
atgacagcactagattctcgaaactggggattgacacccgctatggaaacgggcttgttccagaaaccacaggaccgtatctttataatagagctggaaaattccatagtgtcattcataaactcaaacacagaatcatttcagctaagaccgatgaattcatattataggcttctatcgcaccaaatagctgagtaccacaacttgaaccatgttttggcaagaactcaagatagttgtgtgattcttttcaaaggtgagaatttccaaaagattgaaggaaagccactcttacaagagttgcagctaaacaaaaaaccggaagagtgtacttcctcaagtgagagtattgagaaatcgaacaataacagaatatttcggatcttaaagcggaaagaggtaggtaacgagtgtgattataaaatcgatggcaatacacgcacaccaaatagcaatttgacagccaattcaaataaggaccaaaaaatcgaaatcgatgataaatctaatactgatttggaacaagaaagaattgagaaggaaagactttatgaacaacgtaaacaagaaatttttgataagctcaacaagagtgaagacgatgtaaagtcaaccaacagtagcggtagtagtgatagtgacaatgaatggagtgattggttgaacggagatgactctaacacacaaactagtaacggttcagttagctcttcatcaccattcaattcatctgtgacgacgatacaagtaaacaaacctcaacaacaattttatgatagtcgaagaggaagaggaggaagaagaagaggaacaaacaattacaaagatgcctatagaggccaaagtcgtcggaataaagaaaacggcggttaccaatcgggatattcttcgccatatcttgtgtatcctcctccccaaatgggtggcaatagtctgccaacctaccctctaatgtataaccccgctggtcctgcccccggtcctgcaccttcacccatggtaatgggcaataacacagtcttcatgaacccttacatgtacaatatgaatccccaagggtcctgttcgtttggcaccccaatccctatgtatcccccataccaatatcaatatcaataccaatataacactcagtatcacagcgggccatatagcaatacaccaagctataattctaacaattacacaagatcctcagcaaataagtaccaccattttcaaggaaaaaattcatattctggtgcgattccgaaacgtagtgatgacagtaacagtaataagaatgagggaattcgtagggctagtgttgagggttcgccgtcatctagggatactgattcggtagagatgaaatttgataaattaaacatttag

SEQ ID NO: 75818 - DNA, 1134 bp, Saccharomyces pastorianus
atggatatggaaattgatgaccctatgcatggttcagatgaagatcaattatcaccgactctcgacgaagacatgaatagtgatgacggcaaaaataatacgaaggcgcgttctaatgacgaagacacagatgaagagttggaagattttaattttaaaccggggtcctcgggtatagcagatcataaatcctccaaaccactaaaactgaccaatacaaatataaatcagcttgaccaatggattgagcatttgagtaaatgcgagccactatcagaagacgatgtagcacgactatgtaaaatggcggtggacgtgttgcagttcgaggaaaatgttaaaccaattaacgtgcctgttaccatttgcggtgacgtacacggtcaattccatgacttgttagaacttttcaagattggtggtccttgtcctgacaccaattaccttttcatgggtgattacgtggatagaggatattattctgttgagaccgtatcttacctagttgccatgaaagtcagatatccacatagaattactatacttaggggcaatcacgagtctaggcagattacccaagtatatgggttttatgacgaatgtttgagaaagtacggcagtgcaaacgtgtggaaaatgtttaccgatctattcgattatttccccgttactgccttggtggataataaaatcttctgtttgcatggaggtctctcacccatgatagagacaatagatcaagttagagatttaaatagaatacaggaagtgcctcacgaaggtccaatgtgtgaccttctatggtccgatcctgatgatagaggcggatggggaatcagtccgagaggtgcaggcttcacttttggtcaagacatcagtgagcaattcaatcacactaatgacctatcactaatagcaagagctcaccaattggtaatggaaggatattcttggtctcaccagcaaaatgttgtcaccattttcagtgctccaaattattgttatagatgtggtaaccaggccgctattatggaggtggatgaaaaccataataggcaattcttacaatacgatccatctgtgagacccggtgaaccaaccgtcaccaggaagacaccggattatttcttataa

SEQ ID NO: 75819 - DNA, 330 bp, Saccharomyces pastorianus
atgcaggtggcctccattttacaagtacgtcctccatttttcccacaaatacattttcttctcttcttcttctgcttttttgtttcgaaatcacgagttgcctcacagaggggaactcacttcttggtaagaatctgttttgagcctccgcttcagggctgtaggatgggaaagttatgtcgcccccatctaaaccatcttctatacttgtgttacactgcatatttttctaatatttcttggctatctgtaagcaaatctacatccaggaatagagtccacaagtatattccatataaaagcacagaactacgaagtgtcgcaaattag

SEQ ID NO: 75820 - DNA, 834 bp, Saccharomyces pastorianus
atgcagtgtaacacaagtatagaagatggtttagatgggggcgacataactttcccatcctacagccctgaagcggaggctcaaaacagattcttaccaagaagtgagttcccctctgtgaggcaactcgtgatttcgaaacaaaaaagcagaagaagaagagaagaaaatgtatttgtgggaaaaatggaggacgtacttgtaaaatggaggccacctgcatcttcacatcgtggcgcaattgaagctattaatggcacgcatccatatcagcttagcacagcacaattcaactcgagaagatcggatccatttggttcaacaaagagagatgaatccgtgcgttccattgtagaatcgtttaccgattggtggaaacgcaattccaaaatgttttttcgtgacgaggaagaaggtgtacgaaccgaacacagtgcgagtcaagatgaccaagagttgcagcttttcgaagaagatctcttctcatttcacctaagcccaaatgatatgtcaaccaggaacagcgaacatcaagtgcaaacaccggtgcttttcccgtacgaagctcctactcgaacaaaacaaaacccagcagaaagaaaagtcattgaaattggggacggcgaagaactctctatctatcgagatgtttattccaatcctattcctgtcagctacctagataccttaaacttgaaccactccatgtctgtacggcaaacacaacagcaacaacaacagcggcaacagcagcagtatgtagactcttcatcggtatttcaatgctgtacagactccaattgggcgagaatatttttttgccaccacgattag

SEQ ID NO: 75821 - DNA, 228 bp, Saccharomyces pastorianus
atgagattctttttatttccttacgagcgttttcaattgcaccagccattgtttcttttcttctctatttgctttttaactctaagaatgaaagaacgactcctgcgttataatcttagatatctatatgctttgagaaatgtgtttggtactttttattctaatcaacgtagtaatcaaaatgttgcaaccttatcgaaagagccatttcttgttttcagcttttaa

SEQ ID NO: 75822 - DNA, 78 bp, Saccharomyces pastorianus
atgagagccaagtggagaaagaagagaactagaagacttaagagaaagagacggaaggtgagagccagatccaaataa

SEQ ID NO: 75823 - DNA, 963 bp, Saccharomyces pastorianus
atgatacgttcaatatttataccgccaactagtataactgccacttctcgactgttctacggaatgagggcgtattcaacaaaacttgaaaaggcttcactccaaaaatatctgcatgatcctgttaaagtgactgtgataccaataacggacaaagaatcattcatttactataagcataccgataatctctttaatagtcagtctagaatattaaaagcagaaaagtggatcgttgagaaatcagcaaagctttggagaaaactgaaaaagtcccctaaatcgtataataaaaaaatagtgtccatggtgcagtctctgctaaatagcacaccctggtcagaaaatagtctgttaaccataccaagtgaaagctatatattgaagagaattaagggagagaaagataagacccaagagattcgactcacattgaaagattataccgtaaaggcagaacaggtcgatactcaacccttacacgtgtattatccccctggaatttctagccctgatgagtgcttgagacaaatgaaaaagctctaccaagaaggcttaatttatcacaaaaaatggactttatattgccttttaggtctcccgctgacaattcctctaattttaataccgcttataccaaatgttccagggttctacctatcttatagagcttatgttaatatcaaagcttaccttggtgctaagcacttgaagagtctactggaaagttcaaaacaaaatttagaattcagggaactattgggatatacggaagtatataaacgtgggaccagcagccgtacgcagggcaatcaaaaggaatcaaaaggtgcaccagaattactacttaacaagaaaacccttcctttgatcttagatttcttagaggttcatgaactcgaaagcgacttgaacaaagtcatccttcaagaatcgaaatctcaagagaaaaacaaaatttaa

SEQ ID NO: 75824 - DNA, 1287 bp, Saccharomyces pastorianus
atgactgctgctaaaccaaatccatatgctgccaaaccgggcgactatctttctaatgtaaataatttccagttaatcgattcgacgctgagagaaggtgaacaatttgccaacgcattcttcgatactgaaaagaagatcgaaattgctagagccttggacgatttcggtgtggactacatcgagttaacctcaccagtagcatctgaacaatcaagaaaggactgtgaagctatatgtaaactaggtttaaaggccaagatccttacacacattcgttgtcatatggatgacgccaaagtcgccgtagagactggtgtcgacggtgtcgatgtcgttatcggcacctccaaatttttaagacaatattcccacggtaaggatatgaactacatcgccaagagtgctgttgaagtcattgaatttgtcaaatccaaaggtattgaaatcagattttcctctgaagattccttcagaagtgatctcgttgatcttttgaacatttataaaaccgttgacaagatcggtgtaaatagagtcggtattgccgacacagttggatgtgccaacccaagacaagtatatgaactgatcagaactttgaagagtgttgtttcatgtgacatcgaatgccatttccacaacgatactggttgtgccattgcaaacgcctacactgctttggaaggtggtgccagattgattgacgtcagtgtactgggtattggtgaaagaaacggtatcactcctctaggtgggctcatggcaagaatgattgttgccgcaccagactatgtcaagtccaaatacaagttgcacaagatcagagacattgaaaacctggtcgctgatgctgtggaagttaacattccattcaacaaccctatcacagggttctgtgcattcacacataaagcaggtatccatgccaaggccattttggctaacccatctacctacgaaatcttggaccctcacgatttcggtatgaagaggtatatccacttcgccaacagactaactggctggaacgccatcaaagccagagtcgaccagttgaacttgaacttgacggatgaccaaatcaaggaagttactgctaagattaagaagctgggtgatgtcagatcgctgaatatcgatgatgttgactctatcatcaagaacttccacgcagaggtcagcactcctcaagtattatctgcaaaaaagaacaagaagaatgacagcgatgtaccggaactggccaccatccccgccgccaagcggactaagccatccgcctaa

SEQ ID NO: 75825 - DNA, 258 bp, Saccharomyces pastorianus
atgttaccacgttcagcattagcacgctcattgcaattacagcgcggtgtggccgcaaggttctactctgaaggttctaccggcaccccaagagggtcaggctcagaggattcgtttgttaaaagggaaagggccacggatgacttcttcgttaggcagcgtgagaaggagcaactacgccatttgaaagaacaactggaaaaacaacgaaagaagattgattctttggaaaataaaattgactcgatgaccaaataa

SEQ ID NO: 75826 - DNA, 915 bp, Saccharomyces pastorianus
atgatttctgactacgatgctcttttgcaattcaacaaaaaacctgtttcgcaagaaatgattcagttcttagccacttctactgcttccataattaaaatcagggaaaataataatccaatccaaggatgtcgcccaccagacttatctatcttcattaaaaacgtggtaattcagtcaaatgttcaaacgccaactttaatggccacatcagtttatttaaacaaactgaaaagcgtaataccaaaaaatgtgtacggtattaacaccacaagacatcggatatttctcggatgcttgatattagctgccaaaactctgaacgattcttctccctggaacaaacactggaccacgtacacagaaggtttactcagaatacgtgaggtgaataccatcgaacgagaactattagaatatttaaattgggatgtgaggataactacaccggatttgattgattctctttcttacttcctcgggcctatcaaggaacaactatttttacaaaggagacaagaaatgctgttgttcaatgcaccaagtcccggccaactgaaagaatatataaatcatagaagaccggtttcgcattctagaacttcttctgctatatcggttccttcactgacatccatggcaacagtttcgacaacagactcaaggtcttctctactggcaaaataccaaccgtccctaccgttggtggaatctgacaacttcaacaaaaaaaatcatgtgccgttaaggaataataacgatatctgtaataatttcagggcagaggaaaacatacactcagtaaaccatattgatgtaacaatgggaagttcaccagtaatgtcgcataagcccacaattcaccaacggttaaattttacaaggaggggctggtcatcgtttttcaagcaataa

SEQ ID NO: 75827 - DNA, 513 bp, Saccharomyces pastorianus
atgagtaagaatgttggtaagctagtgaaaatatggaatgaatcagaagttttagttgatagaaaatcgaaatttcaagcaagatgttgcccattacaaaatcaaaaggatataccctccatactccaagaactaacgcaaaacaacaaaagcgtctccaaggcatcccacatgcacatgtatgcctggagaacggccgaggtatcaaataatttgcacttacaacaagagcagaaaaagaagggcaataaagcaaataagagtaataatagtcatgttaacaagtcaaggaacataacggtgcagccaaagaacattgagcaaggatgtgctgactgtggcgaagctggtgctggacagcgtttattgaccttacttgaaagagcaaacatattcaatgtcttggtaatagtgaccagatggtatggtggcacgcctttgggctcatcaagattcagacacatttcaacatgtgctgtggaaaccttaaagaagggtggatttcttccttaa

SEQ ID NO: 75828 - DNA, 1587 bp, Saccharomyces pastorianus
atgaattatggcgtggagaagctgaaattgaaatattcgaagcatgggtgtattacttgcaagatcagaaagaagagatgctctgaagataaacctgtgtgccgggactgtcgtcgattaagttttccctgtatctatatatcagaatctgttgataaccagtctttgaaaaaaataaaggcagatatacagcaacagttgatcagcaagaaaagaaagcatgctcctgacagtgctcagaaagcggccgtggccacccgtactcgacgggtcagtagcgacgaacaggataaccaggtatatttgtcaaaaccgctggaagattgcatttctcagaagctggactctatgggattgcagctgtacaactactacaggtctcaccttgcaaacataatttccatcgcgcccatgaaccagaactactatctgaacattttcttgccaatggcccacgagaatgatggtatattgtttgctattcttgcttggtcagctaatcatttgtctatatcatcatcaaatgagctgcgaaaggatgaaatatttgtcaacttggcgaacaagtatacatacatgtcgttatcgcatctaaagacaaacgagggctcaagtgcctgtgctagactggggtttctatattcactagcacaaatcctaatcttatgtggttcagagatatgtcagggtgatgtgaaattttggaagatattattgaatgtaggaaaaaatttgatcgaaaaccatgtgggcaaggatgtctcacggatactaaccactactacagaagaaccctccctagaggagaggataatcttccccaatttcaattccgttgttaagtactggctgattgtgaattttatatatcatgatattttgaatttcaatacaacgtccttcccgatcgaacaatacgagaaatttttccaaagggatcagaactctttacccagctcagccaactttattgagtcaatagactcgccaattgaggaaatagaccctttaattggcatcaacaagcctattttactactattgggacaagtcacaaatttgacgaggtttttgcagactatggaacaggaagaaatgctagagcacggcgataaaattttgagtttgcaagtcgagatttataaattacaaccttcgcttatggcgctggaacatttggatgatgaaaagaaattttactatttagaactattcgagataatgaaaatttctaccttaatgttctttcaattaactttattaaagattgacaaagattcgctggaactacagatactgagaaacaaattggactcgaagctagacaaggtcatcggaacttttttggaaggatcgttatgcttcccacttttcatttacggtgtatgcattcaggtagaagatatggagaaaaaaatagatttggaagccaaatttgacgacattttaaaacgatataaatgttacaatttcccaaatgctagattattgatacggaaaatttggccaaacgaggctgatggcatcagtgagcatgacctggtccacatgattgacgaattagattacaatattaattttgcctga

SEQ ID NO: 75829 - DNA, 672 bp, Saccharomyces pastorianus
atggaggataaggagaaacttattgtatactcaaataccagttcggtatttacatatagtgcagaaataaggccaaattttaaaatatctgtatctcaaagtcaaggttttgcctggaaccaggacttattcgccacacaataccaacaatcatataaggtggtatatgatgcacacgaggacaactttgatgagttaattttgaagatcaagggcaaattaaaggcaaattctaataaaagagctaaaatgaagtctaaggctaaattaacaaggactgcaaagcagagaagggaaagccccgtttgtgaaagggacgagagtgacgaggataatgatagtgatcactaccaaagaatacaagtgctagatggccatgaatttccgagagcaaatcggtataaatctgtatgggctcatgacgtccactcgaatgaagatagtacaagcgacggggaaagcaatcatgatatagatatgattggcggcactggcacgtcgtatgcaggagcagccataatggataggccacgcaggaaatctgagagaagcataagctttgtggaggactccaagacaggcgattacaggtatcaaatcgggcaggtggatgttgtagaggtggactcggacacccctgaaaataatcacctaaaatggttaattaaataa

SEQ ID NO: 75830 - DNA, 1161 bp, Saccharomyces pastorianus
atgtccgccgctactgttggtaaacctattaagtgcattgctgctgttgcgtatgatgcgaagaaaccattaagtgttgaagaaatcacggtagacgccccaaaagcgcacgaagtacgtatcaaaattgaatatactgctgtatgccacactgatgcgtacactttatcaggctctgatccagaaggacttttcccttgcgttctgggccacgaaggagccggtatcgtagaatctgtaggcgatgatgtcataacagttaagcctggtgatcatgttattgctttgtacactgctgagtgtggcaaatgtaagttctgtacttccggtaaaaccaacttatgtggtgccgttagagctactcaagggaaaggtgtaatgcctgatgggaccacaagatttcataatgcgaaaggtgaagatatataccatttcatgggttgctctactttttccgaatatactgtggtggcagatgtctctgtggttgccatcgatccaaaagctcccttggatgctgcctgtttactgggttgtggtgttactactggttttggggcggctcttaagacagctaatgtgcaaaaaggcgataccgttgcagtatttggctgcgggactgtaggactctccgttatccaaggtgcaaagttaaggggcgcttccaagatcattgccattgacattaacaataagaaaaaacaatattgttctcaatttggtgccacggattttgttaatcccaaggaagatttggccaaagatcaaactatcgttgaaaagttaattgaaatgactgatgggggtctggattttacttttgactgtactggtaataccaaaattatgagagatgctttggaagcctgtcataaaggttggggtcaatctattatcattggtgtggctgccgctggtggagaaatttctacaaggccgttccagctggtcactggtagagtgtggaaaggctctgcttttggtggcatcaaaggtagatctgaaatgggcggtttaattaaagactatcaaaaaggtgtcttaaaagtcgaagaatttatcactcacaggagaccattcaaagaaatcaatcaagcctttgaagatttgcataacggtgattgcttgagaaccgtcttgaagtctgatgaaataaaatag

SEQ ID NO: 75831 - DNA, 594 bp, Saccharomyces pastorianus
atggaagcaagacggtatggaccgaatattattgttacaggaacaccaggatgtggcaagtcgtctacgtgtgagtttttaaaaaataaactgaaggattacaaatactataacatttcggatttcgccaaagataacgactgtttcgaaggatatgatgagggccgtaaatcgcacattgtcgatgaagacaaactgctggacatgctagagcctcttttgagacagggaaatagtattgtcgattggcatgtcaatgatgtgttcccagagaggctgattgacttggtggtggtgttgagatgcgataactctaacttgtattcaagattgcatgcaagaggctatcatgactctaagattgaggaaaacctcgatgccgagattatgggtgtcgtcaaacaggatgccgtggaatcatacgaaccgcacattgtggtagagctacaaagcgatacgaaagaagatatggtatctaacgtatcccgtattgttgcttgggaaaagatgtggttagaacaacatccagatggagtcacaaatgaatatcaagggcctcgtagcgatgacgaagacgatgaagacagtgagtag

SEQ ID NO: 75832 - DNA, 576 bp, Saccharomyces pastorianus
atggaaaaatttggtttaaaagcgctagtaccgctccttaagctagaggacaaagaactttcaagtacatatgaccattccatgaccttaggagcggacttatcgtcgatgctatattcgttgggtattccaagagattcacaagatcacagagtcctcgatacttttcaatcaccgtgggcagaaacatccagaagcgaagtggagccccgatttttcacaccagaatcattcaccaatattccgggcgtattacaatccactgtaactccaccatgcttcaattccatccaaaatgaccaacagcgtgttgccctttttcaagatgaaactctatttttcctcttctataaacaccctggtacagtcatccaggaactaacgtatttggaactcaggaaaaggaactggagataccacaagacgttgaaggcctggctcaccaaagatcctatgatggaacctattgtatccgctgatggtttaagtgaaaggggatcatatgtgttttttgacccacaaaggtgggaaaagtgccaaagagatttcttattgttttataatgctattatgtaa

SEQ ID NO: 75833 - DNA, 303 bp, Saccharomyces pastorianus
atggagcttggagctgctacagtatgtgtaacagccgtctgtttcaatttcttggtcgcgtattcctctcccccactaacattatccattctgtcttccagcatatgtttggatgattttttgggagaaggagtaccttctgttggcttatttttcatggaagtgaagaatctagccaaagtggcttgtttaggcttcttaccggcagaggaaggtaatgaggatgacatcaataatggcaatcttgatttcaagggacgtgcagatgaaagaaggcaaccggtcagtaatctgcgcatgtaa

SEQ ID NO: 75834 - DNA, 357 bp, Saccharomyces pastorianus
atgattgttctgcctcttgctccctttccttctgatcctggcactcatacgaacggctctttcttctacttcttaaaactcctatttgtcattgaaagaaactttcatcattacccggatgattctctatacgtagccacaatttcagacaaccatacttccaaaatcaagtactttgaacaacataaggccccaccaaccttccgtaagacttgcaataggaattcgtactgcagccgctggttctattgctgtttaactctgtcatctttttgctcgcttcgatgtgttcctccacttgagatggctgatggaatttttcaccttaacgcgaaaacgcgtgaaagtgaaatttag

SEQ ID NO: 75835 - DNA, 1365 bp, Saccharomyces pastorianus
atgtcgaaacaatttgttagatctgcgaagaatttggtgaaagggtactcttctacccaggtcctggtaagaaatgcaacgtcaaacgacaatcatcaagtgtccaaggactcgttaattgagctggctgaaaaatcatatgatagcgcagatttcttcgaaatcatggatatgctggacaaaagacttaacgacaagggcaaatactggaggcatatcgcaaaggcattgacagtaatagattacttgatcaggtttggtagtgagaattgtgttctttggtgtagagaaaatttatacatcatcaagacattgaaggagttcaggcacgaggacgatgagggcatagatcaaggtcaaatcgttagggtcaaagcaaaagaattgactgcattactatctgatgacgaaagactgaacgaggaaaggaacatgaatatcaagggaagaaacaggaaaggaagaagaagaaggggaactgggcgcagtgatgaaaatgacgatgatttgcaaagagccattagtgctagcaggttgacggcggaagaagacgaaagaagaagaaaacaggacgaggattatgaaacagctttgcagttgagcaaagaagaagaggagctaaaaagattgcaagatttacaaagaatgcaacaacagcaaggccaacaacaattgcaacaacctatgtattatgatatttttggtaacccaatcactcctgaggaatacgcacaatttcaattgcaacaacagcaacaacagcaacaacaacagttgcaacaacaaccaatgtactacgatgtattcgggaatcctataacacccgaagaactagcacagtttcaacaacaacaacaactacaggaacaacagtacttagcttctatgcaacagcagcaacaggcaatgtccaacaatccatttgccaaatcagaacagagctcaagttcaccaaaacggaaccaactagtagcagcttcttctccacagcaactgcaacaacaaaaacaacaagagccattgattcaaaacaggacaggcaatcaatcaatgacagacaagtatagtaaactaaacgagctactagccacaggaacaggtattgatacattcggaaatgtaggggaggctcgtattcctgcccaacatacgaagacaggaacattcatcaattctcaaggaacaggatataggcaagtatcggatgatccaaaccacaatccgtttttgaacagtcagtatacaggtttaccaagcactagcgtcgtaccaacacaaacaggctatggctttggtaaccagtctcaacagcagtctcaaaataatggctcaaataaccggggatatactctaattgatttatga

SEQ ID NO: 75836 - DNA, 1521 bp, Saccharomyces pastorianus
atgggttccatcaataataacttcaacactaataataacagtaatacggatctcgatcgggactggaaaactgcattgaatattcccaagaaggataccagaccacagacagacgatgtcttaaatacaaagggtaatacttttgaagatttttatttgaaaagagagctgttaatgggtatttttgaagccggttttgaaaaaccatcccctattcaagaagaggctattccggtagcaataactggtagagacatattggccagagcaaagaatggtacaggtaagacagccgcatttgttattcctacgttagagaaagtcaaaccaaagttgaataaaattcaggctttgatcatggttcccacaagagagttagctctgcaaacttcccaagtcgtccgtacattgggaaaacactgtggtatttcatgtatggtgaccactggtggtaccaatttgagagacgatattctaagattaaatgaaacagtccatattttggttggtactcctggtagagtgttggatttagcttcgagaaaagtagcagatctgtctgattgttcattattcatcatggacgaagccgataaaatgttatctcgtgacttcaagacaataattgaacaaatcttatccttcttacctccaactcaccaatctttattatttagcgctactttcccactaacggttaaggaattcatggttaaacatctgcataagccttatgaaattaatttgatggaagaattgactctaaagggtattactcaatactacgcctttgttgaagaaagacaaaagctacattgtttaaatactttattctctaagcttcaaattaatcaagccattattttttgtaattctactaaccgtgtcgaattactagccaagaaaatcactgatttaggctattcctgttattactctcatgcaagaatgaagcaacaagaaagaaataaagttttccacgaatttcgtcaaggtaaggttcgtacattggtctgctccgatttattgacccgtggtatcgatattcaagccgttaatgtcgttatcaatttcgatttccccaaaacggcagaaacatatttacatcgtattggtagatccggtaggtttggccacttgggtttagcaatcaatttgattaactggaatgatcggtttaacctttataaaatcgaacaagaactgggcactgaaattgcggctattccggctactatcgataagtcattgtatgtggctgaaaatgacgaaacggtacctgttccattcccgatagagcaacagagctatcatcaacaagcgatacctcagcaacaattaccatctcagcaacaatttgctattcctccgcagcaacatcatccacaattcatggttcctccttcgcatcagcaacaacaggcgtatcctccaccgcaaatgccatcgcagcaggggtatcctccacagcaggaacatttcatggcgatgccacctggtcagtcacaaccccagtattaa

SEQ ID NO: 75837 - DNA, 132 bp, Saccharomyces pastorianus
atgtacaatcagataataaacacttttattgatgattgtcttttcttgcaaaccccaatgttacaatcgcccattagttctaagattgtgttgtcctttttcttacgaaatttttttccctcccttttttga

SEQ ID NO: 75838 - DNA, 1548 bp, Saccharomyces pastorianus
atgtttcaacgaaagactttacagagaaggaacttgaaagggctcaatcttaacctgcacccagatgtgggcaataatggccaattgcaggaaaagacagagactcaccagggacaatctcgaatagaaggccacgtgatgtctaacattaatgcaatacagaataatagcaacctgtttttgcgaagaggcataaaaaaaaaactgacgttggatgcgtttggtgatgaccaagctatatcgaaaccaaacactgtggtaatacagcaaccgcaaaatgaacctgttttagttctgtcttctctatcacaatccccgtgtgtaacatcatcatcatctttgtccacgccatgcattatagatgcgtacagtaataatttcggattatcgccatcatccacgaattctactccctctacgattcagggattgtccaatattgcaacgccagttgaaaacgaacattcgatatcactaccacctttggaggaaagcctatcgccagccgcagcagatctgaaagatacgttgtcgggaacttcaaatggtaattatatacaactccaggacttggttcagttggggaaaattggtgctggaaattctggaactgtggtgaaggcactacatgttcctgattccaaaatagttgccaaaaaaaccattcctgtggaacagaataacagtacaatcatcaaccaattagttagggaattatctatcgtcaaaaacgttaagccccatgaaaacattatcaccttctatggagcttattataaccagcatataaataatgaaatcataattttaatggaatactctgattgtggttctttagataaaatactgtccgtttataaaaggtttgttcaaagagggactgtttcgagtaagaaaacttggttcaacgaattaacaatatcaaaaatagcgtatggcgtactaaatggcttggatcatttgtaccgacaatataagataattcatcgtgatatcaagccttccaatgttctgattaatagtaaggggcagattaagttatgtgattttggagtttccaaaaaactaataaattctatcgctgatacatttgttggaacgtccacttatatgtcaccagagaggatacaaggaaacgtttattctatcaaaggggacgtttggtcattgggcttaatgatcatcgagctggtaactggagagtttcccctaggtgggcataacgatacacctgatggcatattggatttgctgcaacgtattgtcaacgagccttcaccaagattacccaaagaccgtatctattccaaggaaatgacggattttgtcaataggtgttgtattaagaatgaaagggaaaggtcatcgattcatgaattgctacatcatgatcttataatgaaatacgtatcaccgtctaaagatgataaatttagacattggtgtagaaaaataaaatctaaaataaaggaagacaagagaattaaaagagaagccttggaccgtgccaagttagaaaagaaacaatcggaaagatcaacccattga

SEQ ID NO: 75839 - DNA, 177 bp, Saccharomyces pastorianus
atgttttcatggggcttaacgtttttgacgatagataattccctaactaattggttgatgattgtactgttattctgttccacaggaatggtttttttggcaactattttggaatcaggaacatgtagtgccttcaccacagttccagaatttccagcaccaattttccccaactga

SEQ ID NO: 75840 - DNA, 357 bp, Saccharomyces pastorianus
atgagtaatattttggcagtgttcaaccctccaccacaaaggaagctggaaaaagaagagactatggattgcgttccttgtcaagtcatgagcactatgttttctgttggatttggctcatacttggcatctgggaaaccattcaagtatggtaaaaaagaagccaaaagaggcatttctctgactgaatttgaaaaaagaaacccacaatggtggaaagtaactttacgtagcttcggtgggttattaatcgccttcggtttcgttagaggaaccgaaggttggttgtggcataaaaataaagaatataagaactataagaaattaagtaacgatggtgaaacacaggctaactag

SEQ ID NO: 75841 - DNA, 1569 bp, Saccharomyces pastorianus
atgccggaattaacagaatttcagaaaaaacgtttagagaacatcaaaaggaataacgatttattgaaaaaactccacctttctggagtagcatctcaaattaagcacgaggctggggtgttggaaaaatctagagctcctgcaaaaaagaaacaaaaaacaactaataccagagcaaccaagtctgcgagtcccactttacctacacgaagatcaagaaggctaaggggtgagtctgcagacgatgtgaaaggaatacccaatgtgaacgataatcagttgcttaaaatgggttctccagatggccaggataagaattttatagacgcaataaaggagaaacctgtaataggagatgtgaaattaagtgatctgatcaaggatgaagaggaaagtgcccttttagagaaattcaagaggtttaataacggaaacttttcttctggtgatttctttgaagaaataaaaaagagacagggtgacgttacggggattgacgaatttgatttggatctatatgacgtttttcaaccgaacgaaattaagattacatacgaaagaatctctgccacttacttccatcctgctatggaaaaaaagctaataattgcaggtgatacaagcggtactgtgggtttttggaacgttagagatgaaccactagctgacagcgaagaggaccgaatggaagaacccgatatcaccagagtgaaactatttaccaaaaacgtcggccgtattgattgcttccctgcggacacatcgaagatattgctcacctcttacgacggaagcatcaggtcagttcacttgaataacttacagagtgaagaggttctcaccttgaaaaatgaatatgacgattcactgggtatcagcgattgccagtttagctacgaaaacccaaatgttttattcctcaccacattgggtggtgaattcaccacgtttgacacaagagtaaaaaaatcagagtataatctgcgaagactcgcagacaagaagatcgggtctatggcaataaatcctatgagaccctacgagattgccaccggatcacttgatagaacactcaaaatctgggatacaagaaaccttgttgaaaagccagagtggtcacaatatgaagactatcccagtcatgaagttgtctccacatatgactcaagattgagcgtctccgcagtttcttactcaccgacagatggcaccttagtgtgcaatggctatgacgataccatccgcttattcgatgtcaagagtagggatcacctttctgcgaagttggagcccaaactaacgatccagcacaattgccaaacaggaagatggacaagcatcctcaaggccagattcaagccgaacaagaatgtttttgcaatagctaacatgaagcgcgccatcgacatatacaacagcgaaggccagcaactggctcacctacccacagctactgtcccagctgtaattagttggcacccgctgcgaaactggattgcaggtggcaattctagcggcaaaatattcctctttactgatgactccggaaccataaagcaggaagaatga

SEQ ID NO: 75842 - DNA, 1284 bp, Saccharomyces pastorianus
atgcatcataactcacagtctttgagctctggacacatcaggagccccgaggatgaaaatgtggcacctataggtaatcttaaacacaggactggatccctcagtcatatttcatctgcgcacccgagggtcgcacttagcgacgttaccaatatagttgcgacaaactctagcaacaacagcataagtaagccaaaagtcgccccaattaaagaaagattggattcagctgcgataattgaggaagaaaggctggatgcgaatagtgttgcacagagaaaagaagctgatcataacgatttgttaacggacagggaacaagaggaacccgttgaagacgacggagaaagcgaagaggatgaagaagaagaccaggagcctctactgctgcaacattatgctagtgatacattggtctgggagcatgcatttaggacttactatagaactacattagatcccaatgatgatgacgtgtacgatgtggtcatggttgccgaattatctaatgagatattcgagtatatgaggaaattggaagacctgtataaacccaatccgtactacatggataaacaaccagagttaaggtggtcgtttcgaagcacactgattgattggatcgtccaagtacatgaaaaatttcaacttttacctgaaactctatatctctgcattaatataatagacagatatctgtgcaaagaagttgttcctgtaaataagttccaacttgtgggtgcagcctcactcttcattgctgctaaatatgaggaaatcaactgtcctacaatcaaggatttcgtatacatgtcagaaaactgctactcaaggaacgacctgctggacgcagaaagaactattttgaacggcttagaatttgaattgggttggcctggtccgatgtcatttttacgaagaatcagtaaggcagacgattacgagcatgatacgagaacactggccaaatatctattggaatctacaataatggaccatcgactggtctccgctcaacctagttggttagctgctggtgcatactttctaagtaagattattctgggccaaaatcagtggtctctggcgcacgtctactattccaattatacacaagaacaaattcttccgttggccaccattattttagaaaattgcagatatgcctctaaacgtcataacgccatatggagaaaatattcttcacgtcgttatttgcattcttcacagatcgtagcgaagtggatagcattagctgagcacagagtagaaagatctaactaa

SEQ ID NO: 75843 - DNA, 744 bp, Saccharomyces pastorianus
atggatcagatgatatataaacaaaaagtgggatacagcatatcgacgcctccactacaaattaacagaaggatgaaaaccaataagaaaatttctaaaagaagaagcctgaaaaatctccatggtgccttaaaaggactattgaaagagtccggcaagaagagtgagtccaaaatacgaaaacatagcgattgcaatcctgttcatcgagtatatccgccaaatatcgaaaaacggaagaccaagaaggacgatggaatttcacggccaattgctgaaagaaatggtcatgtgtatataatgtccaaggaaaaccacatcatccctaaactaaccgatgatgaagtcatggagcgccacaaactagcagacgaaaacatgagaaaagtgtggtccaacatcataagcaaatacgagtctattgaagaacaaggagacctcgtagacctgaaaactggtgaaatagttgaagataatgggcatatcaagacgctgacggccaacaacagcacgaaagataaaagaacaaaatacacaagcgtgctcagagacattatcgacatcagcgacgaggaagatggtgataaaaatgatgaatatactctttgggctaacgatagcgaggcaagcgattcagaggtggatgctgacaacgacactgaagaggaaaaagacgagaaattgatagacgcagatttcaagaagtacgaggccaaactctcgaaaaggatattacgagattaa

SEQ ID NO: 75844 - DNA, 609 bp, Saccharomyces pastorianus
atggccgaagaaagtaccgactttagtcaattcgaagaggagagaaacaacgatcagtataaagtttcagccaaaaaaactgttgacgaatacaaaaatctggatgctgaagatgaatccttggcgaaatggaaagagtctttgggtctaagttcagacgtcttgccattggaatttcccggtgacaaaaggaaggtggttgttcaaaaaattcaattactagtcaatacagaaccaaatcctatcacatttgatcttaccaacgaaaagacaatcaaagaactggcatctaaaagatacaaaattaaagaaaattctatttataagttgaagattgtgttcaaagttcaacatgaaattatcacggggttgcgatatgtccagtatatcaaaaaagcgggtattgccgttgacaagatagacgatcatttgggatcgtatgctcctaataccaagaccaaaccattttatgaggtggaactaccggaaagtgaagcacctagtgggtttttagcaagaggcaactacagtgccgtatcaaaattcattgatgatgataaaactaaccacttgactttaaattggggggtcgaaattgtcaaaaaataa

SEQ ID NO: 75845 - DNA, 1110 bp, Saccharomyces pastorianus
atggatacagatttagatgtgcctatgcaagatgctgttaccgaacagctgactcccacagtatctgaagatatggatctcaacaacaattcatcggataataatgcagaagaattctcggttgatgatttaaaacctggttcctcgggcatagcagatcacaaatcttccaaaccactagaattgaataacacaaatataaatcagcttgaccaatggattgagcatttgagtaaatgcgagccactatcagaagacgatgtagcacgactatgtaaaatggcggtggacgtgttgcagttcgaggaaaatgttaaaccaattaatgtgcctgttactatttgtggtgacgtacacggtcaattccatgacttgttagaactttttaagattggtggtccttgtcctgacaccaattaccttttcatgggtgattacgtggatagaggatattattctgttgaaactgtatcttacctagttgccatgaaagtcagatacccacatagaattacgatactgagaggcaatcacgagtctaggcagattacccaagtatacgggttttatgatgaatgtttgagaaagtacggcagtgcaaacgtgtggaaaatgttcacagatcttttcgattattttcctataaccgcattagtagataataaaattttctgtctgcatggaggactttcccccatgatagaaaccatagatcaggtgagagagttgaacagaatacaggaagtgcctcatgaaggtcctatgtgtgaccttctatggtcagaccctgacgatagaggcggatggggaatcagtccgagaggtgcaggcttcacttttggacaagatgtcagtgagcaattcaatcacactaatgatctatcactaatagcaagagctcaccaattggtaatggaaggctatgcttggtctcaccagcaaaatgttgtcaccattttcagtgctcctaattactgctacagatgtggtaatcaagcagctatcatggaagtggacgagaatcataatagacaattcttacagtacgacccatccgtaagaccaggtgaacctagcgtcagcagaaagacgccagattactttttatga

SEQ ID NO: 75846 - DNA, 78 bp, Saccharomyces pastorianus; identical to SEQ ID NO: 334

SEQ ID NO: 75847 - DNA, 1323 bp, Saccharomyces pastorianus
atgtctgaaaataacgaattccagagtgtcaccgaatcgacgactgctccaaccactagtaacccatatggcccaaatcctgcggattatctatccaatgttaagaatttccagttgattgattcaacactaagagagggtgaacaatttgccaacgcattcttcgatactgaaaaaaagattgaaattgctagagccttggatgatttcggtgtggactacatcgagttaacctctcccgtagcatccgaacaatcaagaaaggactgtgaagctatatgtaaactaggtttaaaggccaagatccttacacacattcgttgtcacatggacgatgccagagtcgccgtagagactggtgtcgacggtgtcgatgttgttatcggcacctccaaatttttaagacaatattcccacggtaaggatatgaactacatcgccaagagtgctgttgaagtcattgaatttgtcaaatccaaaggtattgaaatcagattttcctctgaagattccttcagaagtgatctcgttgatcttttgaacatttataaaaccgttgacaagatcggtgtaaatagagtcggtattgccgacacagttggatgtgccaacccaagacaagtatatgaactgatcagaactttgaagagtgttgtctcatgtgacatcgaatgccatttccacaatgataccggttgtgccattgcaaacgcctacacggctttggaaagtggtgccagattgattgacgtcagtgtactgggtattggtgaaagaaacggtatcactcctctaggtgggctcatggcaagaatgattgttgccgcaccagactatgtcagatctaaatacaagctgcacaagatcagagacatcgaaaacctggtcgctgatgctgtggaagttaacattccattcaacaaccctatcaccgggttctgtgcattcacacataaagcaggtatccatgccaaggccattttggctaacccatctacctacgaaatcttggaccctcacgatttcggtatgaagaggtatatccacttcgccaacagactaactggttggaatgcaatcaaatcaagagtcgaccaattgaacttgaatttgacggatgatcaaatcaaggaagttactgctaagattaagaagctgggtgatgtcagaccgctaaatattgatgatgtagactccattatcaaggacttccatgcagaattgagcaccccatttttaaaaccagtaaataagggtacagatgacgacaatatcgatatttccaatgggcatgtttctaaaaaggcaaaggtcaccaaatag

SEQ ID NO: 75848 - DNA, 261 bp, Saccharomyces pastorianus
atgttaaaccgttgcatttcccgtaataccaggctgccagtaaacctaagaattgtctctcgcttttattcagatggtcctctcggtggtgccggacctggtaatcctcaagatatctttatcaagagagaacgtgccaaagaggattattatgccagacaacaagagagggaacaattagcacatgtgaaggaacaactaaaagaacacaagaaaaaattagagaatttagaaaacaaaattaataacctttcaaagtga

SEQ ID NO: 75849 - DNA, 876 bp, Saccharomyces pastorianus
atggagctaagaagtagacggagcgcagaggcctatcttgtcacgcctgaggaacctgccaagaataagagtgaacggagcatagaatccaatgagagggtcggcacgagggaagcaaagagcgagaacacaagtgtatttagtcccgcttactctgataccgctactacagattcatcgaagaaagttgatgacaatgaatactacaattttactagtcacttcatgccatctttaaaaaacaccagagaactagaaaaaacaattctcaatctcatacagaggataaaggaaggggatgatgaaacgttagttagtgagaaagatctcatattaagtgtgcttaacaggtctttagcatccacatctcactggatgttacaggcccagctatcggagttaagggccacctcagagggaaggtatgcagttgagacaaacttgttgaaaaaagaggtagaatttttaaaaaacaagaccccaaaaaccaacgaaagtgcaggttccgcagagttgagaccacttcttgaacgaccttcaaagcgtaaactgtcattgccaggactagcgcaaagaccattatccactggcgctaggctagaaggaggatatggaggtgtatcgccgaactcatggaaaaccaaagttccaaaacttcctcttcctgcttcccggccgtctttgaatctttctccccaaaaagtcccaacgggtactgataaagttgaggaagataccaaaattgacacattggaattagtagagaacaataaaccgcatccgaggatgagaagaaggagtgacaatccagcaacaaacgaatatgtgagagtttttcatttggagaaaaaagaacctaaatcacgaaaaaaatag

SEQ ID NO: 75850 - DNA, 423 bp, Saccharomyces pastorianus
atgtgttgctactgtgtttgttgtaccgtttctgactttatactgtatattgttgcgttttttttccccccagctgcagtccttcttcgatctgggccttgttcatctgatttcctcctgaatgtattgctaacgctactgggatttttgcccggtatgttacacgcattctactacatcacaattacaagtcctttaaggaacgctgaatacgtctattattaccagcaaggctgggtggatagcgaaagaaacgttccttcgaatcgtcctcaaaactcgcagaccccccaaaaccgcccacaacaaggaagctccgctagaaacgtatacccgagcgttgaaactcctctgttacaaggggcagctccccatgacaacaaacagtctctggttgaatctcctcctccttatgtgccatga

SEQ ID NO: 75851 - DNA, 450 bp, Saccharomyces pastorianus
atgaatctatacggttattttttacttctcattattgtgattgctttcattgcattgttgccattgttttctggcatcggtacattcaaactaacaaaaccgaaatcgtctgcaacagcacagtcagcgactggtaagcttggtaagagggaatatttgaaaaaaaaacttgatcataccaatgtattaaagtttgatctgaaggacacggaggaaagccttggccatgacagtgcaagtgcctcttccgcttccagaaaatttgaaatagactcaaagacaggccttaaaagacgtgtaattggacagtacaacaaagatccaaatgatttcgatttcgatattgatgacctaattaacgaagatgaactagatgaacggagagaagaagagaaaaagttgaagaagtacaatggtaagaaaaatgaagcttacgaaggatttgtataa

SEQ ID NO: 75852 - DNA, 525 bp, Saccharomyces pastorianus
atgattaagcggtctctcgcaagtttagttcgagtcagctctgtagtgggcagaagatatatgatagcagcggcaggaggagaacgtgccagattttgtccagctgtaacaaataaaaagaatcatactgtaaatacttttcagaagagatttgtagaatcctcgacagatggtcaagttgtgcctcaagaagtgttaaacttaccgcttgaaaaataccatgaagaggcagatgactacctagaccatttactagatagcttagaagaactgagtgaggctcatccggattgtatacctgatgtagagctaagccatggcgtaatgacattggaaattccagcttttggaacgtatgtaataaacaaacagcctccaaataagcaaatttggttggcatcaccattgtccgggcctaacagatttgaccttctcaatggggagtgggtttcgttaagaaatggcacaaagctaacagatatacttactgaagaagttgagaaggccatttctaaaagccaataa

SEQ ID NO: 75853 - DNA, 924 bp, Saccharomyces pastorianus
atgactgagcaagcaactaagccaagaaattcatcgcatttgatcgggggctttttcggtgggctaacatctgctgttgcgttgcaacctttagaccttttgaagacgagaatccagcaagacaagaaagctacattatggaaaaatttgaaagagatagacagccctctacagctatggagaggtacattaccttcagcattacgaacatcaataggcagcgccttatatttatcatgtttgaaccttatgcgctcatctttggcaaagaggaggaatgctgtgccttcattaacaaacgattcaaacattgtatataacaagagcagtagcttaccacgattaacgatgtatgaaaatttactaacaggtgcatttgcaagaggtttggtaggttatataaccatgcctatcaccgtcattaaagtccgttatgagtctactctgtacaattactccagtttaaaggaggcaattacccatatatatactaaggaaggactttttggatttttcagagggtttggagctacttgtttaagagacgctccctatgcaggtttgtatgtgctgctatatgaaaaatcgaaacaattactgcccatggtattaccttctaggtttatacattacaatcctgagggaggatttactacttatacctctacaacagtaaatacaacaagcgccgtactatccgccagtttagccaccacagtaacggcaccgttcgacaccataaaaacgagaatgcaattggaaccatcaaaatttaccaactccttcaatacatttacatctatagttaaaaatgaaaatgtgctgaagttatttagcgggttaagcatgaggctggcaagaaaggccttgagtgcaggtattgcgtggggtatatatgaggagttggtcaaaagattcatgtaa

SEQ ID NO: 75854 - DNA, 381 bp, Saccharomyces pastorianus
atgtttgaatcgtttgttaatgaaggcacagcattcctcctctttgccaaagatgagcgcataaggttcaaacatgataaatataaggcgctgcctattgatgttcgtaatgctgaaggtaatgtacctctccatagctgtagagggctgtctatctctttcaaatttttccataatgtagctttcttgtcttgctggattctcgtcttcaaaaggtctaaaggttgcaacgcaacagcagatgttagcccaccgaaaaagcccccgatcaaatgcgatgaatttcttggcttagttgcttgctcagtcatgtatgctgcttcacaaattgtgtaccttctagttgttcccgctgtactatttgcttttcttttggtataa

SEQ ID NO: 75855 - DNA, 2658 bp, Saccharomyces pastorianus
atggccactaacttaacatgtttgaagccaccatttaaggtgaaggccaggtatggttggtcgggccaaactaaaggcgacttaggctttctggagggagatattatggaagtcacaaggattgccggttcttggttctacggcaagttattgagaaacaaaaaatgttctgggtattttcctcataacttcgtcatactattagaggagagattaaattcgagcactgaaaatggtaggcaaccttcaaaaatagtagaaagttttgaaaaatcaaataaagttgttattccaccagtaccatcaaggtattctgacaagaggccaaggcctaaaaagaagctatcttcatcaatgcccaattcacccaagaagccggtagattctttgacaaaggctagaaaggcaaaatcaaaagaaatggtaaatgaaaaaaatatctataatacccaatcctctcgacatcataataactcagctccaaatttacctttggctagccatagtaagcctcaagtacgaaatttcgaggagtccatgaacaatccgttaccacctctaccgccactaccagatttggacaatatgagaaagacagataaaagggcaccaaagaaatcatattctgcaaacgatttacatatggcacgttcttcaagagaatataactattacaaagacaatcagaaattctatgatgggtttatcccagaaaagagatattctttagaagaggactctatttcatcaggcctgttttcaaactctcagtacttaaatgattctgcttgtagtagtgagaacagttttgccttaatgagtgattttagtgccacgagcgcgggaagttttgccagacataaatatgcacaatcgttttccgattcattgcaaagatcacagaatgcaaatggctgctctacaaagataaatgattcacaggagtttggtgattccaatgctagttcgagaaatggaaaaatgggtgatatcattaggaaaataattattccaaagaggaatacaaatatttactccagttcagtatcctcaccaaagtcaccaaaagcatatcctaaactaccagatattcagaatttaaacttgtctgcaacacccgatgaagctcgcgattggattgcggtaaaatgtcacttgaacagagcaaggactcttaccaaatatgacaaacatccgaggtacatgagagctctcgaagaaaatcgcgacttgatcttacatcctcaagattcgatttataacgggctaaataccaatgaagtcaaaggtaatacaaagcccggtttggtcgatgtggaactggccgaattaaacatagaatacattgataagatgacttggaaacggtgtattagagacggaactatgacattagacagttgggctcaaacaactttttcagcaagatactcaactgttctggaaaagttaagaggcatatacattttttgcacagagatgtttgctctgactgatgataatggaacgtcagatttttctgcggaaccccaaaatttagagaaaatactatacagaaagcattgtacgccatatgaattgacatggcttttcaagaaattagcaaactcattgggaatcacttgtgaaattgttataggtttcctgaaaacaccgagtgctataaattgggagtttaagtataaccactgctggttgagaatactggttaacaaagaatggagatttattgacgttattttaggaaatgtaaccaacccaattcatgaatttgtaaataacagaaagatcaagaaagcagaaaatagctactttttgatggcaccattagaaatgatatacacacatataccacctagggaatttgagcagcatattgttcctagtatcgatcaattatctgcattgtatctgccattagtttttccatcttttttcaaaaatgagttaaagttatacaaatttagcactgcactatcatttttggaagattctgagatctacgaatgctccttagaaattcccaatgacgttgaagtctttgcatccgtggttattccaacggataatgaagaagcttcatctgcgtacaggaatatggaactcgcactgacccaaatcaaaaagcagaaagccgagtctggtagaagaattgctctaatcaaagcagtcctaccacccaatgtgaacaaaggttcactgtacatacattcaggtgtaagaggtacgcaaacgagtattgccaatatccatccactgtccatgatggtcccattaacacataagggaagtaacatgaaatacgaatttgtgatcaagataccctcagaaagcattcagaagattgagctatacattgtcgagccacagagtagatatctatttgttggtaatgagtactcattcgaagttattcaaagtccctccgatggtattatatacagcagtgatgaagggccgaacctaaataggaaacaaccaatggcaataaaatcaccctcgggaagagttcatgaactagtcaagagcgatcctcactttccttatggtacctggaaaggaagcattaaaatcaaagagcccggcgtctggagcgctttagtgatcgctgactctggtattgggtggtccgtttttgctgaatggttgtgcgtataa

SEQ ID NO: 75856 - DNA, 723 bp, Saccharomyces pastorianus
atggtgaatgactatttaaagttgaataaaggtgtagaaaagacagaaagaaaaaaaccaagtaggaaatattttactggggattctgcaaaaattgcatcactacccagtttagattacgtttttgacatctaccatttggagaaaattcatgacgatgaggttgctagatataacaacgagaaaaatatagggtttgtgaaaattattgagcatatagatttggctcttgatgaagaaagtgatcccaatgaagcccgttcagacgatgaggattctaatgacgaaaactattaccaaaatgattatccggaggatgaagatgatgatagatctattctatttggtagcgaaggggaggatatagctgcattgggtgaagagattgttataggggttaataagagcaggttttcctcttggaatgacgataaaattcagggatctaatgggtaccacgatgtggaggaagagtacggggatctttttaacaggcttggaggaaaaagtgatgtcttgaaatccataaattcctcgaatttcattgacttggatggccaagaaggtgaaatagagataagtgataatgaagatgattctgatgaaggagatgatattgaataccctagaaatgaattttttccgacggatgttgatgacccattggcgcatcatagggacagaatttttcatcagctacagaaaaaaattaatagaagctaa

SEQ ID NO: 75857 - DNA, 114 bp, Saccharomyces pastorianus
atgaacttctgcttcttcactcttttcccctcatcaattactgaattgtcccagatgaacttagttagtcaaacgcatttttgttatatcggtagaataacaacacatacataa

SEQ ID NO: 75858 - DNA, 1923 bp, Saccharomyces pastorianus
atgtcagacttaaatgatgtccaagaaaatgctaaattgaattcggaaactcggaatacaggaaaggctgaaccacctcatgggacaactgagtatgtggcagaggcagaaatttctaagaatggagttggatcgccaaaaaagagcccaaaaaagggtaaggttggaaagggggacaataacaaagtagaaactgagttagtacacacagccctgttagaaaaagacaacccattcattgaggaggggccaacaggattcacaaaatcagctttattagaaatacccggtatgagaagccataagctaaagaacccgaatgaagattacgaggatgactctgagggattattgcctttaaaccaggaatcgaatgcagaaacatgtagaacaagtcttagtggaagtattaactccatgaacggagagacctctgcgtcagaagaaccttctgtaagtaatagaaagaagtccgctaggatacacatacttgaagcgaaaagagtttccgaaggtcaaggaagagcctacatcgcctatgttattcagtttgaaaattctaccgttcagagacgttacagtgatttcgagagtttgagaagtatcttgataagattgtttcctatgacgttgataccgccgattccagaaaagcagtcaataaagaattatggtaagtcaataactggttcgagttcaaagtatttgctgccctcagaaggttctggttcagtagatctatcattgtctgtgatacatgcgtcggtcaataatagtgatgaaaagttaatacggcataggataagaatgctcactgagttcttgaacaaacttttgatgaacgaagaaataacaaaaacatctataattaccgattttttggatcctaataaccataattggcatgaatttgttaacagttcgtccactttttcatctttaccgaagagcatcctccagtgtaatccattggatcccactaacaccactagaattcatgccatgttaccaataccgggctcctcgtcacagttattgttgaataaggagtccaacgacaaaaaaatggataaggaaagaagtaagtcgtttactaatattgaacaggattacaagcaatatgagaacttgttagataacgggatttataagtataatagacgaaccacgaagacttatcacgatttgaaatcggattacaatgaaatcggtgaggtatttgcacagtttgcccatgaacaggctcaagttggggaattggccgaacagctttcttacttaagcaatgccttttgggggtcctcgatttctttagaaaaattagttggaagattatactacaatataaatgagcccttaaatgaatctgttcatatggcaacttctgcaagagaattgatcaaatacagaaaattgaaatacctgcaaaatgaaatgattaaaaattctctgaattccaaaagagcacagttggagaagctggaagcgcaaaacaatgaatataaggatgttgacaaaataattgacaacgaaatgtctaaaagtcatactattaatctggaacgccctaataataatacaggtagcggtgggaaatcatatggtggcaaactattcaatggatttaacaaattggcatcaatggtaaaagattctgtgaagtatcaagaaacagatccgcataccgcaagtatcaatttgaagaaagaaattgaacaactgtctgaatcattggaagttactgagaatgatttggaggtcatttcaaaagtcatcaaaaatgaccagctacctaaatattctaaagaaagggaagtagatttatcagaaattttaaagcattattccagatatatgagaaattatgcccgtcaaaatttagaaatttggaaagaagtcaaaagacatcaagattttgcatag

SEQ ID NO: 75859 - DNA, 798 bp, Saccharomyces pastorianus
atgtctctttcggtcgccgaaaagtcgtacctatacgattcactagcaagcacgccttcaattaggcccgatggaagactacctcatcaattcagacctatagaaatatttactgacttcctaccaagttccaatggatcgtccagaattatagctagtgatggaagtgaatgtatcgtgagcattaagtccaaagttgtggatcatcatgtggagaatgaactacttcaggtcgatgtagatatcgcaggccaaagagatgacgcgctggtagtagagacaatcacttctttactgaacaaggttttgaagtctggtagcggagtagattcctcaatgttgcaattgacaaaaaagtacagcttcaaaatatttgtcgatgttctggtcatttcatcacattcacacccagtttctttaatatcctttgctatttattcagcgttgaactccacatacctaccgaaacttatttcagcttttgacgacttagaggtggaagaacttcctacgtttcatgattacgacatggttaagcttgacattaatccgcctttagtgtttatattggccgttgttggcaacaatatgctattggaccctgcagccaacgaaagcgaagtggccaataatggcctaatcatttcctggtctaatggtaagattacatcacctatcagatcagtagcattgaatgattcaaacgttaaaagctttaaacctcatttgttgaagcaaggtcttgcaatggtggagaaatacgcccccgacgtagtacgatcactggagaatttataa

SEQ ID NO: 75860 - DNA, 453 bp, Saccharomyces pastorianus
atgtgctcagcaggcggtatcagaagaccaatccagatcgaagaatttaagacggcgataagcggcatgtccgacatggagttggcacagattaaaacagaaattgagaacagtatcaatcatttgcagaggtctaccgcccgcttgggtaaatacatagctaagttggagggtgctgacgaccgtcttgaagctgacgacagcgacgacttggagaacattgattcgggagacctggcgctgtacaaggactctgtcagggagaacgaaattgtgctaaacaattacaatgagagagtggacgcattggagcaagaaacggtatatagaaagacgggccatggcaagagtaagcacgaggtagaggcaaaggacaacaccaacaagggccctgacgttgacatggacaattcaaatgtggacgtcgtgacaccaaacagcatattcatttaa

SEQ ID NO: 75861 - DNA, 1944 bp, Saccharomyces pastorianus
atggaagctggcaggagtgctgatgaagtgctataccacaatcagtcgtcagtaaagttaggtgagttagaaagatacgttattacatatgagctataccagggtgatagtattcccgctgatatcacactggattccctatgggtaaagatcaaaaataccacaaagctatcctataaaccagcctatctattgggcccatttatcttatattgtgacgtgcgagcaaaagattacgaaagctcgtataagatcatatgttcggcggataaaccagtatttcaatcaaacctacaggcacaacaaaagtttattgcagagttgtccttgcaccacattaagccacgctatgtatggatagtggatattgtcagtcaaatactatttaataaagaaactaaggtaacttttgagatagtagtcggcaattcaaaggcctctttgaaaagaaaaatacgatgtgatgattcattgcctgataaagcctgcaatattttacacacaggattatcggtgcatagacttaccaccgcagatatatggaaagtaccacgacccatagacatgtcgcaaaaatcccatttagtcattctcacgcatggttttcaatcaaacgtttcggcagatatggaatacttaatggaagaaatatacaaggctcaaatgaacaatccaaatgagcgactagttattaagggatatatgaagaatgcttgtgagactgagaagggtattaagtttttgggtgttggattggcaaactacatcatcgacgagttatatgatgactctgtagggaaaatctcatttattggtcattccctgggtggattaacacaaacttttgctatttgttacataaagaccaaatatccatatttctttaagaaagtggagccgatcaattttatctcactggcgtcaccattgctaggcattgctaccagcacgcctaattacgtaaaaatgtcattgtcgatgggtatcattggtactacggggcaagaactgggtcttaaggatggaaattatggtgataagcccctactttacctgctatccgaggaatccttaatcagtgtgcttgctcgattcaaaagaagaacactttatgctaatgccgtcaacgacggaatagttcccttgtattcctcttctttactttttttggactactctcaattacttcagaaactgggaggtcaaactacggcatcttgtgatcctctcttccagcctgaagtaagtcctattggggaacttccaaatcatagcgatgttgctaatgatgatgatggaatcaatgcatcgtcatggaacacgttttggaagagcaaggaaaataactgcgacaagaaatttaaacgcttgatgaatgcttccgtcatcaaatccatgaagtctgtgcttctatcaccatgccccgaggcaaagttcttctcagatcccgatgcaagggtcgcaacaatcatacatgataagatctacacagaaaagaatttaccgcctccatcaccaacactttatgaaggaacagcagccaaggaaggcgaaacgaggaagacgagaaaagagatggaggaaatcatagcacgacgctggcacaaggggatgcattggaggaaagtcgtggtattgctgaaaccagatgcccacaataacatcatcgtaagaagaaggttttccaacgcttacggctggccggtggttgaccaccttgttaccgcccatttccaaagagatgacccaatcgccttaccaatgcaagataaacagtttgctgaggaagatataaacatggcaaccggaggggtggaaccaaacaagttctactcatggctcaccaagatcgaggatcctagtgtgtaccatggtggaatagtctccacagctagccagctcgccagctcctggattagcaagcattcctctgtgacagattga

SEQ ID NO: 75862 - DNA, 1650 bp, Saccharomyces pastorianus
atgatggaagaattctcgtacgatcacgattttaacacacattttgctacagatttggattatttgcaacatgaccaacaacataatcaacagcaacaaccacaaccacaaccaattcaaactcaaaacctggagcacgaccacgaccaacatactaatgatatgagtgcttcatcgaatgcatcagatagtggacctcagaggcccaagagaactcgcgcaaagggtgaagcactagatgtcctaaagcgtaaatttgaaataaatccaacaccctctttggtagaaagaaagaaaatatcagatctgataggaatgcctgaaaaaaacgtcagaatttggtttcagaacagaagagctaaattgaggaaaaagcagcatggaagtaataaggacacaatcccctcgtcacagtcccgtgaaattgccaacgattacgatcgtgggagtacagacaacaatttggtcactacaacaagtacttcatccatatttcacgatgaagacctgacttttttcgaccgtattccgctgaacagcaacaacaactattatttttttgacatttgctcaattactgtgggaagttggaatagaatgaaaagcggcgcactgcaaagaaggaactttcagtctataaaggagttgagaaacctatcgccaataaagattaataacataatgtcgaatgccacagatttaatggttttgatatccaagaaaaactcagaaataaactatttttttagtgccatggcaaataatactaaaattctcttcaggatctttttcccattaagttcagtcacgaattgctctctaactttagaaactgacgacgatataataaatagtaacaacacaagcgataaaaacaatagtaatactaataatgatgatgataacgacgataacagtaatgaagacaatgataatagtagtgaggataagaggaatgctaaggataactttggagaattgaagctaacagtcaccagatcacccacttttgctgtttactttttaaataatgctcctgatgaagatccaaatttgaacaatcagtggtccatatgtgatgatttctcagaaggtagacaggtaaatgacgcatttgttggtggttcgaatattcctcacactttgaaaggtttacagaaatcattaagattcatgaattctctaattctagactataaatcatcgaatgaaatattacctacgatcaatacagcgatccccactgctgcagttccacaacagaatattgcccctccctttctgaatacaaattcaagtgcaacagactcaaatccaaatacaaatttagaagattctctcttcttcgatcatgatctgttatcgagttcgataaccaacaccaacaacggacaaggctctaataatggacgtcaagctagcaaggatgatacgctcaatttactggatactaccgtcaacagcaataataatcataatgctaataatgaggagaatcatctagcgcaagaacatttatccaacgatgctgatattgttgcaaatccaaatgatcatttgttgtctttaccgactgatagtgaactcccaaatactccagattttttgaagaacactaacgaactaactgacgagcatagatggatatga

SEQ ID NO: 75863 - DNA, 1209 bp, Saccharomyces pastorianus
atgtctagtacagtaatatctagaaagaggagaaacagcactgttactgagcctgacagtagcggagaaacaagaaaacaaaagaagtcgagaagtgatgaaaagagctcatcttctaaggatggtgacccccagctagaatttaaagttttacagggatatagggacctggaaagtgaaatgcacaaaggcagagctcaggtgaccagaacaggagatataggtgttgctatggacaatctgaacgctgtggattccctattcaataaggttattggtataaagaataatggattgtttgctcatgatgctagagcaatggttagtataagtgaattggctcaaatttctgtgagaaatttgaagtttgatgattcgaggagtatggtcaatttagaaaacatagtaaattccttgaaaagatacatgctaaaagagcatttcaagcttaataatatcgccgaaaataggaatgatttgacgcttgccgctgatgaacaatccgcagcagaccagcaagaggaaagtgatggagatatcgataggacgcctgatgataatcatacagataaagccacttcctctttcaaagcgacatctatgaggcatagttatctacagcagttttctcactataatgagttttctcaatttaattggtttagaataggtgctctctacaatactataagtaaaaatgccccaattaccgaccatttaatgggacctttatccatagaaaagaagccacgagtgttaactcaacgaagaagaaataatgaccaagttggtgaaaagatcaccgctgagaaaatcactcagcattctttaaattccacacagcaagaaactacccctgaacaggtcaagaaatgtttcaaaaaactttcaaaaaaattaggcccagaaggttccattaatctttttaaatttattatagacccaaattcattctcgcgatccatcgaaaatcttttctataccagttttttgatcaaagagggaaaactattgatggaacacgatgaagaaggtttacccacaattaagataaaacaaagcataagtcacacagattcaagaagtaaagaaattgagagacaaaggcgtcgtgccgctcatcagaatcacattatttttcaaatggacatgcctacttggcgaaaactaataaagaaatacaacatcacttcaccattcttagactaa

SEQ ID NO: 75864 - DNA, 1224 bp, Saccharomyces pastorianus
atgatatcaataaaaggaaccggaagatttctcctcgataactatagaatttggcagaggcgtgcatccaacagaccaatacagttaagaaaaggctataaagttttagccattgagacttcttgcgatgatacatgcgtttcagttttggacaggttctcaaaaagtgcagctcctaatgtgctagccaatttgaaagatactctagatagtattgacgaaggaggtattataccaacaaaggctcatatccatcaccaagctcggataggacccttaactgaaagggccctgatagaaagcaatgcgagagaaggaattgatctcatatgtgttacaagaggccctggtatgcctggttcattatcaggaggattagattttgcaaaaggtttagctgttgcctggaacaaaccactgattggtgtgcatcacatgctgggacacttgctgataccaagaatgggtacaaatggaaaagtgcctcaatttccctttgttagcctgctggttagtggtggtcatactacgtttgttttgtcacgagcaattgacgatcacgaaatattatgtgatactatcgatattgcagtgggtgactcattagataaatgtggcagagagcttggattcaagggaacaatgatcgctagagaaatggagaaatttattaatcaagatattaacgaccaagattttgctttaaaactagaaatgcccagtccgttaaaaaacagcgctagtaaaagaaacatgctttcgttttcgttttcagcatttatcacagcattaagaactaatttgacaaaactagataaaacagaaatccaggaactgccagaacgcgaaatacggtcaattgcatatcaagtacaggaatctgttttcgaccatataataaataaactgaagcacgtgctcaagtcacaaccggaaaagtttaaaaacgtgcgtgaatttgtatgttctggtggagtgagtagtaatcaaaggttgagaacaaaattagaaacggaattggggacgttaaactccacaagcttttttaatttttattatcctcctatggacctttgtagtgacaactctattatgatcggctgggcaggtatcgagatatgggaaagcttacgattagttagtgatttagatatatgtccaattaggcaatggccattgaatgacctattaagtgttgatggttggagaacggaccagctatga

SEQ ID NO: 75865 - DNA, 1434 bp, Saccharomyces pastorianus
atgactgacacaaaacagctattcattgaagccggacaaagtcaacttttccacaattgggaaagcttgtctcgcaaagaccaagaagaattgctttcaaacctggagcaaatatcttccaagaggtcccctgcaaaactactggaagactgtcaaaatgctattaaattctcactagctaactcttctaaggatactgtcgtcgacatttcaccattgccccctacttcgtacgagtcgcttattggcaacagtaagaaagaaaatgaatactggcgtttaggccttgaagctattggcaagggtgaagtcgcagtgattttaatggctggcggacaaggtacgcggttaggatcctctcaaccaaagggctgttatgacattggattgccttctaagaaatctctttttcaaattcaagctgaaaagttgatcaggttgcaagatatggtaaaggacaaaaaggtagaaattccttggtatattatgacatcaggccccactagagcggctactgaggcatactttcaagaacacaattattttggcttgaataaagaacaaatcacgttcttcaaccagggaaccctgcctgcctttgatttaaccgggaagcatttcctaatgaaagacccagtaaacctatctcaatcaccagatggaaatggtggactctaccgtgccatcaaggaaaacaagttgaacgaagactttgataggagaggaatcaagcatgtttacatgtactgtgtcgataatgtcctatctaaaatcgcagaccctgtatttattggttttgccatcaagcatggcttcgaactggccaccaaagccgttagaaagagagatgcacatgaatcagttggattaattgctactaaaaacgagaaaccatgtgtcatagaatattctgaaatttccaatgaattggctgaagcaaaggataaagatggcttattaaaactacgcgcaggcaacattgtaaatcattattacctagtggatttactaaaacgtgacttggatcagtggtgtgagaatatgccatatcacattgcgaagaagaaaattccagcttatgatagtgttaccggcaagtacactaagcctaccgaaccaaacggtataaaattggagcaattcatatttgatgtctttgacactgtaccactgaacaagtttgggtgcttagaagtagatagatgcaaagaattttcacctttaaaaaacggtcctggttctaagaacgataatcctgagaccagcagactagcatatttgaaactaggaacttcgtggttggaagatgcaggcgctattgtaaaagatggggtactagtcgaagtttccagcaaattgagttatgcaggtgaaaacctatcccagttcaaaggtaaagtctttgacagaagtggtatagtattagaaaaataa

SEQ ID NO: 75866 - DNA, 1065 bp, Saccharomyces pastorianus
atggatttaaccgtggaacctaatttgcactctttaattacctctaccactcataagtggattttcgttggtggtaaaggtggtgttggtaagactacttcatcatgttccattgctatccaaatggctttgagtcaaccaaacaaacagtttctactgatctctactgatcctgcccataacttaagtgatgcattcggtgagaaatttggtaaagacgccagaaaggtgacaggcatgaataatctatcatgtatggaaatcgatccatccgctgctttgaaggatatgaacgacatggcagtttcacgcgctaacaacaacggaagtgatggtcaaggtgacgatctaggaagcttgcttcaaggtggtgctcttgctgatttgaccggttccatccctggtatcgacgaagctttatccttcatggaagtcatgaagcacattaaaaggcaagaacagggcgaaggtgaaaccttcgatactgttatttttgacactgctccaactggccacacattaagatttctacaactaccaaatactttatccaagcttttggaaaagttcggtgaaattaccaacaaattgggcccaatgctaaactcttttatgggcgcaggtaatgtcgatatctctggaaaattgaacgagttaaaggctaatgtcgagaccatcagacaacaattcacggatcctgacctaacgacttttgtttgcgtttgtatcagtgaattcttatccttatatgaaactgaaagactaattcaggaattgatttcctacgatatggacgttaattccatcattgtcaaccaattattatttgctgaaaacgatcaagagcacaactgtaagagatgtcaggcaagatggaagatgcaaaagaagtacttggaccaaatcgacgaattgtacgaagatttccatgtcgttaaaatgccattatgtgctggagaaatcagaggcttaaataacttaacaaagttctcacagttcctaaacaaagaatataaccctattactgatggcaaagtcatttatgagttagaagataaggaatag

SEQ ID NO: 75867 - DNA, 1026 bp, Saccharomyces pastorianus
atgtctgaacaggagtctgatgaagttaagcgtatgaaacaattggaagaggctagaaagagagtagaagaattgaagaaaaagaaaaataaaaagaataaaggtaagaagaataaaaatagcagtgccacaggctctataggatctgaaactcctgatttagagggcacaccaggcgaagagtccacacaggaggagactgtgaaagcaaattccaccaaaagtgaaaacaacgatcaaaatgacgtggatgaggagagtgaagaaaaagaaatagaacaggttaaatcagatccttcgggcacaacagagaaagatattgaagaaataaatagtacttcatcaaatgtgggaaaggatgatgcagaaaacacacaaaaagaggaagttcaagaggttataaaaaataacgacgatgagcaaacagcagatgccggaaagaccatagaaccacaagaggaaaagaaaattgtacaagctcaagaaggaaacgaaccttcaaatacatcagaagcagcagacgatttatttgccaatgacggcaatgaagaatctgactttctcaccacgattaaaaagcaaaaagaagaagatgagttgaccaaactaagggcggaaaatgagaaactcacacaggaaaataaacaactgaaatttttgaatatggaaaatgaaactactgtcgatgacctacaggatcaattgcaggaaaaagaagacatcattaatggtttacaaaacgatttgcaaactgcaagggatgaattaattgccgcagtagaaaaattaaaattagcagaagctaaggcagcaagaaataccacagcaactcctattcaatttgcggatttcaacacttcaagcaataatctaactccctcacaatctgtaaccaattctggtacgcaggtggcccacgggaataatatggaagtggatcgcgttatgctgaacaaatggcgccagtggaacgtagacatgaccacttggagaagtattggttctggcccaataatggaattttga

SEQ ID NO: 75868 - DNA, 585 bp, Saccharomyces pastorianus
atgtcgaattttggcagaagaacttgggatagagaggagtatgctgagcaggctagaagcggctatgacgatcgatcattaaaggctacgctaacaccgattgaattacaagctttaaaatccaaatatacaaattacgatcatttaatcaagggctcgctaaaagacctaaataaaaggaaactaacagcaaatacagagagcttatcgtctttcaagaggggaaagaagttcggattttactgcgatatttgtaacctaaccttcaaagacactttacaatacattgatcatctcaaccacaaggtccatgcaataaaatttgaaaatttgtttgatgaaccgttaattatagatataagagataatgatgacgtaccgcaagaggagtttgagttgtgctatcataccttgataaaagattttgtagaggtgcgttctatggagactcagtccaagaggaaaaggcttttggacacagatgtggagaaagcaaagaaagtggctactaagccttctattgagagtgaatcaaaagtcagtaaaatgatgggattttccaattttgccacctctaaaaaatga

SEQ ID NO: 75869 - DNA, 441 bp, Saccharomyces pastorianus
atggcaaatactggctgtttatcaccaggtgcatttttatcaaaggttccagaatttttccagactgcgaatgaaaaacatataactgtgcgtctaacggccaaaagactcatagaacacgatcctgtggaagggaatcttgaatttgattctaccaaccatcctgactatgatgtatctaaaaaggcttctgaaatttcagttagctcaagatctgacagagaatacccactattaatcagaatgtcttatggctcgcatgacaagaaaacaaaatgctcaacagtggtaaaagcaagtgagttagatcaattttggcaagagtattcatctgtatttaaggggggcatgcagaatttgatcaagaagaagaaaaagaagagtaagaacggtaccatcagtaagacaggtaagaaaaacaaggtagcgaagaaaaactga

SEQ ID NO: 75870 - DNA, 1368 bp, Saccharomyces pastorianus
atggatatatttaggcatacttttggaaataatgatgattcctttattcgaatcccaggtgcttttagagaagaaccacctgctgatttgaatggaaggacagaagatcaaaacagcaatacaaatgaacccacacagagccgggatggacgcttaaaatcaatactccattttttatttcaagctcccctaatagttctttattatttattgaatttcattgtccgaagttcaagtcttttaaaacctctattaagacttcacggattctaccagaggaagcacaaccgtttactagaccacagttcccaattacaccgtcttttagaaaacctagaaaacgaagctcaagctgtaacgtgttctgatggtaacgggaataatgatgatggcagcaatactgacagtacgagcaacaatgagagcagtggggtccagtttagttttggttctttatacaaccctgaaaatggaacattttccaaaagcattatgcaaaatagttacactgaattattggatgcttgtagcgaacaagtgaaatttggagtcatttatttacatgacccattgttggataatcatatggattacgttaataaaatattgtgctcagaagcctttgttaacatgataaggaagtaccaggtattactatggtatggtgacgttactacatccgaggggttgcaagtttccaatgcattaaaaattaggcaatatcccctacttggaataatttctttaaaggctgagaaaaaaatagagttaatagcaagagttgaaggttccatttctaactacaaagctcaagatttggaggccatattctccaagaattattctcgattaattcaattgcgtcagcaaagacaaaatattgaaatgcagagattaataagacaacaacaggattcaagataccaggattccttaagacgtgatcaacaaagagaatcagaaagattggaacagacccaaagagaacaaatggaaagagagcaccaaagaatagaaaaccaatggctattgtggagaaaaagccaactaaaacccgaaccctcttctgataaagatgcaagcaaagttgcgatcagactagaaaatgggcagagattagtgagaaagtttgacgcatctctaccaacggaggagatatatgccttcgtagaattacagttgcatgacatgttgaactcagaaaacgatactttacccgtataccaacctgctaattatcagcaccagtatagcttcaaattgatcacgccggtaccaagaagagagcttgatttatctaccaaaatatctgacgttagcggcatatatccatcaggaaatattgtaatggaacgcctggacgaatga

SEQ ID NO: 75871 - DNA, 786 bp, Saccharomyces pastorianus
atgtcaactatgtcaacgcctgccgcagaacaacgcaaactcgtcgaacagctgatgggcagggacttcagtttccgccacaacaggtattcgcatcaaaaaagagacctcggactacacgatcccaagatctgcaaatcataccttgttggcgagtgcccctacgacctgtttcagggcaccaagcagagcctgggaaaatgcccgcagatgcatcttaccaagcataaaattcagtacgagagagaggtcaagcagggcaaaacgtttcccgaattcgaaagagaatatctggccattctatctcggtttgttaatgagtgtaatggccagatatccgtagcactacaaaatctaaaacacaccgctgaggaacgaatgaagattcagcaggttaccgaagaactagatgtcttggacgtgcggataggcctaatgggacaagagattgattctttaattcgtgcagatgaagtcactatgggtatgctacagtcagtcaaattacaagagctgattagtaaaaggaaagaagttgcaaaacgtgtacgaaacattacagaaaacgtgggccagagcgcccagcaaaagttacaggtttgcgaggtgtgtggggcatacctatcgcgtttagatacagacagaaggcttgctgaccacttcttggggaagattcatctgggatatgtcaagatgagagaggattatgatcggctaatgaagaataaccggacaactaacgccagcaagacagctactacactacccggaagacgctttgtgtag

SEQ ID NO: 75872 - DNA, 822 bp, Saccharomyces pastorianus
atgttgattactgagacctttcatgatgtgcagacatcatacggcaccactctgcgtatatacgtatattctcctaagattgcaggctatccacaagctaagtttcctggggtgattctgtacagtgaaatttaccaagtgacgggtccggttcgtcgttttggtcaaagaattgcgtctgaaggttacgttgtggtggcacctgccatataccacaactttatgggccctgaagcgttgccctatgacgtgcagggtaccgatattggtaacgagtacaagatcaagaagccgttagaatcatacgatgaggacaacaaactgtgttgcgatctactcttccagttaccccaattcgatggtaagagaattggttccacaggaatgtgtttaggtgcccatttggcttttagagcgctcctggacaaaagggttacctgcgcaacctgcttcttccctaccgacatccattccaaaaccttaggtcttggccagaacgataactctttggaacgtgtttcgaaggagttgggtaataaccaagaaatggttttgatcttcggaactgcggacacccatgtcgacccgcaaggccgcgatctaatcagaaagaccctcagagaccacggagtaaagtttacgttcttggaaatcctggctgcccagcatgcgttcatccgtgacgagttcagcaagggcaggttcgactccgctatcactcaaagttgtctcggcttcttgttcgagcagttcaacagaaaattgagaatcgatttgggtgaatttgtcgatgataatacacctttggagcacgtttgttaa

SEQ ID NO: 75873 - DNA, 435 bp, Saccharomyces pastorianus
atgaacgcatgctgggcagccaggatttccaagaacgtaaactttactccgtggtctctgagggtctttctgattagatcgcggccttgcgggtcgacatgggtgtccgcagttccgaagatcaaaaccatttcttggttattacccaactccttcgaaacacgttccaaagagttatcgttctggccaagacctaaggttttggaatggatgtcggtagggaagaagcaggttgcgcaggtaacccttttgtccaggagcgctctaaaagccaaatgggcacctaaacacattcctgtggaaccaattctcttaccatcgaattggggtaactggaagagtagatcgcaacacagtttgttgtcctcatcgtatgattctaacggcttcttgatcttgtactcgttaccaatatcggtaccctgcacgtcatag

SEQ ID NO: 75874 - DNA, 1341 bp, Saccharomyces pastorianus
atgtcacacgaaggtgaagaagatttattggagtactccgataacgaacaagaaattcaaattgatgcctctaaggccgctgaagctggagaaactggcgccgccacttctgcaactgaaggtgatagtaataacaacactgcagctggcgacaagaaaggttcctatgttggtatccattccaccggtttcaaagatttcttgctaaagccagaactatcaagagccatcattgactgtggttttgaacatccttctgaggtccagcaacataccattcctcagtcaattcatggtaccgatgtcttgtgtcaagcaaagtctggtttaggtaagacagctgtctttgtcttatccactctgcaacaattggaccctgttccaggtgaagttgccgttgttgtcatttgtaatgctagagaactggcctatcaaattcgtaacgagtatttgagattttccaaatatatgccagacgttaagacagcagtcttttacggtggtactccaatttctaaggatgctgaacttttaaagaataaagatactgctcctcacattgttgttgcaactccaggtcgtttaaaagcgttagtgagagaaaaatacattgatttgtcacacgtcaagaactttgtcatagatgaatgtgataaggttttagaagaattagacatgagaagagatgtgcaagaaattttcagagctactccaagagacaaacaagtcatgatgttttcagccacactttctcaagagattagaccaatttgtagacgcttcttacagaatccattggaaattttcgtcgatgatgaagctaagctaaccttgcacgggttgcaacaatattatatcaaattagaagaacgtgaaaagaaccgtaaattggctcaattattagatgatttggagttcaatcaagtcattattttcgttaaatctaccacaagagctaatgagttgaccaaactattaaacgcctctaactttccggctatcaccgttcatggtcatatgaaacaagaagaacgtattgctcgttacaaggctttcaaagattttgaaaaacgtatttgcgtgtccacagatgtttttggtagaggtatcgatattgaacgtattaatttagccatcaattacgatttgactaatgaagctgaccaatatttacatcgtgtcggtagagctggtagatttggtactaagggtttggctatttcattcgtttcttcaaaggaagatgaggaagtcttggctaagatccaagagcgtttcgatgtcaaaatcgctgaattcccagaagaaggcattgatccgtccacttatttgaataattaa

SEQ ID NO: 75875 - DNA, 321 bp, Saccharomyces pastorianus
atgtctactgaatctgcttggtcttacgccgccttgatttgggctgactctgaaatcgaaatctcttctgaaaagttgttgactttgactaacgctgccaatgtcccagttgaaaatatctgggctgatatttttgctaaggctttggacggccaaaacttgaaggacttattggtcaacttcagcgctggtgctgctgccccagctggtgtcgctggtggtgtcgctggtggtgaagccggtgaagccgaagctgaaaaggaagaagaagaagctaaagaagaatccgatgacgacatgggtttcggtttatttgattag

SEQ ID NO: 75876 - DNA, 1032 bp, Saccharomyces pastorianus
atggtcaaagtcgcaattcttggcgcttctggtggcgtgggacaaccgctatcattactgctaaaattaagcccttacgtttccgagctggcgttgtacgatatccgagctgcggaaggcattggtaaggatttatctcacatcaacaccaactcaagttgtgtcggttatgataaggatagtattgagaacaccttgtcaaatgctcaggtggtgctaataccggctggtgttcccagaaagcccggtttaactagagatgatttgttcaagatgaacgccggtattgtcaaaagcctggtaaccgctgttggaaagttcgcaccaaatgcgaggattttagtcatttcaaaccctgtgaacagtttggtccctattgctgtggaaactttgaagaaaatgggtaagttcaaaccaggaaacgttatgggtgtgacgaaccttgacctggtacgtgcagaaacctttttggtagattatttgatgctaaaaaaccccaaaattggacaagaacaagacaaaactacaatgcacagaaaggtcactgttattgggggtcattcaggggaaaccattatcccaataatcaccgacaaatcgctggtatttcaacttgataagcagtacgagcacttcattcatagggtccagttcggaggtgatgaaattgtccaagctaaacagggcgccggttccgccacgttgtccatggcgttcgcgggggccaagtttgctgaagaagttttgaggagcttccataatgagaaaccagaaacggagtcactttccgcattcgtttatttaccaggcttaaaaaacggtaagaaagcgcagcaattagttggcgacaactctattgagtatttttccttgccaattgttttgagaaatggtagcgtagtatccatcgataccagtgttctggaaaaactgtctccgagagaggaacaactcgttaatactgcggtcaaagagctacgcaagaatattgaaaaaggcaagagtttcatcctagactcttccaagctatga

SEQ ID NO: 75877 - DNA, 885 bp, Saccharomyces pastorianus
atgtcggtaagcgaacaagatcctaatagggcgtacagagagactcaatcccagatatataaactacaggaaacactactaaattcggcgagaacaaaaaataagcaagaggagggacaagaaagcaacacccattcttttccagagcagtatatgcattaccaaaacggcagaaattcggcctacgacctgcctaatgtaagttcacagtcggttcttgctttcactgagaaacactatccaaacaagttaaaaaacttgggtacactttattacaatcgtttcaaagaagggtcttttgatgaagactccacaagttactcagacaggcacagttttccatacaacctttatgacaacactcttccaccaccgttccttccagctatcggtattcaaaatatcaataacattgcaacgctaaaaataacatatgaagatattcaggcaagtttcaataatatagaatctcctagaaagagaaataatgagatatggggatgtgatatctattctgatgactcagacccaatactagttttaagacattgcgggttcaaaattggagcgccttctggtggctcatttcacaaattgagaagaacccctgtaaatgtaactaatcaagataatgttacaggtaaccttcccctactggaaggcacaccttttgatctagaggtggagttgttgtttttgcctactctacaaaagtatcctagcgtaaaaagatttgatataacatcgcgggaatggggatcggaagccaccgttatacacgatggactgagttacggtatctatagtattgtcattaagcaaagactagatagagataaacctcatgaaccaaacgggtatattaaaaatttaaaatggacctaa

SEQ ID NO: 75878 - DNA, 612 bp, Saccharomyces pastorianus
atgtcattatattacaccttgttttttgccattctagtgttggagattttcatgttctccattctagccctacctatcccttctagataccgtaggcctctcaccttactgttattaaagccgttcaaatcctccacagtgcaagttgcgatcaagtgtatacttgggttcattcttttgcttttcatcgattgtatcaacagagtgtacagcatcgacaaagagctgcagttaagtagcgcctctcaaaataatggcgctataatcgctcaagatagaattgaggtgctttctaggaaattctttgcccaaaggaatatgtatttgacaggtataactttgtttttgacctttgtcgtcgttaggacttttgggctagtcatagaacttttaaccatgaaagacatatacagagcatcgcctccagtagcctccagcgatgtcaagaagaacgactctgttactgccgaagctgctgctcaatccggcgcttccaaggatgaccacggcgatgagaaaaattttgaactattgaagaaaattcaggacatcgatgacgaaattgcacgtttaaaggagaagtcggaatcgttgcaagaagaaatgaattag

SEQ ID NO: 75879 - DNA, 330 bp, Saccharomyces pastorianus
atgagctgttcacccaatttttgtaaagtttcgtttcttgtttcaaatgtatttcctgtgctcaagtctccagtcattggtactcgtaccaacatattcctgcttgtggtatatagcagtttagttagttctttagtcggtatgcgttcctttcctttatatccgtcaggattaacttcaaggacttcacacagtttttctatcttactaatattctttttcgtcaccgtgtttatagttctgatgggaatattcctgcgaatcccagatattcgagcaacagtagttgcaaacacttttgtccttaacatgtcgagattcattatctga

SEQ ID NO: 75880 - DNA, 180 bp, Saccharomyces pastorianus
atggctattgctccaattactggtacgatcaagagaagagtcatcatggacatcgtcctcgggttctccctcgggggtgtcatggcctcttactggtggtggggattccacatggataagattaacaagagagagaagttctacgcagagctagctgagaggaaaaagcaagagaactga

SEQ ID NO: 75881 - DNA, 426 bp, Saccharomyces pastorianus
atgtccgaattagaatcgttcagcaatttattcaaaatgataggaactaatttctctttcagtaaaagttgtctcatatgtgcatcctcacaaagaacactgatggaactcaaagcaatacttctatcatttggcaccacacttgacaaattctgcaatagcggctggagttttttattaacgacgttggtatctttattattgtcatttgacccagctttgcgtagtggatttaatcgagacgaagatgctcttgatcttttctttgatctgcccattcttttctgccctaaaaagtcgatttctgcgtccttgtacaaactcgaaaatccgatcgaaagtacttggaattcagtaagaataatgggggcgttgctacgaagatttaattttacaatacacagacctttaaacaatggtagataa

SEQ ID NO: 75882 - DNA, 2367 bp, Saccharomyces pastorianus
atggcaggtcattcacacaggtcatcattaaaaaacggacacaaatcttacaaatccaaacatgcttctaaaggtgctttgaaaagattatacaaggggaaagtggaaaaagaacccgtgggcactggcaaaccagacaaacaagtttcaaaattgcaacgtagaaacaaggcaaaacaattaagggcccaaaagatcttggattccattgaaaacaggaaattattcgaaggaaaaaatggcgctgccaaaatcattactattgttccgttagtgaatgatttagacccattggacattctttacaagctattaaagtgtgcagatgatgaagaaatcatggtgcaggaagtagactccaaacgtatatttaatgttcatataaagaagtttaaaagcaatcttaaaatcataattccagacatgaccaattttttgaacattttagattgcgctaaagtagcagactttgttgtgtttgggctcagtggtgtccaagaagtcgatgaagaatttggtgagcagatcatccgtgcgttagaactacaaggtattgcttcatatatcggtgtcttaagcaacctctcagcagtccatgaaaaggagaaattccaattggatgtcaagcaatccttagaaagttatttcaagcactttttcccaagtgaagaacgtgtttataatttggaaaaaaactcagacgctttaaacgtcttgagaacattgtgccagaggctaccaagatcaatcaattggagagacaatagaggttacgtagtcgctgactttgttgatttcgttgaaacctctcccgattctggtgacctggtaattgaggggaccgtccgtggtattggcttcaacgccaatagactggtccatattcctgattttggtgacttccaactgaataagatagaaaaaatcagtgaatcttcgcagaaaaggaaaataataaaggaaaaagctacagatagtctgagcttagagctggatttacaaacagttttcgaaagtaatatgaatagagatactttggacgaatatgccccagaaggcacggaagattggtcagattatgacgaggattttgagtacgacggtttgacaaccgcgagatacgacgaccatggcttcttgccagggagggaacaaacatcaaaaaaggcggcagttcctaagggaacttctgactatcaagcgaagtggtacttggatgacgtcattgacgcaaatgaggaagaagaggcagaacagaccaatggaaaggatgagacaatgatggaaattgatgatgaaatgatggtggagcaagacaatgaagaggtagcaggcgacgaagaatatgacatagaggataatgaaggatttgaagagctttcacccgaagaagaagaacgtcaactgagggaatttagagatatggaaaaggaggacagagagttccccgatgagatcgaactagagcccagtgaatctgccatcgaacgtttgaaaaggtatagaggtttgaaaaacttatacaactgtgattggcaagttgatgaaaaggacccatcatcaccagcggaatggaaacgtctattaaggattggcaattacaaaaacactaaaaacagaatcataaaggaaaccaagaatgaagcacaggccattgcaggtgatcgtattaggatgttcatcaggtttcctaagtttctgcttgaaaagattcaagatcctaaacaactattatttgctgtctacggattactacttcatgaacacaaaaatgcggtagtcaacttctctctacaaagatgggaacaatatgacaaacctgtgccttctcaggagcctatcgtagtacaatacggtgttagaagatacactattcaacctctattttctcaaggctctaacagtcctaataatgttcacaagtatgaaaggtttctgcatccagatacagtatcagttgccacatgtattgctcccgtagatttcacccagtcacctgcaatttttttcaagccatcaccaacagatgccaaaaatattgaattgattggtcacggtacatttctgaatgcagaccattcaagaatattagcaaagagagccattttgaccggtcatccattcagattccacaaaactgtggttactgtacgttacatgtttttcagaccagaagatgtggaatggttcaagtctatcccactgttcaccaaatcaggtaggtcaggtttcattaaagaaagtttgggtacgcatggttatttcaaggctacatttgatggtaaattatctgcgcaggatgttgttgctatgtccttgtacaaacgtatgtggcccatgccttcgttaccttggaatggtatgtaa

SEQ ID NO: 75883 - DNA, 717 bp, Saccharomyces pastorianus
atgacgatacaagcgaagcccagttcgagcatatcgtatgattcgactacatacggcacagcaccgggcttggatataaaagagttccaaatcatcgaagattggaatggaagacctgccagcgcttggtcggtgcagaggattgggcttctacagtccaagatcgaaaggtacacgtacaatatttaccacaataataaatatgggaagcacaacttatctaagctgataccagggcatgctctcattcagttcgctaatgaaacattcgggtatgatggttggcgaatggatgttatagatgttgaggcccgggagtgccagcccttcaccgcagtaaataatggagaaaacaccaacactagtgaggtcaagtatacagttgtggcagaagcccaagtaaaggttaccttaaaggatggcaccaacacacagtgtggtgggctaggtagaattactttgtcctcgagaggtgaatgttataacaggtcgaaaaaagaggctgtaggcgatgcgttaaagaaggcgttattgagctttgaaaaaatcatactcgattatgagactaagattacaaataattactatgtcgatggcttgtatggctcaaaaaaaattaaaaatgaagctaacaccaattacaacttattgtcagcgactaatagcaagccgacttttatcaaattggaggatgctaaaggcacgcatatcaaataa

SEQ ID NO: 75884 - DNA, 987 bp, Saccharomyces pastorianus
atggaaaaaaaacatgttactgtgcaaatacaaagtgctcccccctcctatatcaaattggaagcaaatgaaaaattcgtatatattacaagtacaatgaacggcttatcttatcaaattgcggctatagtttcatacccagaaaagagaaattcatcaactgcaaataaagaagatggtaaattactgtgcaaggaaaataaactagcattgttactacacggaagtcaatctcacaagaacgctatttatcaaactttactagcaaaaaggctggccgaattcggatattgggttctaagaatagattttaggggccaaggtgattcctcagataactgcgaccctggccttggtaggacgctcgctcaggatcttgaagatttgagtacagtataccaaacagtatctgacaggtctcttagggtacaattgtacaaaactagtacaatatcactggacgtggttgtggcacattctagaggatctcttgccatgttcaaattctgtctaaaattacatgcagctggatctccattaccgtctcacctgattaattgcgccggaagatatgatgggagaggacttattgaacgctgcacacgactgcacccacattggcaagcagaaggtgggttttgggcgaatggtccacgaaatggcgaatacaaagacttttggataccattaagtgagacttatagtatcgctggcgtttgcgttccggaatttgccacgataccacaaacttgttcagtaatgtcctgctatggcatgtgtgatcacatagtgccaattagcgcagcctcaaattatgcaaggcttttcgagggcagacattcattgaaacttattgaaaatgcggaccacaattattatggcattgaaggtgatcccaacgcgctaggcttaccgataaggaggggtggagtcaactactcaccactagtagttgatctaattatggaatacctgcaagatacatag

SEQ ID NO: 75885 - DNA, 1086 bp, Saccharomyces pastorianus
atgaaaggtttaattttagtcggtggttacggtaccagattgagacctttaactttgaccgttccaaagccactggttgaattcggtaatagaccaatgattttacaccaaatcgaggctttagccaacgctggtgttactgacatcgttcttgctgttaattacagaccagaagtcatggtggaaactttgaagaaatacgaaaaggaatatggtgttaacatcactttctctgtagaaactgaaccattaggtactgcaggtccattgaaattggctgaagatgttttgaagaaggacaactctccatttttcgtcctaaactccgacgtcatttgcgaatatccattcaaggaattggctgacttccacaaagctcacggtggtaaaggtaccattgttgctaccaaggtcgacgaaccttctaaatacggtgtcattgtccatgatatagctactccaaacttgattgacagatttgttgaaaagccaaaggaatttgttggtaacagaattaacgccggtttgtacatcttaaacccagaagtcattgacttgattgaaatgaagccaacttcaattgaaaaggaaactttcccaatcttggtcgaagaaaaacaactatattccttcgatttggaaggtttctggatggatgttggtcaaccaaaggacttcttgtctggtaccgttctttacttgaactctttggccaagagacaaccaaaaaaattggctacaggtgccaacattgttggtaatgccttgatcgatccaaccgctaagatttcctccactgctaagattggcccagacgtggttatcggtcctaatgtcaccatcggtgatggtgttagaatcaccagatctgttgttttgtgcaactccaccatcaagaaccactccttggtcgaatctaccatcgtaggctggaactctaccgttggtcaatggtgtcgtttggaaggtgtcactgtcttgggtgacgacgttgaagttaaggacgaaatctacatcaacggtggtaaagtcttacctcataagtctatctccgataatgttccaaaggaagctattattatgtga

SEQ ID NO: 75886 - DNA, 558 bp, Saccharomyces pastorianus
atgacaacaacctcaacaaccagtgtagatggcagaacctcctcgactttgaaggctactttatctgcttcaggtccaaattcaaatggtccaacgcccgctgtgcttcctcagaagccaaaattaacaggttgggtgcaggcagctgccaaagcccttccaaggcaacagcaacagcaacagcaggcacgaaaagatgattccgtggctgtacaacctgctaatacgaagactaaaaccatcgcatctaccgcgccgcctgctaatataaagggtagttccaccgccaatggatcatccacaaataagaaattcaaaagagcgaataaacaaccttacaatagagaagaagttagatcgtatatgcacaaattatttcagagctataccgctggtgaaaaaagtcattcaacgaaaacttataagcaagtactatcagaaacggcaagtggcagagtttcaacagccactgactggggtactgtatcaagcagtaaaaataagaataaaaaatacggctgtttgtccgatattgctaaagttttgagaaaccaatga

SEQ ID NO: 75887 - DNA, 912 bp, Saccharomyces pastorianus
atgagtgtgataggtaggttcttgtattacttgaggtccgtgttggtcgtactggcgcttgcaggctgtggcctttacggtgtaatcgcctctatcctttgcacgttaatcggtaagcaacatttggctcagtggattactgcgcgttgtttttaccatgtcatgaaattgatgcttggccttgacgtcaaggtcgttggcgaggagaatttggccaagaagccatatattatgattgccaatcaccaatccaccttggatatcttcatgttaggtaggattttcccccctggttgcacagttactgccaagaagtctttgaaatacgtcccctttctgggttggttcatggctttgagtggtacatatttcttagacagatctaaaaggcaagaagccattgacaccttgaataaaggtttagaaaatgttaagaaaaacaagcgtgctctatgggtttttcctgagggtaccaggtcttacacgagtgagctgacaatgttgcctttcaagaagggtgctttccatttggcacaacagggtaagatccccattgttccagtggttgtttccaataccagtactttagtgagtcctaaatatggggtcttcaacagaggctgtatgattgttagaattttaaaacctatttcaaccgagaacttaacaaaggacaaaattggtgaatttgctgaaaaagttagagatcaaatggttgacactttgaaggagattggctactctcccgctatcaacgatacaaccctcccaccacaagctattgagtatgccgctcttcaacatgacaagaaagtgaacaagaaaatcaagaatgagcctgtgccttctgtcagcattagcaacgatgtcaaaacccataacgaaggctcatctgtaaaaaagatgcattaa

SEQ ID NO: 75888 - DNA, 828 bp, Saccharomyces pastorianus
atgtctgaaaaaccacaacaagaggagcaagagaaaccacaatcaagacgtaattcatttgctgtgattgaatttactccagaagtcttggacagatgtttaaagcaagtggaattctacttttctgaattcaactttccatatgacaggttcttgcgcacaacagcggaaaaaaacgatggatgggtccccatcagcaccatcgccacattcaaccgtatgaagaaatatagaccagtggataaggttatcgaagcactacgtagttctgaaattttggaagtatctgctgatggagagaacgtcaagagacgtgttcctttggacctaactgctgccagaaatgccagaattgagcaaaaccaacggactttggccgtaatgaatttcccacatgaggacgttgaagcttcccaaattcctgaattgcaggagaacttggaagcctttttcaaaaaattaggtgaaatcaaccaagtgcgtttgagaagagatcacagaaacaagaaatttaatggtacggtcttggtggaatttaagacaattccagaatgtgaagcttttttgaaatcgtattccaatgacgatgagtccaacgaaattttgtcatatgaaggtaagaaactgagtgttttgacgaaaaaacagtttgatttacagagagaggcctcgaagtccaaaaacttcagcggtagatcaagatcctttaacggccataagaagaaaaacttgcctaaattccccaaaaataagaagaaaaacggcaaggaagagtcaaaagaggactcttctgccattgccgatgacgatgaggagcacaaggagtga

SEQ ID NO: 75889 - DNA, 372 bp, Saccharomyces pastorianus
atgataatgagatacgagaaccagaagaaacacaagaatcactccttgtgctcctcatcgtcatcggcaatggcagaagagtcctcttttgactcttccttgccgtttttcttcttatttttggggaatttaggcaagtttttcttcttatggccgttaaaggatcttgatctaccgctgaagtttttggacttcgaggcctctctctgtaaatcaaactgttttttcgtcaaaacactcagtttcttaccttcatatgacaaaatttcgttggactcatcgtcattggaatacgatttcaaaaaagcttcacattctggaattgtcttaaattccaccaagaccgtaccattaaatttcttgtttctgtga

SEQ ID NO: 75890 - DNA, 1473 bp, Saccharomyces pastorianus
atgccggtatcatcatctgttgcatcaagcattgactcagtaatgtcccatgagacgatgtctttacggagaaaccctccctttatagatactccagaaaaaatgccaaacccaacggcttctcccaatggcaccattcaccatttgatagatccatcactgccattgttgtccagtactacgtcgtcttcgcgctctaccctcagttctacactgaattctcctccacctcccccattaactacatcatactcttcttataactcctctgcatgccagtctatcacgagttcgcctacagacaatacagccttggcacataattccaaatgctatttccctcatagcctttctccaacaccgctgtcatccaacagctcaagccatgtcattttgccacccatatcctccttcaccaatttaattacagttgcagaaagagaatttaacggcagatcaaattccttgcatgccaattttacatcaccggtgccaagaacagtgctagatcatcacagacatgagctaacattttgcaaccctaacaacacaacgggtttcaaaaccatcaccccctcaccaccaactcaacaccagagtatattgccaaccgcggtagataacgtaccgagatcaaaatccgtgtccagcctacccgttagtggattcccacctttgatcgtcaaacaacaacagcaacagcaactcaacagtagtagtagtgcctctgcactaccgtctattcattccccattgactaatgaacatacaagcaggtattcatcgtctttaaaggattccgccaagataacgaagcaaagaaagaaaaaggaatgccccatctgccacaacttctacgccaacctatctacgcataaatccactcatttaactccggaggacagaccgcataagtgccctatctgtcaacgcggctttgccaggaacaatgatctgataaggcacaagaagcgccattggaaagatgaatttatgcagatatacgcaagggagtccgacaacaatagtggtgctgacgatcaagatgacactgcccgcacctccgcaaacaacgacagcgacgactcaaacgataaactcgctgcctcatcctcttccgaagaaacaaaactactgaagaaaaaccaattgaaatcactatacaagattaaaggtgcattcaagtgtccttacaactctactctgatcaatttggatatggaggtgtatccacacaagtctatatcactctatttcgagccaataaactgtcatcaaacgggcgttttttcgcgctgtgatactttcaagaatcacctaaaggctttgcatttcgagtacccgcccaaaaccaagaaagaagatagaggtgttgtgccggggaagtgcaagcattgtggactgcaatttccgaacgttgacgtctggctaaataagcacgtggggaaaggatgtggctactcatatcactaa

SEQ ID NO: 75891 - DNA, 936 bp, Saccharomyces pastorianus
atggtatctagaggccccgacgaatggcttgaaacaataaagaaatgccaggcgctaactgaaaacgagatgaaacaactgtgtgaaatggtgaaagaacttttgatggaggaaagtaacatccagccggtacagacccccgttactgtatgtggagacatacacggccaatttcatgacttgttagagctattccgtactgcgggtggctttcctgacgatataaactacatttttctcggtgattacgtggatcgtggctactatagtctggaaacttttacgcttttaatgtgtctgaaagtcaagtacccggcaaagataactttggtcagaggaaaccatgagtccagacaaattactcaagtttacgggttttacgaggaatgcctgaataagtacggatctaccaccgtatggaagtattgctgtcaagtttttgatttcctgacgctggccgctataattgacggtaagatcttatgtgtccatggagggttatctcccgagattagaatgctcgatcaaatcagagtcttgtcaagagctcaagaagtgccacacgagggtgggttctcggacctgctttggtcagaccctgacaatgtagaggcttggcaagtttcccctcgtggtgcaggatggctctttggcagtaaagttgctagagagtttaaccacgttaatggactgaaccttattgcccgggctcaccaactggttatggaagggttcaagtaccattttcctgaaaaggacgttgtaaccgtgtggtccgcgccaaattactgttatagatgtggtaatgtcgcgagtgtaatgaaggtcgatgaggatctggaacctactttcaaaattttctccgctgttcccgatgactacataagagaatccacggcaaaccataataatcaaagagccggctatttcttataa

SEQ ID NO: 75892 - DNA, 522 bp, Saccharomyces pastorianus
atgacccacggcttgaaagctctgtttgccttgctatttctttacacagctgctgtcaatgcgggtgtgattggcatattcaacgcccttcccccaccaaacaccaaaccaattaacggcgaatctccactttaccaatgtgacattctagacaagcaacttgtggaaatcaaagaggtcaatttggaccctaacccccctgttcgtggcgaaaatttgaccatttctgctaacggtgaggtctttgaaactatagaagagggggcatatatcgacgttgaagtccgtctaggatacatcagactgttatcccagacttttgatttgtgtgaaacattagaagataacgatatcgaaggcttatcctgtccaattgaaccaggtgaatacaacattaagaaaatagttgagatcccaggcgaggttccacctggcaaatatgttgttgtagcaagagcttacactgaaaaggatgatctgatcacttgcttaaccggagaagtcgtcttcccaccaaggtga

SEQ ID NO: 75893 - DNA, 288 bp, Saccharomyces pastorianus
atgtccggaaaaccaccagtttatagattaccccctcttcccagactaaaagtgaagaaacctatcattaggcaagaagcgaacaaatgtcttgttttaatgtcaaacttgttacaatgctggtcttcatatggtcacatgaaccctaaatgtgctggcttagtaacggaattgaaaagttgcactagtgaaagtgccctcggcaaaagaaacaacgttcaaaagagcaatattaactatcacgccgctaggctgtatgataggatcaacggtaaaccccatgattaa

SEQ ID NO: 75894 - DNA, 921 bp, Saccharomyces pastorianus
atgcagttgagcaaggctgctgagatgtgttatgagataacaaactcttacttacacatagaccagaaatctcagataatagcaagtacacaagaagcgatacggttgacaagaaaatacttactaagtgaaatttttgtacgttggagtccactgaatggggaaatatcattctcgtacaacggaggaaaagattgccaggtattactactgttatacctgagttgcttatgggaatatttctttattaaggctcaaaattcccaattcgatttcgagtttcaaagcttccccatgcaaagacttccaactgttttcattgatcaagaagaaactttccctacattagagaattttgtactggaaacctcagagcgatattgcctttccttatacgaatcacaaaggcaatctggtgcatcggtcaatatggcagacgcatttagagattttataaagatataccctgagaccgaagctatagtgataggtattagacacacagacccatttggtgaagcattaaagcctattcaaagaacagattctaactggcctgattttatgaggttgcaacctctcttacactgggacttaaccaatatatggagtttcttactgtattctaatgagccaatttgtggactatatggtaaaggtttcacatcaatcggcggaattaacaactcattgcctaacccacacttgagaaaggactccaataatccagccttgcattttgaatgggaaatcgttcatgcatttggcaaggacgcagaaggcgaacatagttccgctataaacacgtcacctatttccgtggtggataaggaaagattcagcaaataccatgacaattactatcctggctggtatttgattgatgacactttagagagagcaggcaggatcaagaattaa

SEQ ID NO: 75895 - DNA, 1323 bp, Saccharomyces pastorianus
atgatcagaacatcatctatattaaaaaactgtaactatagatacatacattgcatccatagatgcttgctgaatgaagccaatttgaaagatagaaaaactcacaacgtagaaagagtttcaaatgaaaagacatttgaacaagctctcgaagaggaacgtaaggtatttggagaactattcgaagctggagcaagggttgaaaacatgaggcacactaatgctagcaaaataattgacaagtattacaatgggctacaggacaactccgagggaactagtgtaaaaaaagaaaaaattgtttttaaccacagtcaaagagctcaaaggaagcttccaaataaggaccatgaattcctgaaggaaacagcaggcaatgactatgtctacgaacgggcagaaccttctgctattagcactaaaacgataagtgagcagacaagaactttgctggaaaagatatttgacgaagataatagcattaataaaagcaacagagaattgctgaatcttaatctgcgcaagggctcgggaatggaagctttgaggcagccagttgcacattccaacgtcaaatttagcgaggaagtgatgcaagaaattggtaataagattcggtaccaaaccacactggatcaggttttagaacctcacattgactacttgagggaagctgttaaaagtgattacgatcttttaagatacctaaagcaatcactagacatttacaagaaaaggaacaaagacctagagttaaagatgaatgcagaatcttcaaacattttcgaagacattagaagtgcgtgtataaataaaccggcagaactaccgaaaccgcttgcaatgactttaccatatattatagtcaaatcgcttagattaggtgactttgatttcccggcagacagaaagtacacattgatctcctatgtttataatgaatgtaaaaacaacatggacgcttcactgtacctaacaatttgtaatgttgatttctacaatttgctggttcagctattgtgggaaaacttccaggagattcgctacttgagacgtgtggttaccgagatgagcgttaatggtgtcatcggaaatattgaaaccgtggatatattggataagattgtcaaagaaatgagaagtttaaatgaggatgtctttcttgaagcaggagaacagctcagtgcagatgaggaagtttcgtccagcgcaaataaaatagtgaatgtaggtgttttatggaataaagacacgaataatgacttactaattgttgaaaattatctcaaaagcctcaaaaaaaatttaactagagacaggtag

SEQ ID NO: 75896 - DNA, 1389 bp, Saccharomyces pastorianus
atgcaaagaaataataggttaagaaatttgtttacagtgccagtaataatggctcgacaactcaaaaggaatgcattatctgcaggtcttgcttttgcaggtaatgcaacctcaaatgagtttgatgaacatttgcaaaatgaggttgaaagagagagggaaattcaaaagaaaaaaaaaataaagcgaactcaatcaaaaaaatcgccagatttgattaataaatctactttccaatcacgaacgataggcagcaaaaaagagaaacatagacaactagatccagagtatgaaattgtcatcgatggccctctaaggaaaatcaagccctaccattttacgtacaggaccttttgcaaagagcgttggagagataaaaaattggttgatgtctttatatctgaatttcgagatcgtgaatctgaatattataaaagaacaatcgaaaacggggacgttcacataaacgatgaaactgcggacttatctactgtaattcgcaatggtgacctgattacgcatcaggtacatagacatgaacctccagtcacttccaggcctatcaaagttatttttgaagatgataacataatggtcattgataaaccgagcggtatacctgttcacccaactggccgatatcggttcaatacaattacgaaaatgcttcaaaataatctaggatttgttgtgaacccatgtaataggttagataggcttacaagtggattaatgtttttggcaaaaactccgaggggagccgataatatcggcgatcaactaaaagctcgagaagtcactaaggaatacgtggccaaggtagttggagaatttccagaaacggaagtaattgttgaaaaacctctaaaactgatcgagccaaggcttgctcttaatgcagtttgtcaaatggacgagaaaggagccaaacatgcaaaaactgtttttaacagaatcagctacgacggtaaaacgagtattgtaaagtgcaaaccgcttaccgggcgatcacatcaaattagagtacatttacagtacttaggccacccaattgctaacgatcctatttattccaatgatgaagtatggggtaacaatctcggaaaaggcggccaggctgacttcgatatagttattactaagctagacgaaatagggaaaagaaaacctgctaaaagttggttccatagtaatggcgggtacggtgaggtattaaggcaagaaaaatgttctatttgtgaatctgatttgtatactgatcctggccccaatgatcttgatctgtggttacatgcctatctatacgaatcaactgagactgaagaaggaaccgaaaagaaaaagtggtgctacaaaacagagtatccagaatgggctctgagaagatag

SEQ ID NO: 75897 - DNA, 2874 bp, Saccharomyces pastorianus
  modified_base (1543)..(1585): a, c, g, t, unknown, or other
  modified_base (1604)..(1639): a, c, g, t, unknown, or other
atgataactgagggatttcccccgaatttaaacgcgttgaaagggtcatccttactagaaaagagagttgattctctccgacagcttaacactaccacggttaaccagctgctggggttgccggggatgacctctacattcacggctccgcaactgttgcagttaagaataatagctataactgcgtctgccgtgtcccttattgccggttgcctcggaatgttcttcctttctaaaatggataagagacgaaaagtcttcagacatgatctcatcgcatttttgataatttgcgactttcttaaagcttttattctgatgatttatcccatgattatccttattaataatagtgtgtatgcaacacctgcattttttaataccttgggttggtttacggcctttgccatcgaaggtgcagacatggccataatgatattcgccatacattttgctattttgatcttcaagcctaattggaaatggcgaaataaaagatcgggaaatatggagggtggcttgtacaaaaaaaggtcatatatctggccaattactgcattagtacctgccattttagcaagcttagccttcattaattataataaactcaatgacgattctgacaccactattatactggataataataactacaactttcctgattctcccaggcaaggtggctacaaaccttggagtgcatggtgctatttaccacccaagccgtactggtataaaattgttttaagctggggtcccagatatttcattattattttcatatttgcagtctacctcagtatttatattttcattaccagtgaaagtaaaagaattaaagcgcaaattggagactttaaccataacgtactagaggaagagaaagaaaagaaaaaattatttgggctcggtcactggggaaaagccaaatggtatttcagatcctattttaaattgccattgctacatcttttgagaaatttaaagaattttttcaccatttcgttcatagatccgaatgaggaaacagacgattcaggtagtagtaatggaactttcaattttggtgagagttcgaatgagatacctacactattcagaaaaacaaatacaggtagtgatgagaatgtctcggcaagtggtggagttcgcttacttgactataacagtgctaaaccactcgatatgtccaaatatgcaatgtctgaacagccagatttggaaagaaataatccttttgattgtgaaaatgacatcacactcaatccttcggaactagtatccaagcaaaaggagcataaagttacttttagtgttgaaaatgaaggactggatacaagaaaaagttcaatgctgggacatcagactttctcttgccaaaattctctagaatctcctttagcaatgtatgataataagaacgataacagcgacataactagtaacattaaggaaaaaggaggcatcatcaacaacaacagtaacaacgacgacgacgacaacaacaacaataacgataacgataacgataacaataatagcnnnnnnnnnnnnnnnnnnnnnnnnnnnnnnnnnnnnnnnnnnnacaataacaacaacaacannnnnnnnnnnnnnnnnnnnnnnnnnnnnnnnnnnnacgttgataacaataatactaatccagccgataatattcctacactttctaatgaagcatttactccgtctcaacaattttcacaggagagagtgaataataatgcagacagatgcgaaaattcaagtttcaccaacgtacaacagcatttccaagcccaaacctacaaacaaatgaaaaaacgtagggcacaaattcaaaagaatctaagggcaatattcatttatccactgtcgtatattgggatatggcttttccccatcattgcagatgcgttgcaatacaatcatgaaataaagcatgggcctaccatgtgggtgacatacattgacacttgcgttcgaccattaagttgtctcgtcgacgtcattgtttacctgttcaaggaaaaaccttggaactattcatgggcaaaaacagaatcaaaatatctcattgaaaaatatattctgaaaggagagcttggggaaaaggaaattctgaagttttgtcacagcaattgggggaaaagaggttggtattatcgtggtaagtggaagaaaagaaaatgctggaaatattctacaaaccctctgaagcgtatactgtggtttgttgaacgcttctttaaacaattgtttgaactaaaactacactttagtttttatgacaattgtgacgattttgaatactgggaaaactactattcagccaaagattcaaacgataataaacgcacagaatctgatgagactaaaacgaatagtagcgatcgctcccttccatcaaattcacttgaactacaggcaatgcttaataacatcacggccgaagaggttgaagtgcccttgttttggaggatcattcatcatattccaatgcttggcggaatagatcttgatgagttaaacagattgttgaaaatacggtacaataacgaccatttttctctacccgggttgaaatttgcattaaaccaaaataaaagtcacgataaacatcaggacgtctcaactaacagtatggtcaaatccagcttcttttcaagcaatattgtcacaaacgatgatgagaatagcattgaagaggataagaatttacgctattcagatgctagtgcatctgaaaattatctggtcaagcccacaataccaggtacgactcctgatccaataattgaggcgcagaacgataatgatagtagtgatagtagcggcatagatttgatagccttcttaagaaatggaccattataa

SEQ ID NO: 75898 - DNA, 312 bp, Saccharomyces pastorianus
atggctccttgccagggtcgtccaaagattgtgattcagaccagttctgcatatatactcctcgggtatttggaaattctccggcaaatagtgctgccgccacagaggaatctaccccagatgacattgccactatcacgttgtcaaactttgccggtagccgctgtggtctgtacggtgaagcactcctccgtcctattaaatttaaatatcttgccagcattgttatctgacttgaatcgattgccaaatcaatacgctcacatttttaacgttcttgtatgtttccaaactttcattcttttacaataa

SEQ ID NO: 75899 - DNA, 312 bp, Saccharomyces pastorianus
atgcatgaaagcttacgaaactggaaactttctcctcgatattttggaattgcgggagatgtaatcgccgaaggcactggtttaggaaaagcccttaatattcctggcaagtacatattgaaaccctttccattattgagactattgggcgtaacgctgttcataagctcccttgtcctactggctaatcccactggaactttgaacattttttcctactcatatgtggttatggtggtcttatttatctgcgctaaatcacttttcaaatattctttgcagtttataggggaggagacttcctctttgtaa

SEQ ID NO: 75900 - DNA, 105 bp, Saccharomyces pastorianus
atgcttatgattctttggtttttcaaccaaatcgccagatgtagggtcaacttcacaggaggggacggatacaagccaatcatcctttaccacgtcattcattaa

SEQ ID NO: 75901 - DNA, 936 bp, Saccharomyces pastorianus
atgactgcaagcacaccatccaatgtcatgacattgttcttgttaaggcatggacaaagtgaattgaatcacgagaatatattctgtggttggattgacgctaagctaaccgaaaaaggtaaagaacaagctcgtcattctgccgagctaatcgaacaatattgtaaagctaataatttgagattaccccagattggttacacctcacgtttaattaggacccaacagaccatagaaacgatgtgtgaagaatttaagttaaagccacaactgcaggttgtttacgactttaataaaatcaaacttggagacgaatttggcagtgatgacaaggataatatgaaaatcccgattcttcaaacttggaggctaaatgaacgtcattacggttcctggcagggccagaggaaaccgaatgttttaaaagaatatggtaaggataaatatatgttcattaggagagattacgagggtaagccaccacctgtagatcttgaccgtgagatgattcaacaagaaaatgagaagggctcttctactgggtacgaattcaaggagccaaacagacaaataaaatatgaattggaatgcagcaatcatgacattgtattgccggattccgaatctcttcgtgaagtggtttatagattgaatccttttctacaaaatgtcatattaaaattagccaatcaatatgatgaatcttcatgcctgattgtgggccatggaagttcagtgagatcgctactgaaaattctggagggtatatcagacgatgacatcaagaatgttgatattccaaatggtatccccttagtcgttgaattagataagaataatggtcttaagtttatcagaaaattctacctagatcctgaagctgctaagatcaatgctgagaaagtccgtaatgagggtttcataaaaaatccttaa

SEQ ID NO: 75902 - DNA, 678 bp, Saccharomyces pastorianus
atgtccaatttatgtgtacttttcttccagtttttttttttagcacaattttttgctgaggcatcaccgttgacatttgaactgaataaaggtcgaaaggagtgcttatatacgctaactccggacattgactgtacaatctcatattattttgcagtacagcaaggagagagcaatgactttgatgttaactacgaaatatttgctcctgatgacaaaaacaagccaataatcgagagatctggtgaacgtcaaggtgaatggtcatttataggccaacataagggagaatatgctatctgcttttatggtggtaaagcacacgacaagattgttgatctggacttcaagtacaattgtgaacgccaagatgatattcgaaatgaaagacgcaaggcgagaaaggcgcagagaaacctgagagactctaaaaccgatcccttgcaagacagtgtggaaaattctatagacaccatagaaaggcagctccacgttttggaacgtaatatacagtactataaaagcagaaacaccagaaatcatcacaccgtttgttcaacagagcatagaattgtaatgttttctatttacggcatattattaatcatcggaatgagctgcgctcaaattgccatactggagttcattttcagagaatcgagaaagcataatgtgtaa

SEQ ID NO: 75903 - DNA, 303 bp, Saccharomyces pastorianus
atgccaccaattatactaaaccgtttcactttaagaaatttttatttaaatctttcactatgcaaatatgtaagtacttttaaaattctctttccaaagaaaaggaaattatttcagactagcagtaatttatcactttgctattcagatattaggagaacatccttatcgagcaaatctgcctcgcttgagctgacaacgtcatcttcgtcagtactctcgccatccagtaaatatgtgttttcattcaattcattgaaaaacggggttttcagtaaatcttctgctgaactacgcttttga

SEQ ID NO: 75904 - DNA, 984 bp, Saccharomyces pastorianus
atgtcattcagaccaggtagcagaggtggttcccgtggaggttccagaggtggcttcggtggtagaggcggttcccgtggtggtgctcgcggtggttccagaggtggcttcggtggtagaggcggttctcgtggtggttcccgtggtggttccagaggcggcttcggtggtagaggcggttctcgtggtggtgcccgtggtggctccagaggtggtagaggtggcgctgctggtggtgcccgtggtggtgccaaggtcgttattgaaccacatagacatgccggtgtttacattgctagaggtaaagaagatttgctagttaccaagaacatggccccaggtgaatcagtttatggtgaaaagagaatctccgttgaagaaccatctaaggaagatggtgtcccaccaaccaaggtcgaataccgtgtatggaacccattcagatctaagttggctgccggtattatgggtggtctagatgaattatttattgccccaggcaagaaagttttatatttaggtgctgcttccggtacttctgtttctcacgtttcagatgttgttggtccagaaggtgttgtctacgccgtagaattttctcacagaccaggcagagaattgatttctatggctaagaagagacctaatatcatcccaatcattgaagatgctagacacccacaaaaatacagaatgttgattggtatggttgactgtgtcttcgcagatgttgcccagcctgatcaagctcgtattattgcattgaactctcatatgttcttgaaggaccaaggtggtgttgttatctccattaaggctaactgtattgattctactgtagacgcggaaaccgtttttgctagagaagttcaaaagttacgtgaggaacgtattaagccattagaacaattgactttagagccatatgaaagagaccattgtatcgtcgttggtagatacatgagaagcggtttgaagaaataa

SEQ ID NO: 75905 - DNA, 324 bp, Saccharomyces pastorianus
atggccgacaaactatcatcaaccgatgctatgggctgttggagtcccaccttctgttttatttcattaatttcttcgtctacttcagagctccccttattcgtggtagaagtcggcatagcagcatattccctggaagatcctgcagccatattgtccatattagtactaaatgctttagaagtttcctcttttatctctaccgtcaagaagttcgcattttgcgctacgaaaaacactaacaacaataatagcgttgtaacgcttaaaattctagcatttctcttattggaaggtatcataataaaattgtttctatattaa

SEQ ID NO: 75906 - DNA, 498 bp, Saccharomyces pastorianus
atgaaagttaaaataaacgaagtgtacagtgtgtttgcttggtcatggcacatccctagcacatctgatgaggacgcagccaataacgatccaaatggcaatgatgaagacgaggatgtctgtggtatctgtcgtgccagttataacggtacctgtccaagctgtaaatttccaggcgatcaatgccctttagtgattgggctatgccatcataacttccatgatcattgtatataccgttggctcgatacaccaacctcaaaaggactgtgtccgatgtgtaggcaaactttccagctacagaagggtctagcaattaatgacgctcatgtccaaaagttcgttgaaatagtttcaagaagaagagaagaaatgatagaggagggcgtcgcggaagagtttgtggactttgatgaaccaataaggcaaaacaccgataacccaatcggtagacagcaagttgataccatcctggacgaagactttttgttacgataa

SEQ ID NO: 75907 - DNA, 1314 bp, Saccharomyces pastorianus
atgggacaaggtgtatcatctggacaagacaaaaagaagaagaagggatctaatcagaaacccaaatatgaacctcccgttcaatctaaatttggtcgtaagaaaagaaagggaggtccagctactgctgaaaaattacccaacatatatccaagtactcgttgtaagttaaagcttctaaggatggaacgaattaaagaccatttgttattagaagaagaatttgtctctaactctgaaattttaaaaccctttgaaaagaagcaggaggaggaaaagaaacaattggaagaaatacgtggaaatccattgagcattgggacccttgaagaaattatagacgatgatcatgcgatagtgacaagtccaactatgcctgattattatgtatctatcttatcctttgtcgataaagagttactagagcctggatgttctgtgttattgcatcataaaaccatgtccatcgtaggtgttttacaggatgacgccgatccaatggtttcggtcatgaaaatggataagtcgccaacagaatcatacagtgatattggtggcttagaatctcaaattcaagaaataaaagagtctgtagagttaccgttaacacaccccgaactgtatgaagagatgggtatcaaacctcccaagggtgtgattctttatggtgcacccggtacaggtaagacattgctagcaaaggctgttgcaaatcaaacatctgccacattcttaaggattgttggctcagagttaattcaaaaatatttgggggatggtcctaggttgtgtaggcaaattttcaaagtagcgggtgagaacgcaccaagtattgtatttattgatgaaatagacgccattggtactaaaagatatgactccaatagtggtggtgagagagaaattcagagaaccatgctggaattgctgaaccagctggacgggttcgacgacagaggggatgtgaaggtgattatggccactaacaaaatcgagactcttgacccagcattaatcaggcctgggagaattgatcgtaaaatcttatttgaaaaccctgatctaagtactaagaaaaaaattttagggattcacacttccaagatgaatttaagtgaggacgttaatcttgaaactttagtaacaacaaaggatgatttgtcaggcgccgatatccaggcaatgtgtacagaagcaggtttgttagcccttagagagagaagaatgcaagttacagcggaggattttaaacaagccaaggagagagtcatgaaaaataaagttgaggaaaatttagaaggtttatacttgtga

SEQ ID NO: 75908 - DNA, 846 bp, Saccharomyces pastorianus
atgagtaatcattctgaaatcttagaaaggccagaaacaccatatgacataacttatagagtaggtgtggcggaaaataaaaactcgaaattccggaggacaatggaagatgttcatacgtatgttaaaaactttgcttcaagattagattggggatatttcgcggtgtttgatggacatgctgggattcaggcctccaaatggtgtggtaaacatcttcatacaattatagagcaaaacattttggcagatgaaacacgagatgttagagatgtattgaacgattcattcctagccattgacgaagaaattaatacaaaacttgtaggaaatagtggatgtactgctgctgtttgcgtattacgttgggagcttccggattcagtttctgatgattcaatggatttagcccaacaccaaagaaagttatatacagcaaatgttggtgattctcgaatagtattgtttagaaacgggaacagcataagactgacttatgatcataaggcatctgacactttggagatgcagagagttgaacaagcaggtggcctgataatgaaaagtcgtgtaaatggtatgctggcagtgacgagatcgttaggggataaattttttgatagtttagtagtgggcagcccatttaccacgagcgtagaaataacttctgaggacaaatttttaatcctagcgtgtgatggattatgggatgttattgatgatcaagatgcatgcgaattaatcaaggatattactgaacctaatgaagctgcaaaagtcttggttagatatgctttggaaaatggcacaacagataatgtaacggtcatggttgtcttcctctaa

SEQ ID NO: 75909 - DNA, 1293 bp, Saccharomyces pastorianus
atggtagtacaaaatagcccagtttcgtctgttcacgcagccaatttctctgaacgggggagcaataccagaacaatgacgtataaaaataagcttactgtttgcttcgatgacatcctaaaagttggagcagaaatgatgatgcaacaacagttaaaaaatgtacaactagattcttatctcgtcaatggtttcagtcaatctcagcaaaaattattgaaagagaaggttaaattatttcatggaattttagatgatttagagacttctctaagccagagttcttcatatttagaaactcttactgcactcggaaaagaaaaggagaaagaaagagaagaagctgaaaaaaagagggctgaacaagaaaatatgaggaaggttagagaacaagaagaattaaaaaagcgacaagaactcgaagaagcctcccaacagcagcaactccagcaaaattcaaaggaaaaaaatggccttggtttgaacttctccacaacagcacctgcgaacacaacggatgcaaacggttccaaagagaattatcaagaacttggatctcttcaatcatccaatcaaacacaacttgagaacgcaaatgctgctaataacggtgccgcattttctcccttaaccactactcgaatccaaagccagcaggcccaaccctcggatgcaatgtttaacgatttaaactctatggatatttcgatgttttcaggccttgacagtactggttttgactccacagccttcaatgccacggtggacgaaaccaaaggctttgacgataatgactcaggtaacaactacaatgacataaatatttcttctattgaaaacaacacaaataataatatcaatagcaccaagaacggcaaggataacaacaacgaaagcaacaaaaataacaacggcgatgaaaagaataagaacaacaacgagaacaacgagaacaacaacaacaacagcagtgagaagaacaacaataataataacaataacaacaatgacgataacggcaacaacaacaacaacaacagtgggaacgacaataacaataccaccaaccacgacagcaataacaagaacaattctatcactaccggaaatgataatgaaaatatagttaataatgatttaccaacgaccgttgtttccaatcctggagataaccctcctccagccgacaacggtgaagaatacttgacattaaatgatttcaacgaccttaatatcgactggtcgaccactggagataatggcgaattagacctcagcggcttcaatatatag

SEQ ID NO: 75910 - DNA, 612 bp, Saccharomyces pastorianus
  modified_base (460)..(495): a, c, g, t, unknown, or other
atgtcagttgaagaaaaaaagcgcagacttgaagaattgaaagatcagaatgtggtgcttggacttgcaatccaaaggtcacgactttcggtgaaaagactcaaattagaatacggtgttttactggagaggttggaatccaggatagaacttgatcctgagttaaactgtgaggatccattgccgactctggcctccttcaaacaggaactattgacgaaaccatttcgaaaatctaaaactaaaagacacaaagtaaaggaaagagatccgaatatgcccaagaggcccacaaatgcatacttattgtactgtgaaatgaataaggaaaggattaggcagaatggctctctggacgtgacaagagatctggcagaaggttggaaaaatcttaacgaacaagataggaaaccgtactataagctttatagtgaggacagagaaagataccagatggaannnnnnnnnnnnnnnnnnnnnnnnnnnnnnnnnnnngcggatgatgataaagaagagaatgaacagaagataaaaaataacgaggaaggatcatctacaaaagtagctgattctaaaggaggtgaagatggaagtttagtttcctctaactaa

SEQ ID NO: 75911 - DNA, 1293 bp, Saccharomyces pastorianus
atggtagatagtaatgatgatcaaccggaacgccatgcattacttcataatgacatccaaacatcaaataacagtaggccatcactggtccaaaaaaagtacttacctaccccacaagatacaagaaagtctagagcatcgtatacaggaagtgccatgatcaacccgacaagtaaacaaagtcgtacagggtcgggcgctcaaagaacatcacgcacagcacagaaactaaaacttttgccagaagaaccattccaaagagatagcgaaagacttactgatttaaagaatcaggaagtatattctcaggtaaacaggataaaagataagcctgctagaagggatgctgaaaagttgggaaaagctcacagacatttactccccaggtcaactgcatattgtaccgctagcagttacaatatgaaagagctggtaaggtggttaaaggactgtcgaaagctacatcatactcatcctaaattgtttgatgaatgcttgtacactcccttcatttacaacgattggaggggcgacaaaagatttgaggatgaagatgtgattaggttggatgatgagggcggtgaaattattgttagtgacaagcacccagatctgtttatctttgaatatggtgttgtcgttatgtggggctttactgaaagagaagaaaaagctttcttaaacgatatagaaaagttcgaaaaagaaaaattggcggaagaagatattcaagttgaagagttcaattattatgtcacaaaaagttatcaaccaagaatatataacgattttattaccttgagagatggttcaaattacatggtaaaactctctatctctcatgcaattgctcaaagcgtaaaaatttcacttttcgaagagcttgtggataatactattgaagatactcaggatataccacaagaaattgcatacagcggtaaagtttctatgagcaaagaagatataatgaaaagtataggggagctattcattttgaggataaatatcaatctacatggatcagttttagactctccggaaattatgtggtcagaaccacagttagaacccatataccaagcaacaagaggttacttagagatcaatcagcgcgtttcacttttaaatcaaagactcgaggtcatttcagatcttcttcaaatgttgaaggaacagctgggccattctcatgaagaatatcttgaatttattgtcatattactagttggtgtggaagtcctaatatcggtgatcaatatagtggttgacatgctggctagtcaacgttga

SEQ ID NO: 75912 - DNA, 2256 bp, Saccharomyces pastorianus
atgagtcaagttaatacaagccaaggaccggtagcccaaggccgtcaaagaagattatcatcactaagtgaattcaatgatccattttcgaacgcagaagtctactatggccccccaacagacccaagaaagcagaagcaggcaaagcccgctaagatcaaccgtacgaggactatgagtgttttcgataatgtatctcctttcaagaaaactggttttggtaaacttcaacagactaggcgtggttctgaggatgacacctattcaagtagtcaaggaaatcgtcgtttctttatcgaagatgtcgataaaacacttaatgaactactggctgctgaggataccgataaaaattatcagatcaccatcgaggataccggtccaaaagttttgaaagtcggtaccgcaaactcctatggctataagcatattaatattaggggtacgtatatgttatccaatttgttgcaggaactaactattgcgaaaagttttggtagacaccaaattttcttagatgaagctcgtataaacgaaaatcccgtcaacagattatcaagattgataaacacacagttctggaactctttgaccaggagagttgatctgaacaacgtaggcgaaattgcaaaagataccaagattgatacgccgggggcaaaaaatccaagaatctatgttccttatgattgtccagaacaatacgaattttatgttcaagcttctcaaatgcatccatctttgaaattagaagttgaatatttaccaaaaaaaataacggcagaatacgtcaaatccgtcaatgatacccccggtttactagcattggctatggaagagcacttcaatccttctactggtgaaaaaactctcattggttacccttatgctgttcctggtggtagattcaatgaattatatggttgggactcctatatgatggcactaggtctcctagaagccaacaagactgatgttgcaagaggtatggtggagcattttatttttgagattaatcactatggaaaaatattgaatgctaacagaagctactatctatgtagatcacagcccccattcttgactgaaatggccttggtagtattcaaaaaacttggtggtaggagtaatcccgatgctgtggatttgttgaaaagagctttccaagcaagcataaaagagtacaaaactgtttggaccgcatctccaaggcttgatcccgaaacaggattatccaggtaccatcctaacggtctcggtattcctccggaaactgaaagtgatcacttcgataccgttttactaccatatgcatcgaaacacggcgttaccttagacgaatttaagcaactttataacgatggtaagataaaggagcctaaattggatgagttttttcttcatgaccgtggcgttagagaatctggacacgacactacatataggtttgagggcgtatgtgcctacctggccactattgacctgaattctcttctttacaaatacgagattgatattgcagacttcataaaggaattctgcgacgacaaatatgaagatcctttagaccattctataacaacttcagctatgtggaaagaaatggccaaaatcagacaagaaaagattaccaaatatatgtgggatgacgagtcggggtttttctttgactacaacacaaaaatcaagcacagaacgtcatacgaatccgcaactacattctgggcattatgggctggacttgccacgaaggagcaagcacagaaaatggtggagaaagcactacccaagttagagatgcttggaggtttagctgcatgtacggagcgttctcgaggcccaatttctatttcgagaccaattagacaatgggactatccatttggttgggcaccccatcaaattcttgcttgggaaggcctccgttcttatggttatttaactgtaacgaataggctagcttatagatggcttttcatgatgacaaaggcttttgtcgattataatggtattgtggttgaaaaatatgatgtcacaagaggaacagatcctcatcgtgttgaagcagaatacggtaatcaaggtgctgactttaaaggggcagctactgaaggttttggatgggtcaatgccagttacattcttggtttgaagtatatgaacagtcacgcaagaagagcgcttggtgcttgcattccaccaatatcattctttagcagtttaaggcctcaagaaagaaacctttatggactatag

SEQ ID NO: 75913 - DNA, 606 bp, Saccharomyces pastorianus
atgtctagcgaagataagaaacctgtcgtcgacaagaaggaagaggctgctccaaagccaccatcctctgctgtcttctccatgtttggtggtaagaaggccgaaaagccagaaaccaagaaagacgaagaagataccaaggaggaaaccaagaaggaaggtgatgatgctccagaatcaccagatatccattttgaaccagtggttcacctggaaaaggtagatgttaagacaatggaagaagacgaagaagttctttacaaggtcagagccaagcttttcagattcgatgccgatgccaaggaatggaaagaaagaggtactggtgactgtaagttcttgaagaacaaaaagactaacaaggttagaatattgatgagaagagacaagaccttaaagatttgtgctaaccacatcattgctccagaatacactttgaagcctaacgttggttctgatagatcttgggtgtatgcttgtacagcagatattgcagaaggtgaagcagaagccttcacttttgctatcagatttggcagtaaggaaaatgctgataaatttaaagaagaatttgaaaaagctcaagaaatcaacaaaaaggcttag

SEQ ID NO: 75914 - DNA, 633 bp, Saccharomyces pastorianus
atgattttacgggagcagatcgacttcctaatacataaaagacaggatgataataataacaatggtgaagccattacagatgatgatccatttagctcttcctcatggagatggggaagatggattttttttatttttttcatagttgcactccttatacttctgttttcaactgcaaaagtgaataggagaagaagaattatgggtcaagctccgattaggggaaccgcttggttaaccccgcctacctacaggcagtccgagagagattacaatggcacacagcgttgcgttgaagactatgttcctgaatatacagagacagcaaatgagaatgatttggggttttacgacgaacgaggagagtttcatcctaatggtaaaacggaatatttagcgccaccgcctttatcagaagaacaagctagctcgactgataaagacttacagcgcccagtggctgccgtcgtacgaattcctagtgaaagtgaattcgacttcaatctgctaagacccactatgaataatttcgttaatggtcagagtaatcgcaacgagcagcattctccgactgttgaatcttcttcctttgatgttaataacgcgccggcaagagcgaaagtgagtaagtga

SEQ ID NO: 75915 - DNA, 123 bp, Saccharomyces pastorianus
atgacttgcggtatagaaaatagttataagagtgccgaaaaaaaaaagaagtacagaagttttcgtttctttgaaagtcgcgattattccgagttgtgtattatagtaggaacatactattga

SEQ ID NO: 75916 - DNA, 1383 bp, Saccharomyces pastorianus
atgcctagggccttatcaataaaatttgacaatacgtatatggacctttacgatgaattaccggaaagtaaactcctttatgatgaagaattttcatatcttttggatgcagtaaagcaaaatggtgtctgcgtcgtagattttttaacactcactccgaaggaattggcaaggctaatacaaaggtcgataaatgaggttttcagatttcagcaattgcttgttcatgaatataatgaaaagtacttagaaatctgtgaaaaaaactctatcagcccagataacggtcctgagtgtttcacgaccgctgatgtagctatggatgaattattaggtggaggcattttcacgcatggcattacagaaatattcggagagagctctactggtaaatctcaattacttatgcagttggcgctaagtgtccaactttccgaacctgcgggagggcttggcggcaaatgtgtatatattaccactgagggcgatttaccaactcagagattggaaagtatgctatcgtctaggccggcttatgaaaaactaggtatcacacaatcaaatattttcaccgtcagctgtaacgacctaataaatcaggaacacataatcaatgttcagttgcctattttattagagagatctaagggttcaataaaattggtgataatagattcgatttctcatcatttgagggtggagcttcagaacaagtccttcagagaatcccaagaaaataaaaactatctggataggatggcagagaagctccaaatactggcccacgattattcattatccgttgtggtggctaatcaagttggggataaaccactggctaacagtccagtggcacataggacatatgtaactgattatgattatcagctagggtggctagttggctggaagaactcaaccattctttatcggcagatgaattcgctgcttggagcaagttccaataacgatgaaattctatcagacgatgaagattatatgctaatcgagagagttatgagcactgtaaatgaccggaattatgattttttttcaaaaaagaaaccacccataattgagaataaaaccgttgagcgaaattcatcaagtcctatcagtcgacaaagtaagaaacggaaatttgactatcgtgtccccaatctcggtttgacttggtccaatcacgtttcaacacgaatattacttcaaaaatctttcaaggcttcaacaataattcaaagaggtgaagctcatctttataagggaggtgattcggcaagcttctggcaagttaagaggacaatgaaagtggtatattccacattcgctaagcctggtcaaattgcatatcaaattactaagcgaggaatagaaacagcctga

SEQ ID NO: 75917 - DNA, 351 bp, Saccharomyces pastorianus
atgtttagatcttttatgcttgcttttcaaaaggcctgcaggcaagtgcacaaacaatacttaaataaatactactcagtaataacctatttcttagcatttttgacgaaatttgctattttgttagagtcttttacaccatttgtctccacacctccgcttacatcaacaccaataacgccatttaatctaagcgcatcaccaacattttctggcgtcagtccaccagctaacataaaatgtaagctttcggggctctcttgccttccaacccagtcagaaatcgagttccaatccaaaagttcacctgtcccacctgcttctgaatcaaacaagggaataaacgaatga

SEQ ID NO: 75918 - DNA, 627 bp, Saccharomyces pastorianus
atgtatggagatttaggtaataaattagtattagaagctaaaagaacaaaacagctgtacgcaagaagtaatcaagatgttaatttacccatgtatcatgaagatataatacgaaatattctgaaagaagtttcaaatttacgtaaaaatacggaatatcttaaagaacagcagcaactaggaatgctagatgataaggtggctaaatgccagtatttcgttaccttgttatgtatggaaaggaacaagagatgtctcttagcataccaaaggttgaggacagacatactagattctatggcttggaataataatggtctggacttgatgagtagcattacgtttagccaacaagacacaaataacctttctcatcaagagcaggaatatttgaaagagtactgcgatttaattactgatttaaaaagtggtgacttggtcgatattgatttatccggctctttagtgcctccgagcgatgtatttattgatgttagagtgctcaaagatgctggtgagattcaaactgaatacggcgtgtttaaccttattaaagactcccagtttttcgtaaggcagtctgatgtagagcgtttgattcaacaaggttatttgcagaagatatga

SEQ ID NO: 75919 - DNA, 1203 bp, Saccharomyces pastorianus
atgtctataatcaaaaaaattgtgtttaagagattcaactcaactttgaaaaaaactgctcttcatgaccttcatgtgtcattaggcggtacaatggtaccatacgcaggatattccatgcccgtactatacaagggacagactcatattgaatcacataattggaccaggacaaacgctggtttatttgatgtttctcatatgttacaaagtaagttatctggtcctcattctgttaagtttctgcaacgtgtaacgcccacagatttcaatgccttgcctgttgggtcagggaccttaagtgttctattaaatccacagggaggcgtggtagacgataccatcatcactaaagaaaacgatgacaatgagttctatattgtgaccaatgctggctgtgcggaaagagacaccgagttctttcacgatgagctacaaaatggttctactttagattgtcaatggaaaatcattgaaggtagatcactattggcattgcagggtcctaaagcaaaagatgtgttggaaccacttttatcaaaaacagctcctggaaaggatctaaaagagttattttttggacaaagacatgaatttgcgttaaaggacggttctttggttcaaattgctagaggcgggtacactggtgaagatggatttgagataagcattgcaaatgagaaagcggttgagtttgcggagcaactcctggccaatccagtaatgaagcctatcggactggctgctagagacagtttaaggttggaagctggtatgtgtttgtatggtcatgaattggacgaaagtatcacaccagtagaagctgcgttaaactgggtgatttcaaagtcaagaagggacctagtagatcaaaagtactggttcaatggctatgccaagataatggaccagctaaacaataaaacgtatagcaaggtacgagtcggattcaaatacttgaaaaaggggccagctgccagaaatggtgtcaagatcttcttgcccgatgccgaaacagaggtcggccttgttacatcaggtagtgcatctccaactttaaacaacatcaatattggacaagcttatgtacagaaaggttaccacaagaagggaacgaagttgcttgttcaagtaaggaacaagttctacccgattgaacttgccaaaatgcctcttgtgcccacacattactacaagcagtga

SEQ ID NO: 75920 - DNA, 699 bp, Saccharomyces pastorianus
atggacagaaaagctgtcgaagaaaaaagaattgttatttctatcggtggagggcatgctactggtgttggagcaattgcactggatttacaaaatactttcaaaagcctatataactctatcaatataagggtaataaacctagataatatgatagaagggaacatcaagagctacaataataacgactatgattttgataatatccttaatttggtatatgaaaagcacgctgtaacttctcaaaatgacataattcaacatgattacgaggacccgatagatttgataatagtatgtggctgttatgcgctatacgataaacgcatcaacgaaatatctcaattaaaagtattcttggatagcgatgcagataaaagattaattagtctaatcaagaagaagaacgtagggagcaatgaacaactagcccagctgatcactgagtatatggaccatctgcgcccggagatgcaacaatatatagagcccactagaacttttgcagatttgatcattccttctacaaatgaaaatctagggcgcgcagtcctcgtggacggtatagttaaagcaatcgaagataccaaaagccaaatagaaggcaacaatacgaacaacaaaatacgcccacgtttatgggatttcgaagctgaaacaatggacttggagaaagatagatattacgatctgtcatga

SEQ ID NO: 75921 - DNA, 591 bp, Saccharomyces pastorianus
atgaatgttacagttactgtttatgataaaaatgtcaagtacagattagaagagaatatcaaaaataacaagggtcccagcaacgatgatcaaccagcatacaataatgaatcaaagagcacggaccgaagtgattatgcaatgtttcccactaacattaagtacatatttgaggacaacaatgatgaactagtagattcaagtgatgctgctttgacagcaggaatagataaggtcggagatgaacttgaaaatgtcataattgtccaattggatgaatcgggatctcttgaggatatcacactaatcagcgaccaatatgagcttttgtcacataggacaaatagtctcagcttggaggaaaaccaaatgagaacattatcatcacatggtgatgataaatctaatgatgaagaggaagaacttagcgttgacagtgatagattcagagtggactcggacattgagctcgatgtaatttcacaattttgcgatctgtctccttttcttcgcgatttgagtttgaatgacttaattaaactctacgtcacacaaaatgaacaattacaaatgctctccaattccgtatga

SEQ ID NO: 75922 - DNA, 486 bp, Saccharomyces pastorianus
atgagcctttaccaatcgatagtgttcatcgcacgtaatgttgttaattcaataacgagaatattgcatgaccatccgacaaatagttccctcataacccagacctattttattacacccaatcattcaggaaaaaacatttcttttcatctttttcacgatttcaaatattgttccgcgggtacgcgacactattcccagctaataatattcccggtgaaagaaaattccaggccaacccaagtaagtcgtccgttgggtggacgcccccacgagtcagtgtttctgcctaagtttacgcggacccaaaattcatactgtctcactcgcttggaccggatgggctttcctcctcctaggaaggcttccacaattatgcactttttccaagatgataggactgtaatgtgcagtccaaaagatggtatacctgtatcatcatttcatataatgatttgctttttggaacgtcgaaaaggaaattaa

SEQ ID NO: 75923 - DNA, 315 bp, Saccharomyces pastorianus
atgagcaaatattatatcttgatagagctgatgaacgataaaaagaatactaactctagttgtgatattttctctttctatttaaatttcagcgataaccctttctcaagctttcgtttgaaatcgcgtctcctatatggtatattctcctgttttctccttttttattccttaaaagacctgataggggtattcaaacaaaagtatttatatttgtctattcttcttttatggcttcttgttctcctgttctgtcttgcaaaaggcttgtcacacaatctcagggctgattccttccttcaatatccactgtga

SEQ ID NO: 75924 - DNA, 963 bp, Saccharomyces pastorianus
atgtctacctttgaaactttaattaaaagaggtggtaacgaagccatcaaaattaaccctccaaccggtgcggatttccacatcactagtcgtggttccgattggttctggacatgtttctgttgttacctattatttggtttaattttaacattcttaatgttcagaaaaccagtcaatgacagattcttttaccttaccggtattgctccaaactttttcatgtgtatcgcttatttcaccatggcttctaacttaggttggattccagtcaaggctaagtacaaccatgtccaaacttctactcaaaaagaacatccaggttacagacaaatcttctactctagattcgttggttggttcttagctttgccatggccaattattcaaatctgtatgctagctggtaccccattctggcaaatggctttcaatgtttgtattactgaattcttcactgtttgttggttgatcgctgcctgtgttcactccacttacaaatggggttactacaccatcggtctaggtgctgctattgtcgttagtatcagtgttatgaccaccagttacaacttggtgaaacaaagagataacgatatcaggttgacattccttgtcttcttcagcattattatgttcttgtggattattgcttacccaacttgtttcggtattaccgatggtggtaacgttttgcagccagactctgccggtattttctatggtatcattgatcttattttgatgtgtttcattccaactttattggttccaattgctaaccacttcggtgctgacaaattgggctaccatttcggacctagtgatgccgaagcagtgatggctccaaaagctcctgttgctagtccaagacctgctgctacaccaaacttgagtaaggacaagaaaaagaagtctaagaagagcaagaaatctaagaagtctaagaagtctgaagaataa

SEQ ID NO: 75925 - DNA, 177 bp, Saccharomyces pastorianus
atggaatctatatttctacatgctaatattacgatcattcctcattcagttttatatgtttcattatcctattacattatcaatccttgcgtttcagtttccactaatttagatgactatttctcatcatttgtgtcatcttctaacaccgtatatgataatatactagtaacataa

SEQ ID NO: 75926 - DNA, 156 bp, Saccharomyces pastorianus
atgaggcatcatcaaaatatgcattatgccccacaacaacaaccagtctatgtccaacagcctcctcctcggagagaatccggtggttgctgtagaacctgttgtcacttcctatgttgtctatgtttaattaacctatgttgtgacgttttttaa

SEQ ID NO: 75927 - DNA, 1776 bp, Saccharomyces pastorianus
atgtctcaacaagataatgtcaaagccgccgctgaaggtgttgctaacctacatctcgacgaagctaccggggaaatggtctccaagtctgaattgaagaagcgtatcaagcaaagacaagtcgaagctaaaaaggccgccaaaaaggctgccgctcaaccaaaaccggcttccaaaaaaaaaacagatttgttcgctgacctggatccatcgcaatatttcgaaacaagatctcgccaaatccaagaattgagaaagactcacgaaccaaatccatacccacacaagtttcacgtttctatatccaatcctgagttcttggccaaatatgcgcatttgaaaaaaggtgaaaccttacctgaagagaaggtttcaattgctggtagaattcatgccaaaagagaatctggctccaaattgaaattctatgttcttcacggtgatggtgttgaagttcaattgatgtcccaattgcaggactactgcgacccagactcttacgaaaaggatcacgaccttttgaaaaggggtgatatcgttggtgtcgagggttacgtcggaagaactcaaccaaagaaaggtggtgaaggtgaagtttccgtcttcgttagcagagtgcaattattgacaccatgtttgcacatgttacctgccgaccactttggtttcaaagaccaggaaaccagatacagaaagcgttatttggatttgatcatgaacaaagacgccagaaaccgttttattacccgttctgaaattatccgttacatcagaagatttttggaccaaagaaagtttattgaagtagaaactccaatgatgaacgttattgctggtggtgctaccgctaagccatttattacccaccataatgaccttgatatggacatgtacatgagaattgctccagaattgttcttgaaacaattggttgtcggtggtttggatcgtgtttacgaaattggtagacaattcagaaatgaaggtatcgatatgacacataatccagaattcaccacttgtgagttttatcaagcctacgctgatgtttatgatttgatggatatgactgaattgatgttttcagaaatggtcaaggagatcactggttcttatattatcaaataccatccggaccctgctgatccagccaaagaactagaattgaacttttctagaccatggaagagaatcaacatgattgaagaattagaaaaggtattcaacgttaagttcccatctggtgatcaattacatacagctgagactggtgaatttttgaaaaagattcttgtcgacaacaaattagaatgtccacctccactaactaatgctcgtatgttagataagcttgtcggtgaattagaagatacatgtatcaacccaactttcatttttggccaccctcaaatgatgtctccattagccaagtactcaagagatcaaccgggtctatgtgagcgtttcgaggtctttgtagctacaaaggaaatttgtaatgcctacactgaattgaacgatccatttgaccaaagggcacgtttcgaagaacaagctagacaaaaggatcaaggtgatgacgaagctcaattagtcgatgaaaccttctgtaatgctctagaatacggtttaccaccaactggtggttggggttgtggtattgatagactggccatgttcttgaccgactccaacaccattagagaagtcttattgttcccaactttgaagcctgatgttttgagagaggaagtcaaaaaggaagaagaaaattaa

SEQ ID NO: 75928 - DNA, 612 bp, Saccharomyces pastorianus
atgcttagaaataccattgcattaagatcatttatcagaacacagtcgacgcgcccatatcctgtaaatgtagaggcagtctactatgctcctttaaagttacctatcaaatatggtgatttagttgcagacattcagttaagatcgtatgacaatgaaaacctcgatttttattcagacttcatacttagaacaggttactatttgggtatcccattgacaggtcctaaacctttgcccacgagaagagaaaggtggactgtaataaaatcacctttcgtgcacgctaaatccaaagagaattttgaaagacatacacataagaggctcattagggcctgggatacgaaccccgaagtgctacagatgttgatagcttacattacgaagcactctatggcaggcgtcggaatgaaatgtaacttctttcaaaggtccgaaatatcgctggacttgggttcggacgccaatggcctcgaaaaatcactaagcaatatcgatgaattgtattctctgagaaacgatgataaagctcaaactagtgctgtcggacaaaaagtattggaactattggatagccccgattttaaaaaacatttggaaaagaagtaa

SEQ ID NO: 75929 - DNA, 696 bp, Saccharomyces pastorianus
atgttttacccatataactatagtaacctcaatgtttctactatgcccgcactgccgggaatctccgcatttgatggaatgcaagatgaagaaaacgttgaaataagcccggaaagaaaatatcagacgctactaccagttctaactaattctcatgtggtagagaatgaactaaaacacaaattaaataagactgcttttgatttccgataccaaaccaaatcagaaaatggctctgaaaagtgggagccaaaatacttaataacgcctaatttacaaacaagaagcgtctcttttgacaattcatcggtacaatataattcagattcatccgaaaaaagctcgctatcacaactaacttgtaattcatcaataatacaacagcctgagaacggaatagtttctaatgatgcatataataagatggcaaatagtagatactctctgaaaacgcggaagcaaagaacagatccaagaaatacgttatcagatgaggaagaccttgaacaaaggcgcaaatacatttgcaaaatttgcgcaagaggattcactacatcgggtcatttagcaaggcataatagaattcatacgggcgaaaaaaatcattgttgtccgtataagggatgcacgcagcgattcagtcgacatgataattgcttgcaacactatagaacacatttgaaaaagggacaataa

SEQ ID NO: 75930 - DNA, 987 bp, Saccharomyces pastorianus
atgcctgcccctcaagatccaaggaatcttccaattagacaacaaatggaagctcttatccgtcgcaaacaagctgaaatcacgcaaggtttggaatccatcgatactgttaagttccacgctgatacttggacccgtggtaacgatggtggtggtggtacctctatggttatccaagacggtacaactttcgaaaaaggtggtgttaatgtctccgttgtttatggtcaattgagcccagcggccgtttcagccatgaaagctgatcataagaatctgcgtctaccagaagatccaaagactggtttgccagttaccgacggtgtcaagttcttcgcttgtggtttaagtatggtcattcatcccgttaacccacacgctccaaccacgcacttaaactaccgttacttcgaaacttggaaccaagatgggaccccacaaacttggtggtttggtggtggtgctgatttgacaccttcttacttatacgaagaagacggtcaattattccaccaactgcacaaggatgccttggacaagcacgacactgctttgtacccacgtttcaagaaatggtgtgatgagtacttctacattacccaccgtaaggaaacacgtggtattggtggtatattctttgacgattatgatgaacgtgacccacaagaaatattgaagatggttgaagactgtttcgatgctttcttgccatcctacttgactatcgtcaagagaagaaaagatatgccatatacaaaggaagaacaacaatggcaggccattagacgtggtagatacgttgaattcaacttaatctacgatagaggtacccaattcggtttgagaaccccaggctctagagttgagtcaattttgatgagtttgcctgaacatgcttcatggttatacaaccaccaccctgctcctggttccagagaagctaaattactagaagttaccaccaaaccaagagagtgggttaaataa

SEQ ID NO: 75931 - DNA, 315 bp, Saccharomyces pastorianus
atgtcttctctacttcaacttctcgcagtgtggagtcaaagctcatcaatttcaatgaattcagaagttgctcagacaaatcaaaaatataaagatcattcttttttagtgagccagtcattttactcgccttttgtgaattcatgctattggaagcttgtcaacaggcgtgcagatcttttgaaaatcctttttcttcgaaggaaaggtgatatgcattctcatttattttcatataccttcatcttttattttcttctatttaagattttgtcactacatccattcagagaacctgcaaaaataaatatctga

SEQ ID NO: 75932 - DNA, 1899 bp, Saccharomyces pastorianus
atgaattcacaaaaggcgagtaaaatgactggctcactaaaaaagaatgatctttatatttttgatttgtctgagcaacttctgaattcattgaaattgatgagctttgactccacactgcgagaagttgaagtagagaagacatctgataatgatagaaacaaggagtctggagatctccaaatagcaagaaagaaggtcacatcaaatgttatgcgttgtagtgtttgtcaaatgagctttgattccagaaatgaacaaaaggcccactaccagactgattatcatttgatgaatgttaagcgtaaccttagggggctggatatcctatccgttgaggaattcgatgcgctgatttctaaggagcatggtatcaagtctgaagacgaaaattctgacggcgagcaaacttcaagcgatcacgaagaaagtgaggaagccagcgatcgggacccggacctacaaactaataattatatggaaactataatcgaaaatggtttgcagaaattagggttccaaaaagacgagtcggatgctattagccatattaatacccaatcgccctacatttatttcaaatcgaagtatcttcaaaagaatgaggtcttggcgatttataagtctctatttaataaaaggagtctttccaaccccaatgaagctttgactttttggaattcgcaagagaacccaatggccatttcagctctgtttatggtgggaggtggacattttgcgggagcaattgtttctcatcaaagactcaatgtcaaggggaacgcgcacaagaaggacgaaaccttaattgagcaagcggtcaatttcttagagcacaagacgtttcacaggtatactaccagaaggaagcaaggtggttctcagtcagcaatggacaatgcaaagggaaaagctaactctgccggttcagcacttcgtaggtacaatgaaagcgctttaaaaacagatatacagggtgtgttgaaggactgggaaccttatctgtcaaagtgtgataatatttttattcgagctcgcaatgtcagtgataaaaaaatttttactgataataccgttctgaacaagggtgatgaaaggataaagagcttcccttttaccacgaacaggcccactgtattagaattgaagaaggcatggtgcgaactttcctacctgaaaatattacctaagcctgaaccattggcagtgaaagaaacagtacaaaagttagaagtgtcgaacaaaaaggacgaatttaaagaaaaacaagaaccgttactggaagaaatccaaacagaagaaataatttctctgctgaagaaaggaagggcaccgttattgatatccttcttaaaaaagaataagcttgatggaaactttcggttaaagcctgagagtaaatattccttaacccctaccatgttacattatgcatcgcagcaagggatgaaacagatggcactgattttgctctcaaatattaaatgcgatccaacgatcaagaacagactaggaaggactgcgtgggatttgaatagaagcgacgacgtgagacacgcgtttcaaattgcaagatacaatctcggagagtctttcactaattgggacgaaactcatatcggtcagccattgagcagagaacaagttgatgaaatcaatgaaaagaaaaaagcaatagagaatgaaaaggcagaaaaactgattaaattggaattagaagccgccaaggaaaaacaaagatttgctaaagatgcagagaggggtccaggcaaaaagttaaccaatattccttcaattcagcaacaaaatttgaattctttgaccgatgaacagagacgcagattgatgagagaacaaagggctagagccgcagaagaaaggatgaaaaagaaatactga

SEQ ID NO: 75933 - DNA, 747 bp, Saccharomyces pastorianus
atggctagaactttcttcgtcggtggtaactttaaattaaacggttccaaacaatccattaaggaaattgttgaaagattgaacactgcttctatcccagaaaacgttgaagttgttatctgtcctccagctacctacttggactactctgtctctttggttaagaagccacaagtcactgtcggtgcccaaaacgcctacttgaaggcttccggtgcttacactggtgaaaactccgttgaacaaatcaaggatgttggtgctaagtgggttgtcctgggtcactctgaaagaagatcttacttccacgaagatgacaagttcattgctgacaagaccaagttcgctttaggtcaaggtgtcggtgtcatcttgtgtatcggtgaaactttggaagaaaagaaggccggtaagactttggatgttgttgaaagacaattgaacgctgtcttggaagaagttaaggactggactaacgtcgttgtcgcttacgaaccagtctgggccattggtaccggtttggctgctactccagaagatgctcaagatattcacgcttccatcagaaagttcttggcttccaagttgggtgacaaggctgccagcgaattgagaatcttatacggtggttccgctaacggtagcaacgccgttaccttcaaggacaaggctgatgtcgatggtttcttggtcggtggtgcttctttgaagccagaatttgttgatatcatcaactctagaaactaa

SEQ ID NO: 75934 - DNA, 1005 bp, Saccharomyces pastorianus
atgtgtgaagagaatgttcatgttagtgaagatgttgctggcagtcacggttcttttacgaatgccagacctaggttaattgtactaataaggcatggggaaagcgaatcaaataaaaacaaggaggtcaatggttacattcctaaccatctgatttctttgacgaaaacaggtcaaatccaagctagacaagctggtattgacttattacgtgttttaaacgtagacgatcacaacttggtggaggatttggctaagaagtatattaaagatgaaagtagcaggagaactttaccgctgaaggactataccaggctgagtagagaaaaagacacaaacatagttttttatacatcaccctatagaagagcaagggaaacattgaaaggtattttggacgtcatcgatgaatataatgaattaaacagtggtgttcgtatatgtgaagatatgagatatgatccacatggtaaacagaaacatgcattttggccgagaggacttaataatactggtggtgtttacgaaaataatgaagataatatttgtgaagggaagcctggaaaatgttatctgcaatatcgggttaaggatgagccaagaataagggaacaagattttggtaatttccaaaaaatcaatagcatgcaggacgttatgaagaagagatctacgtatggtcatttcttcttcagattccctcatggagaaagtgcggcagatgtatatgacagagtcgccagtttccaagagactttattcaggcacttccatgataggcaagagagaagacccagagatgttgttgtcctagttacacatggtatttattccagagtattcctgatgaaatggtttagatggacatacgaagagtttgaatcgtttaccaatgttcccaacgggagcgtaatggtgatggaactggacgaatccatcaatagatacgtcctgaggaccgtgctacccaaatggactgattgtgagggagacctaactacatag

SEQ ID NO: 75935 - DNA, 396 bp, Saccharomyces pastorianus
atgcgagaatctcttttcattatctttttccaatttgtttgccattccagcaattccttaggcgtaacccttggctcgacatttttcagacccgtacctttgctgacttggacagcgccttcaatagacctggccctttctattctggcccttttcttttcatgcaaatgctgctgctgttggagctcgaggcgctcaagggatcttttcttcggaaaggattcagtggtattgtttttgttgcaattattgtcgttagaaaacacattcaagtggcccgctgctgtagttgatgcggcaattccattattatgtttcaagttggtatctgtttcctttaacggagaccttattatcattttcgttggagaaaccattttcttctttcttttctaa

SEQ ID NO: 75936 - DNA, 1335 bp, Saccharomyces pastorianus
atgcaattacattcacttatcgcttcaactgcgctcttaataacgtcagctttggctgctacttcctcttcttccagcataccctcttcctgtaccataagctcacatgccacggccacagctcagagtgacttagataaatatagccgctgtgatacgttagtcgggaacttaactattggtggtggtttgaagactggtgctttggctaatgttaaagaaatcaacgggtctctaactatatttaacgctacaaatctaacttcattcgctgctgattccttggagtccatcacagattctttgaacctacagagtttgacaatcttgacttctgcttcatttgggtctttacagagcgttgatagtataaaactgattactctacccgccatctccagttttacttcaaatatcaaatctgctaacaacatttatatttccgacacttcgttacaatctgtcgatggattctcagccttgaaaaaagttaacgtgttcaacgtcaataacaataagaaattaacctcgatcaaatctccagttgaaacagtcagcgattctttacaattttcgttcaacggtaaccagactaaaatcaccttcgatgacttggtttgggcaaacaatatcagtttgaccgatgtccactctgtttccttcgctaacttgcaaaagattaactcttcattgggtttcatcaacaactccatctcaagtttgaatttcactaagctaaacaccattggccaaaccttcagtatcgtttccaatgactacttgaagaacttgtcgttctctaatttgtcaaccataggtggtgctcttgtcgtcgctaataacactggtttacaaaaaattggtggtctcgacaacctaacaaccattggcggtactttggaagttgttggtaacttcacctccttgaacctagactctttgaagtctgtcaagggtggcgcagatgtcgaatcaaagtcaagcaatttctcctgtaatgctttgaaagctttgcaaaagaaagggggtatcaagggtgaatcttttgtctgcaaaaatggtgcatcatccacatctgttaaactatcgtccacttccaaatctcaatcaagccaaactactgccaaggtttccaagtcatcttctaaggccgaggaaaagaagttcacttctggcgatatcaaggctgctgcttctgcctctagtgtttctagttctagcgcttccagctctagctctaagagttccaaaggcaatgccgctatcatggcaccaattggccaaacaacccctttggtcggtcttttgacggcaatcatcatgtctataatgtaa

SEQ ID NO: 75937 - DNA, 618 bp, Saccharomyces pastorianus
atgcttgtgcggctgttgcgtgtgattttattggccagcatggttttctgtgctgatattttacaattaagctattcagatgatgcgaaagacgctatacccctaggaacatttgagattgatagtacatccgatgggaatgttacagtaacaaccgttaatatacaggatgctgaagtttctggagaatactgtttgaatgcccagattgaaggtaagctggatatgccatgttttagctacatgaagctgaggacaccactaaaatacgatttaattgtggatgtagatgaagataatgaggtcaaacaagtgtcgctatcctataacgagactaacgatgctattactgctacagtcagatatccagaagcgggacctactgcgccagtcactaaattaaagaagaaaaccaaaacttatgctgataaaaaagctagtaagaataaggatggaagcactgcacaattcgaagaagatgaagaggttaaggaggtgtcttggtttcaaaagaactggaaaatgttacttttaggcctattgatttacaattttgttgcgggctcagcaaagaagcaacaacaaggaggtgccggagctgatcaaaagactgagtaa

SEQ ID NO: 75938 - DNA, 1620 bp, Saccharomyces pastorianus
atgagtaccaataagttcgttgtacgaataacgaatgcgctcttcaagtcatcactggctagcaacagtccacctgtttaccctaagaggattaggcatttcgagattttacccaacgaaaaatgggttatatggggacctggaaagggcaagttcttggatgtactgaataacaagtatatttgtgagcccccattatctttgaggtttggatttttgaaggaaagttcgaacatcctgccgaggatagagcaagtggccttcaaaggggttatgccaacagctcatttaagtgctagatatgaatacttcaaagatgactacgatcaaacctgcaaacagtttatatttgataaggcaagcggatcaaatgctgtttcatataaagttgagacgaacaatcggcaaataaacatggagctgtacaatgcattagttgaaaatttaaacctctctagtttacaggataggtgggtaatgggattgagtaatggacaaatgaggagagcaaggttagctcgtagtatactcaaggaaccggatctactacttattgacgacccatttttagggttggatccagccgcaacagcaaccatttcacaatttttagccaaatatgatagtatagaagtcagtgccggatgtccaatcgtcattggtttgaggtatcaagataccattccagcatggtgtactcatatatgttgcgttgatgagaaaaacggtatattgtttgaaggcccaatcgaaaaacttcaaagtaaaatggatgaaaccagatcaagggcactaaaagaactacagcagctcaaaaaagcgtctaattccaaagaagacatttccattaacgatttgatttgtatacatcctatgtatggcaagaaagagcacgaaattatcaaaatgcctcatcttatagaattagacgggttgagcgtttcatacaaaggcgaagctgttttggaaaatctgcactggaaagttcagccgggttcgaaatggcatataagaggtgacaatgggtcaggtaagtcgaccttattatctttgcttacggcggaacatccccaatcgtggaattcgagggtgatagataatggcgtcccacgaagaacaggtaaaacaaactactttgacctaaacagcaaaataggtatgtcatcacccgaattacacgcaatttttttgaagaatgctggaggaaggctaaacattcgggaaagtgttgcaactggctatcatgaggcgtcctccaacaattacctacccatatggaagcgcttggacaaaaatagccaagacatagtgaatatgtatctgaaatattttggcttggacaaagacgccgatagtgttttatttgaacagttgtccgtaagtgaccagaaactagtcctttttgtcaggtctttaattaagatgccgcaaatattgattctcgatgaggcattttctggaatggaggtagaacctatgatgcgttgtcatgaatttttagaggagtggcctggaacagtccttgtagtggcacacgttgccgaagagacaccaaaatgtgcccattacttaaggctcatatctcctggagagtatgaaataggcgatatagaaaattaa

SEQ ID NO: 75939 - DNA, 1686 bp, Saccharomyces pastorianus
atgagtactcctgcaaactatacccgtgtgcccctgtgcgaaccagaggatctgccagacgacatacaaaaagaaaatgaatatggtacactagattctccggagcatttgtatcaagtcaagtcacgtcatgggaagccactacctgagcccgttgtcgacacccctccttattacatttctttgttaacatatctaaattatttgattctgattatattaggtcatgttcacgacttcttaggtatgaccttccaaaaaaacaaacatctggatcttttagagcatgatgggttagcaccttggttttcaaatttcgagagtttttatgtcaggagaattaaaatgagaattgatgattgcttttctagaccaactactggtgttcctggtagatttattcgttgtattgatagaatttctcataatataaatgagtattttacctactcaggcgcagtgtatccatgcatgaacttatcatcatataactatttaggcttcgcacaaagtaagggtcaatgtaccgatgccgccttggaatctgtcgataaatattctattcaatctggtggtccaagagctcaaatcggtaccacagatttgcacattaaagcagagaaattagttgctagatttatcggtaaggaggatgccctcgttttttcgatgggttatggtacaaatgcaaacttgttcaacgctttcctcgataaaaagtgtttagttatctctgacgaattgaaccacacctctattagaacaggtgttaggctttctggtgctgctgtgcgaactttcaagcatggtgatatggtgggtttagaaaagcttatcagagaacagatagtacttggtcaaccaaaaacaaatcgtccatggaagaaaattttaatttgcgcagaagggttgttttccatggaaggtactttgtgtaacttgccaaaattggttgaattgaagaagaaatataaatgttacttgtttatcgatgaagcccattctataggcgctatgggcccaactggtcgcggtgtttgtgaaatatttggcgttgatcccaaggacgtcgacattctaatgggtactttcactaagtcgtttggtgctgctggtggttacattgctgctgatcaatggattatcgatagactgaggttggatttaaccactgtgagttatagtgagtcaatgccggctcctgttttagctcaaactatttcctcattacaaaccattagtggtgaaatatgtcccggacaaggtactgaaagattgcaacgtatagcctttaattcccgttatctacgtttagctttgcaaaggttaggatttattgtctacggtgtggctgactcaccagttattcccttactactgtattgtccctcaaagatgcccgcattttcgagaatgatgttacaaagacggattgctgttgttgttgttgcttatcctgctactccgctgatcgaatcaagagtaagattctgtatgtctgcatctttaacaaaggaagatatcgattatttactgcgtcatgttagtgaagttggtgacaaattgaatttgaaatcaaattccggcaaatccagttacgacggtaaacgtcaaagatgggacatcgaggaagttatcaggagaacacctgaagattgtaaggacgacaagtattttgttaattga

SEQ ID NO: 75940 - DNA, 450 bp, Saccharomyces pastorianus
atgtcgaacctctacaaaattggaactgaaactagaaataaaatcaagaagtttcgtacatctacggcaagaaccgactccataaaagctttatcaataaagatcgaaccaaaaccgtcctatgagataattgtcgatgaagacgaacaagaagagctagacgaaattgaagatttgaacgaattagccgagatcctacctgataactcacctagatttgtactaactgcatatccaacaacaacaaaagatgggttcaaacagactcccttagttctggtatattggaagccaatgacggtcgtttcacaggaatggaagatgctttatgccggcgcattagaaatgatcagagaggagtgcggtacttttaaattgatagaggtttcttcaggtttggaggatgactcagacgttgaagaattgagggagcaattagaaaattgttag

SEQ ID NO: 75941 - DNA, 1098 bp, Saccharomyces pastorianus
atggctcaaaattttggaaagattccttctcacaagtcttacgtattgagcttatatcggaccgttctcagaaacattccaaagtgttgccactcatatgcgtttcaatatgaaataaaaaaaacactttcaaaacaattgttcaaacacaagcatgacaagtcaagttggagtgtttatactttactcaatgaattcagtttgttgaacaactgccttttggaaggtaaattacaagaaatcaaaaacttaatgaagccattaaaaaagatgaaaaaacaactggaaacaacgaaaatcctcaactctttgacttccttaggggatgtaaagaccaacgacccagaagaagtaagaagatttcatgttctgagtgcttacattaagcgaaaacaagatttgggtcttttacctgcatacataccaaaaacgtatcagcacaaactcctattaccattagcattgaacgaacatgcgtgcctgaaactatttcacattcagcaaaaattgaaaaatggcccaccttctgctaggctgtcatatacaaaagaaggaaggaatcaaatatggtttgttcggtcaccaattaacaagggcagacaacaatcgaaaaagctgggaatattgatacgaaaagaaaggaaggattctcagaaaaatatcgataatctcaatttttgcgaaattaatgctgcttgggcgttacatgaggccatttgggaggaatatctagagtcgaaaaagattattaaagtaaacttaccgaaatacttggaatacgctgcaaatatcccaaagtctactaaatgtaatccttcgagtcaatatcagaaaattaaagaatgggtagatcccgtgagagaaataatgttcgaattacattccaaaagttttcaaagagtggagtactttaacaaatataaggaaaagcttttaaagaacggtggccaactagcatattttgataaaaagtcaaaagaaatgtacgccaaacggttgacactattcagaaaaatgagcaaagaaacattaccatatgtgacactttttatagaagggagggacttgccaagtgttttggcgaaatacggtttttaa

SEQ ID NO: 75942 - DNA, 591 bp, Saccharomyces pastorianus
atgcagataataaccactacgttcattcaaaacgtaattttaggatcacaccaattacatgagcaattatctatagtggaagcccgaatgattgaatctgccatagtttcaatgctcacagaatcattttgcgaaaatgagcagacattaaaatacttagcacggctactttcaccgatgtcttatatggatgttattaatgcaagaaggggaaagaaaatatgtgggtacccgctatgctataagagtgcggcagaaaaatcatctgatggcttctttattcactcaatgtattgtaataattatcacagtaaatgttcgttgtatttaatgagacagttatcacaaacgcctttgcatgaaaggagaggcgtgcatttaactagttacattaatctagagtttgatgatatgtactcggtaagccttttagaagaattagttggaagtgaggtacctatagataccgtcaaatcgctgataacgagtttcaaggatcttgagtttgatgatacctacaagaatgagcctttaccattggatgtgtactttggacagttgactactgatgaggaaacctgtatagaatag

SEQ ID NO: 75943 - DNA, 942 bp, Saccharomyces pastorianus
atggaattcttttatgaagagcaagtagcttgtatcgaagatgataaaataaacgactctcataccaaggaaactggatcaacagaaaacactgaaaataacgaacttcagagccgagatgacaaaacaaatggggccttccaaaagttagaagaggaagtcaataaacgatatgaaaagactacaagtgcattcaaaaagttagtaatcgaaaaagatgacggaattgagattaacttgccaattagcaatgaaactacagagactgcccaaaagtatttgaagaaactagacgagaacattcacagcgtggaaagtctagcccagtcatattggagcaaaatgaaaactaagaatttttggtctggcttcagtagcttcgataatgctgcagaaaatgactctaatgacaaggatgagagttcgaaagaaaatgaaattgctgtgggtggaaatagaacagaagccgaactaaggacattatctaaagataaatcggtttatttagacaataaaatggatttgcaactggacccgtttgatgtggatgaaaaaactgaggagatatgttctattttacagggcgacaaagatatctccaaattaatgaacgacatcgtaccccataaaatcagctataaagatttctggcacatctatttcttacaaagaaacaaaattctagataaagaaagtaaaaggaaagaaatattgtccaaaaaggaaaaggaaacggaggaaaaagaagttgagtgggatgacgaagaagaagaagatgatgatgacaaagtagaagcagtagttgacaacaaatctaaaggagagacgaaagttgctgtgtctcaagagggattgaaagatgttagtgaccatgttggcctcgccaacaaggatgagagcaaggacgacgacgacgacgacgacgatgatgactgggaatga

SEQ ID NO: 75944 - DNA, 282 bp, Saccharomyces pastorianus
atgttgagaaccacttttttgcgcactccaagacaattgatgcgtaaatcgccaagggcgtctttctcaatcgtcactagggccgcctttcctcacctaaagaacaatcaagatgaagctgagaaaaaagaacagggtttgtttgatagcaacaagaagaggttggacactttggaacacggcaagaatccagattataagcaacctggaatggaagatttgaaaaaaaagggagatgacgctagaatcgaacaaaacaggccagatgacggtgtttattaa

SEQ ID NO: 75945 - DNA, 576 bp, Saccharomyces pastorianus
atggcctcctcaagtagcacgctaccgcttcatatgtatattagacccttaatcattgaagatttaaagcagattttgaacttggaaagccaaggtttcccaccaaacgaaagagcttcagaagaaattatcagctttcgtttgatcaattgtccagagctatgttcaggtcttttcatcagagagatcgagggcaaagaagttaaaaaggagacactaattggtcatattatgggtactaagatacctcatgaatacattactattgaaagcatgggcaaattacaagtggaatcgagtaatcatattggtattcactctgtagtaatcaagccagaataccagaaaaaaaacctggctactttacttttaactgactacattcagaaattgagtaatcaggaaattggtaacaaaattgtccttattgctcacgagccattgataccattttatgaaagagttggtttcaagatcattgctgagaacaccaatgttgctaaggacaaaaacttcgcagaacagaaatggatcgatatggagagagaactaattaaggaagaatacgacaactag

SEQ ID NO: 75946 - DNA, 474 bp, Saccharomyces pastorianus
atgagcagtgaaattgcctactcgaatacgaacaccaacactgaaaacgagaaccgcaatactggcgctggcgtagatgtaaatacaaatgcaaatgcaaatgcaaatgcaactgcagagctgaacctccccacggtcgatgagcaaagacagtataaggtacaactgctattgcatatcaacagcatattacttgctagagttattcagatgaataatagtttacaaaacaatctacagaacaatataaataatagcaataacaataacatcatcaggatacagcaacttatatctcagtcccttaaaagggttcatgccaatcttcaatgcatatctcagataaaccaaggagtgccctcagcgaaaccactgatcctcacgcctcctcagctagccaaccagcagcaacctccacaggatattctttctaaactctatcttctcttggcaagagtgttcgagatatggtag

SEQ ID NO: 75947 - DNA, 2691 bp, Saccharomyces pastorianus
atgaccaccactgcccaagacaattctccaaagaagagacagcgtatcatcaattgtgtcacgcagctgccctacaaaatccaattgggagaaagcaatgatgactggaaaatatctgctactacaggtaacagcgcattatattcctctctagaataccttcaatttgattctaccgagtacgagcaacacgttgttggttggaccggcgaaataacaagaaccgaacgcaacctgtttactagagaagcgaaagagaaaccacaggatctggacgatgacccactatatttaacaaaagagcagatcaatgggttgactactactctacaagatcatatgaaatctgataaagaggcaaagaccgatactactcaaacagctcccgttaccaataacgttcatcccgtttggctacttagaaaaaaccagagtagatggagaaattacgcggaaaaagtaatttggccaaccttccactacatcttgaatccttcaaatgaaggtgagcaagaaaaaaactggtggtacgactacgtcaagtttaacgaagcttatgcacaaaaaatcggggaagtttacaggaagggtgacatcatctggatccatgactactacctactgctattgcctcaactactgagaatgaaatttaacgacgaatctatcattattggttatttccatcatgccccatggcctagtaatgaatattttcgttgtttgccacgtagaaaacaaatcttagatggtcttgttggggccaatagaatttgtttccaaaatgaatctttctcccgtcattttgtatcgagttgtaaaagatcactcgacgcaaccgccaaaaaatctaaaaactcttccaatagtgatcaatatcaagtctctgtgtacggtggtgacgtactcgtagattctttgcctataggtgttaacacaactcaaatactaaaagatgctttcacgaaggatatagattccaaggttctttccatcaagcaagcttatcaaaacaaaaaaattattattggtagagatcgtctggattccgtcagaggcgtcgttcaaaaattaagagctttcgaaactttcttggccatgtatccagaatggcgagatcaagtggtattgatccaggtcagcagtcctattgccaacagaaattccccccaaactatcagattggaacaacaagtcaacgagttggttaactccataaattctgaatacggtaatttgaatttttctcccgtccagcattactatatgagaatccctaaagatgtatacttgtccttactaagagttgcagacttatgtttaatcacaagtgttagagacggtatgaataccactgctttggaatacgtcactgtcaaatcgcacatgtcgaacttttcatgctacggaaatccattgatcttaagtgagttttctggctctagtaacgtattgaaagatgccattgtggttaacccatgggattcggtggccgtggctaaatctattaacatggctttgaaattggacaaggaagaaaagtccaatttagaatcaaaattatggaaagaagttcctacaattcaagattggactaataagtttttgagttcattaaaggaacaggcgtcatctgatgatgatgtggaaaggaaaatgactccagcacttaatagacctgttcttttagaaaactacaagcaggctaagcgtagattattcctttttgattacgatggtactttgaccccaattgtcaaagacccagctgcagctattccatcggcaagactttatacaattctacaaaaattatgtgccgatcctcataatcaaatctggattatttctggtcgtgaccagaagtttttgaacaagtggttaggcggtaaacttcctcaactgggtctaagtgcggagcatggatgtttcatgaaagatgtttcttgccaagattgggtcaatttgaccgaaaaagttgatatgtcttggcaagtacgcgtcaatgaagtgatggaagaatttaccacaaggaccccaggttcattcatcgaaagaaagaaagtcgctctaacttggcattatagacgtaccgttccagaattgggtgaattccacgccaaagaactgaaagaaaaattgttatcatttactgatgacttcgatttagaggtcatggatggtaaagcaaacattgaagttcgtccaagattcgtcaacaaaggtgaaatagtcaagagactagtctggcatcaacatggcaaaccacaggacatgttgaagggaatcagtgaaaaactacctaaggatgaaatgcctgattttgtattatgtttgggtgatgacttcactgacgaagacatgtttagacagttgaataccattgaaacttgttggaaagaaaaatatcctgaccaaaaaaatcaatggggcaactacggattctatcctgtcactgtgggatctgcatccaagaaaactgtcgcaaaggctcatttaaccgatcctcagcaagtcctggagactttaggtttacttgttggtgatgtctctctcttccaaagtgctggtacggtcgacctggattccagaggtcatgtcaagaatagtgagagcagtttgaaatcaaagctagcatctaaagcttatgttatgaaaagatcggcttcttacaccggcgcaaaggtttga

SEQ ID NO: 75948 - DNA, 927 bp, Saccharomyces pastorianus
atgatggacttagataagattatagcatcactgagagacggaaaacatattcctgaagaaaccgtttttaggctatgtttaaattcacaggaactattaatgaatgaaggcaatgtaacacaagtcgatacaccggttacaatatgcggtgatatacatggccaattacacgatctactaacgctcttcgaaaagagtggtggtgtagagaaaacaaggtatattttcttgggcgattttgtggataggggattttactcattggagagttttttacttttactatgttacaaattaagatatcctgataggattactttaattagaggcaatcacgaaacccggcaaattactaaagtatacggattttacgatgaagtagtaagaaaatatggtaatagtaacgtatggaggtactgctgtgaagtttttgattatttatcattgggggcaataataaacaatagcatattctgtgttcatggtggattatctccggatatgaccacggttgatgaaatacgaacaatagacaggaaacaagaagttccacatgaaggtgctatgtgtgacttattatggagcgaccccgaagacgttgacacatggtcattatcaccaagaggtgctggatttcttttcggtaaaagagaagttgatcaattcttagagaaaaacaacgttgagttaattgctagagctcatcagttagtgatggaaggttacaaagaaatgttcgacggtggattagtgacagtctggtcggcaccgaattactgttatcgttgtggtaatgtagcagctgtattgaagatagacgacgatttgaatcgtgaatatacaatttttgaagctgttcaggcacaaaatgaagtcggaaatgctataattccaaccaaaaaatctcaaatggactatttcttataa

SEQ ID NO: 75949 - DNA, 1221 bp, Saccharomyces pastorianus
atgtcgcttggtataccactttcccaattaatagtagaaagtccaaagccattaagtagcggcatcacaggattagatgagatattaaacctgggattccaggcaaggtcgatctacgaaatatttgggcctccgggcattggcaagactaattttggcattcaattggtgtgtaattcgttagaaggtatacaacaatcggaaataaacgacgataaaattctatggatagaaacatttcaagaaatgcccataaacatattaagagagcgctttcaaaaatttaaaatcgtggaagaaaatgtgaagcgggtccgaataacgaaatttggacagctattatatttcttccagaatttgttcaaattatctcaaagtgtgcgatataaactagttataattgatggattttctcaattagtctgcgatcatctgtgtacactaagtaaaagaggcggcggaatgatagataaaactatacacgagttaaaatgtcgacatttgatattaatttttacggtaatgaccaaatacacacattccacgggttcgacaataatagttttaaatgactgtatgaacaccgccttccaatcaaacgaattcgaatccttggaagaatactacgaaattttagacgacggatcaaacttctttgtcaactctaacaacgaaagacgtaagaacaatgtacatatattgaaaagcgcgctcgttgccaatatcgctatgggaagcaaggattccacttgggaagtatttctaagaggcaggatcggcctttttagggattggaatgaacaagtggacgaaaccgttttcgtgaaaagcaaaagagtgaaggcgccatcctcgcagagtaacgagggatgtactaccatcaaagaaatgagaataaacaaacgaaactttgaaaacttgagaatagctattgtttttaatttacacggcgaagatagaaaaagagaaggacgaaatttaaagcggtcaagaagcagcgacgatcgtaactatattgtcaaatttgattttgataaagcaacaggtcaactccgcgatataattgatctgaaacctgatactgctaatattgcctcatttccgaatttatcaacaagcagcagcagttgctcacaagtgtttaacaatattgactccaatgataatccattaccaaatgcggagggaaaggaggagataatttatgatagtgaaggttaa

SEQ ID NO: 75950 - DNA, 909 bp, Saccharomyces pastorianus
atgaaattatcaactgtcctattatctgccggtttagcctcgactactttggcccaattttccaacagtacatctgcttcttccaccgatgtcacttcctcctcttccatctccacttcctctggctcagtaactatcacatcttctgaagctccagaatccgacaacggtaccagcacagctgcaccaactgaaacctcaacagaggctccaaccaccgctattccaactaacggtacttctactgaagctccaactgatactactactgaagctccaaccaccggtcttccaaccaacggtaccacttcagctttcccaccaactacatctttgccaccaagcaacacaaccaccactcctccttacaacccatctactgactacaccactgactacaccgtagtcactgaatataccacttactgtccagaaccaaccactttcaccacaaacggtaagacttacactgtcactgaaccaaccacattgactatcactgactgtccatgcaccattgagaagccaacaaccacatcaaccaccgaatacactgtagtcactgagtacactacttactgtccagaaccaaccactttcaccacaaacggtaagacttacactgtcactgaaccaaccactttgactatcactgactgtccatgtactattgaaaagagcgaagcccctgagtcttctgtcccagttaccgaatctaagggcactaccaccaaagaaacaggtgttactaccaaacaaaccacagccaacccaagtctaactgtctccacagtcgtcccagtttcatcctctgcttcttctcattccgttgtcatcaacagtaacggtgctaacgtcgtcgttccaggtgctttaggtttggctggtgttgctatgttattcttataa

SEQ ID NO: 75951 - DNA, 672 bp, Saccharomyces pastorianus
atgtcgaaggatgtaatagaatactctaaattatttgctaaactggttaacacaaacgatgatacaaaactggatgatacaatagcatccttcttatattatatgtttccaagggaactatttattcgagcaatttcattactagaatcttcagacatgtttatatacatattagatagagtccataacaaggaaggtaatgagcatacatcattgattgatgtattagttgatgaattttataagggttcatctaattcgctcctggagtatcgcttaatagtgaaggatactaatgatggagcgccaccaatactcgtagatatcgcacactggttctgctcatgtgaagagttttgtaaatactttcatgaagcactagaaaaaactgacgaaaaagaagaattacacgatgtgctaataaatgaagttgatgatcatttgcaattttcggatgataggtttgcacagctggatcctcatagcttatcaaagcagtggtatttcaaatttgataaaatttgttgttcgcatctactggcgttctccattttgcttagatcttccataaatgtgctgaagtttttcactgtgaactcgaataaagttttcgttatagcaatagataatatcgacgagtggttaaacttgcacatcaacatagttgagtaa

SEQ ID NO: 75952 - DNA, 336 bp, Saccharomyces pastorianus
atgggtctatttaataacttcaagtttaaatatacaagggcgcaactggagatctttagattttcattttgtttgctagcacctgttgctgtaatgtactatattggtacagatactgataaaaaattaaatgttccagggttttggccagatcctgcaacgttgaaccaaataccaaaagagccttatgagattaaagctgaactggcaaggatgaaaaaagaacgtttagagaaaaggcttaggttggagaaaaagatacaagaggagtttggtttagaccttgaggaggaaaaagaaaaaattaaacgggatttggctctcaaaaaaggatga

SEQ ID NO: 75953 - DNA, 219 bp, Saccharomyces pastorianus
atggctagagcaagaaagggtgcactggttcaatgtgatccatccatcaaggcgctcatattacaaattgacgccaagatgagtgatatagtactagaggagttggatgacacccatcttttagtagatccctcgaaagtcgaatttgttaagcatgagctaaataggctattatctaagaatatatataatcctatggatgaagaagaaaatcagtaa

SEQ ID NO: 75954 - DNA, 243 bp, Saccharomyces pastorianus
atggctagagctagtgagaaaggtgaagagaaaaagcagagcaacaaccaggttgaaaagctggttgaagcacctgtagaatttgtcagagaaggtactcaattcttggccaagtgtaagaaacctgatttgaaggaatacaccaagattgtcaaggctgttggtattggttttattgcagtcggtatcattggttacgccatcaagttgattcatattccaatcagatacgttattgtttaa

SEQ ID NO: 75955 - DNA, 837 bp, Saccharomyces pastorianus
atggagacctccaactttgttaaacaattatcgtcgaacaacagaaaaaccagggtaaatgcactcgaagcgttaaagaaatatctaaccgctaaacagttcaaggagaacaaacaaatagaattcaataaactttggaagggtctttactatgcaatgtggttcagtgaccgtcctagacctcagcaacgtttagccaatgaattaggtgaattacatggattatattttgatcctaaggacaatagcactgcagatgagttgaccacaaacgataaagcatttataaagtttagcagagggttctggaaggtcatgtgctttgaatggtttaacattgacagatataggttggataagtatcttctattgataagaagggtattattcaatcaattgaagtatttgcagtccagaaactgggacaaaaaattagtcgacgagtatattaagaaagtgttgaggtggttacctctgagtggaagtccaaaggtctacacagggattccaattcatatcgtcgatattctgctggacgaatgggaaagattgcttaaagatggagatgaagacgatgaagacgaggaaaacaaggaggaagagatgcgcaaaattgcagagagcgcaaaaaaaacgccactagccgatgttatcgcaattttccaagatatcgtggcagattacaataacagtaaggtgttgagagagaagatcaaagaagacctattcagtgacacgagacttgtttcctgggatattcttgaaggcgaaacgcaacataatgattccagtaacgaatctgaagaagaggaagaggaagagtggaagggattttga

SEQ ID NO: 75956 - DNA, 1149 bp, Saccharomyces pastorianus
atgaataataacagcagaaacaacaaaaatcgaagcactattaacagaaataaaaggcaactacaacaagcaaaagaaaaaaatgaaaatattcatatccccaggtatattagaaatcaaccatggtactataaggatacccccaaagaacaagaagggaagaagcccggcaatgatgatacgagcactgcagaaggaggagaaaaaagtgactacttggtgcatcataggcaaaaagcaaaagggggtgctttagatattgacaataattcagaaccaaaaattggtatgggtataaaggatgagttcaaactaatcagaccccagaagatgtccgtccgagattctcattcgctgtcattttgtaggaattgtggggaagcagggcataaggagaaagactgcatggaaaaacctcgtaagatgcagaagcttgttcccgatttaaattcacaaaaaactaatggcacagttttagtacgagctactgatgatgactgggactccagaaaagatagatggtacggttactcagggaaagaatacaatgaactgataagtaagtgggagcgtgataaaagaaataaaataaaaggaaaagacaaatcccaaactgatgaaacactatgggatacagatgaagagatagaactaatgaagttagaactttacaaggattccgtaggttcattgaagaaagatgatgctgataattctcagttgtataggacatcaacgagattgagagaagataaggctgcttacttgaacgacataaattcaacggagagtaattatgatcctaaatcaagattgtacaaaactgaaacactgggtgcagttgatgaaaaatcaaaaatgttccgcagacatttgacaggtgaaggcctaaaattaaacgaattgaaccagtttgctagatctcacgctaaggaaatgggtatacgtgatgaaattgaggataaggaaaaagtacaacacgttttagtcgccaatcctactaaatatgaatatctgaagaaaaaacgggaacaagaagaaaccaagcagcccaagattgtcagcattggagatctggaagctaggaaagtagatggtacaaagcaatctgaggaacaacggaaccacttaaaagatttatatggttaa

SEQ ID NO: 75957 - DNA, 336 bp, Saccharomyces pastorianus
atggtgagcaaggctcgcgcaaggggtaccgtgtctctaccactctggaacgccgtgaccagctcagccccgttacaacaacgaacaacttgcctagaagatcaatggccagtgcccgcggaaataagctcagaacttcgctggatcgcacaagagaagagatgcttgccaaccaccaactggacacaagatactccgtggaaagagcacgtgcctcgctggatctgccgggtatcaatcatgcagagacgctgctcagccagcgcagcagggaccgttaatgattacaatttttttcttcctttgtactatgtataccaatgtgatatgatatag

SEQ ID NO: 75958 - DNA, 411 bp, Saccharomyces pastorianus
atgcgaagcggtaatagtggcagttgtaaccattttctagtctttctccgtaaagtagttacgtgccacaatgccgccatagtgcggaaaacaacgaaatataattccttgaagcacaaaacgccaccccttccccttgcccttgcccttgcggacgccctttcccctcaaaatttttttcatattacgtctccggcttcgctctcttactcttggcgccgggcggaccccggcaggaaggggagaatccagccccttcctactcaaggctctgcgcagcgttttctccataccccacagggcggggtagagccgtgccgggtgatgcacatcatcacatcctatatgaaatctatatcatatcacattggtatacatagtacaaaggaagaaaaaaattgtaatcattaa

SEQ ID NO: 75959 - DNA, 2685 bp, Saccharomyces pastorianus
  modified_base (2337)..(2381): a, c, g, t, unknown, or other
atggaaatcaagccagttgaggttattgatggcgttccggtttttaagccgtctatgatggagtttgtaaatttccaatatttcattgatgaaattactaaattcggaatagaaaatgatattgtcaaagtcattcctcccaaagaatggctggagcttttagaaggctcacctcctgcggaaagtttaaagactatacaactagactccccgattcaacaacaagccaagcgatgggacaaacatgaaaacggtgtatttagcatcgaaaacgagtatgacaataagtcgtacaatttaacacagtggaagaacttggccgaaagtctagactctcgaataagtcaaggttatttttatgataaaactttaaaggaaaattgccgcgtagatagtcagcaggattgttatgatttggcacagttacaaattttagaaagtgatttttggaaaaccatcgctttttcgaaacctttttatgcagtggacgaaaactcttcaattttcccctatgatttaactttatggaatttgaataatttgccagattctataaactcaagtaacagacggttacttactggtcagtctaaatgcatttttccatggcatttggacgaacagaataaatgctctataaactacttgcatttcggtgctcccaaacaatggtattccataccgtccgcaaacacagaccaatttttgaaaattttatcaaaggaaccatcaagtaataaggaaaattgtccagcttttattagacatcaaaacatcataacttctcccgatttcttgcgaaaaaataatataaaatttaatagagtggtgcagttccaacatgaattcatcattactttcccttattgcatgtactccggattcaattatggttacaattttggcgaatctattgagttcatattagatcagcaagctgtcgttagaaagcaacctttaaaatgcggctgtggaaacaagaaggaagagcgaaaatctggtccgttttcaaatttatcttatgattctaatgagtcggagcaacgaggctccattactgataatgataacgatttatttcaaaaagttcgaagttttgatgaattactaaaccattcctctcaagagttacaaaatttagaagacaataagaaccccttgttctccaatattaatatgaacagaccgcaaagtagttctcttcggtctactacccctaatggtgtaaaccagttcctgaacatgaatcaaactaccataagcagaatttcttccccgttgttatcaaggatgatggacttatcaaatattgtggaacctactttggatgatccgggttccaagttcaaaaggaaagttttaactccgcaattaccgcagatgaatattccgtctaattctagtaattttggcaccccttctctaactaatacaaactccttactatctaatataacggctacatcaaccaacccatcgacaactacaaatggcaaccaaaaccacaataatgttaacgccaatggcattaacacctctgcagccgcatctatcaataataacattagcagtaccaataatagcgctaataatagtagtagtaataataacgtttccactgtgccttcttcaatgatgcattcgtccactttaaatgggacttcaggtctaggcggtgataacgatgacaatatgttagctttaagtttagcgacactggctaacagcgctactgcgtcaccaagattgacgttaccgccgctgtcgtcaccaatgaatccgaacggccacacctcatataatggcaatatgatgaacaacaacagtggtaatggtagcaacggtagcaacagctattctaacggtgtgactacggctgctgccacaactacatcagcgcctcacaatctatccatagtgtcccctaatccaacatacaatccgaatcccctatctctttatttgaccaactccaaaaatccattaaattcaggtcttgcacccttatcaccttcaacatctaacatcccatttctcaagaggaataatgtggttacattaaatatttcaagagaagcttcaaacagccctatatcttcttttgtaaatgactatagatctccgttgggtgtaagcaatccactcatgtattcttccacaatcaacgattattcaaacggtactggaattcgccaaaatagtaataatattaatcccttagatgcaggtccatctttttctcctctccacaaaaaacccaaaatactcaacggtaatgataatagcaatctggacagtaataattttgattacagtttcacgggtaacaagcaagannnnnnnnnnnnnnnnnnnnnnnnnnnnnnnnnnnnnnnnnnnnnctatcgtacatcttcaatgaacaataacggcaacaattatcaagcacattcttctaagttcggtgaaaatgaggtcattatgtcagatcatggtaagatttacatttgtcgggaatgtaatagacagttttcctctggtcaccatctaacaagacataaaaagtcagttcattccggtgagaaaccccattcttgcccaagatgcggtaaaagattcaagagaagagaccatgttctgcaacatttaaataaaaaaattccatgcactcaagaaatggaaaatactaaattagctgaatcatag

SEQ ID NO: 75960 - DNA, 432 bp, Saccharomyces pastorianus
atgtcagttattcctccaaaattcttcaagattgcaaatatatcaattggctgcatagacattattgctgccctttcacaattgacgtatattttcaccaatttaaacgtcttcctcttggcagtttacggactggcactctccgtacctatcgtctatctggagttcaaggttccgtcaaatctttacaggtatgcttccttttactttagttttcttggaaggggtttatcttatattttactaagtctgataatcagcttcggcggtatctacaacatattggcgggaatgtttacttttattttaggggttgcctttattgtttttcatttttcccagtttgtggaagaacctgctaacttcagagcacccggctcatctttgtcaattggtgatgatgacatcgacgatgacgatgacatgatttaa

SEQ ID NO: 75961 - DNA, 1782 bp, Saccharomyces pastorianus
atggctctagctatctcccacgaggatactcagattttgctaaaggacaaaaatattctacaggaatcggtcttgaacaaatacagaactgctggacaaattgcacaaactgctttgaaatatgttacttctttgatcaatgattcatatcactctaagaccacacagcgccaattaaccgtgccagagctatgtttgcttaccgattcttttattttgacccggttggaacaatattataaaaacaaagttaatgaaagaggtattgccattccaaccactattgatatcgaccaaatttctggtggatggtgccccgaaatagatgatactcaaaatttgttaaactggaataaggggaaagactccacttttgcatcatctgtcactgggactttgagaccgggggatttagtcaagattacactaggtgttcatattgatggttacacctctgaagtttctcatactatggttatttaccccgttgatgaaaccaaacctattcttcaacccactgggccactactaggtggtaaagcggatgctgtagctgctgctcacattgctatggaaacagttgttgctttattagcctgtgctctgactccagaaaagcttcctgcctcactgggaggaacttcaagtggtatcacaggccaattgattagaactatagtggatactattgccagatcttataactgtggcgttgttcctggttctcgtgtaagaaggattagaagattcctggcaggccaaaacgaaggtattgttgccgaaagggaatataagggtgttgtttggacagagtcccatcaagaagcagatttgctatctaatactgatgccaaggatttaacagtggtagatcgtggacaatcgactccattcactaatgtttctgctattccaagtgatgatttcgttgttcaatcaggtgaagtgtatttaattgatttgaaaatggcatctttggagcattgtaccaaaaagggtttagtaactttagaaaccgttgactcttacacaggtaaatctcataaggctggagaattgattgcaagacccggtgcatatgttagagattttgctcaaacccatattcttaaattaaagacttctagacaattattaactaaaatcgataaacaaggcgtttatccattcaagttatctcatttatcttctaactttcctttcgttcacgaaaatgaagaagaactccaaagcttaaagaaagatttgaaatcatttagacttgggatgagtgagatttccaacaactacttatgtgtggaaagtccaatacaaattgctagatgggttccatgggaccatattttaaaggctaccaatccaaacggtaatttaagttatgatgcaacctctacattaacattacctgggcatgagttacctttaccaaaattgggtgtttcagccatcaagcttaaatccttaatgaattcaaccaaggaatcgatttctttaccagttgctcgtgaatgtaataccatcgtattatgtgactctagtgtaagtacaacggacagacccgaattattgagattaactggtggttctaagacctgtcaaccgagctggattcactctcagcacgaattaaatccacaagattcaattgttcaagggatctttcaattagctactttggccaaggataagaggttcggtctattattaaaggaaacgcagccaatgaagcagaagagtgttgagacatcaaatggcggagttgaagaaaccatgaaaatgtag

SEQ ID NO: 75962 - DNA, 333 bp, Saccharomyces pastorianus
atgactctcctacttcaaaaatgtatcagagtagaactgcggaaagatccaatatttaacgcttcttcttcactcgaaatatttctgtcagttttagaatctgttatatatccctttaaaggaaacttgatacttctagattttcatcttgtcgatgttcaaacaacgtgttatcagagaaacagctccatgagaaatcagctgatgtcagtattctgtcagtcacttcgtgaatttacattgactgctctttcgtgcaattcatactgtattattatagttgcaactagatggcaaaaaattgataatgccctaaaaatgacaggccggtaa

SEQ ID NO: 75963 - DNA, 1422 bp, Saccharomyces pastorianus
atgggtgccgtaatttctttgccagttagcatggcgggctcattcgtggcgtcctgttttggaggttgctgctcaaacttggtgactaagactgcatcttccgtagggtcttcttctttagggacaagacttctgtacgccgtttggcttttacttaactcattgatatcatgggtgtcctattctgcgaacaaatcaatcctatggccagggaagacatgtactgggactggggaatgtggattttttacagttcataggttgaattttgcattgggatgcttacatttgatattggcgcttgtactaacgggcgtaaagtcgactaatgacgtaagagcagcattacagaattcgtggtggagtttaaaatttatactgtatttatgtctcattgttttgtcatttgtcatccccaatgacttttatattttcttttccaagtgggtgtcagtccctagtggagcaattttcatcctggttgggcttatattattagtagacttcgctcatgagtgggctgaaacgtgtattagtcacgttgagtcagaagatgaagattcctcattctggcaacgatttttggttttagggacaacttcaatgtatactgcatcgattatcatgactgttgttatgtatgttatgttttgtcatcaacaatgtaacatgaatcaaacagcggtaacagtcaatttaatattaactgttataacgcttgtcttatcggtgaatcctaagatccaagaggccaaccctaaaagtgggctggcccaaagtagtatggtttctgtttactgtacttatttgacaatgagtgccatgtcttccgaaccggatgacaaaatgtgtaatccgttggttagatctagtggaacccgtaagtttagtatcattttgggctctttatttacttttattgcgattgcctacaccacaactagagccgctgctaatagtgcttttcaaggcaccaatactaatggtgctatatatctcgggaatgatatcgagtacgaaggactaggtggacagacaagaaatcagttgagatatgaagctattaaacaagctgtagaagaaggatctttaccggaaagtgccttatatgataccgcttggttagggacatcatctcctacaggcgcaatggataaccaaaatgatgatgaaaggactggaaccaagtacaattacactctgttccacgttatattctttctggcaacccagtggattgcaattttactaacaataaacgttacccaggatgatgtaggtgactttatacccgtaggaagaacatatttttattcttgggtaaaaatagttagtgcatggatatgttatgccctttacggttggacagtggtagccccagcgattatgcccgatagatttgattacgagaattactattaa

SEQ ID NO: 75964 - DNA, 2148 bp, Saccharomyces pastorianus
atgaaaagcaggaaacgccaaaacaatatgcaagatgaaacacgggagccagcggtattgtcgtcacaggaaacctcgatttctcgcatttctccacaagatccagaagcaaaattctacgttggtgtagatgtcggaacaggctctgcaagggcatgtgttatcgatcaatctggtaacatgttgtcgctagcagaaaaacccataaaaagggaacaattgatatccaattttattactcagtcttcaagagaaatctggaatgcagtttgctattgtgttagaactgttgttgaagaatcaggagttgaccctgaaagagttcgtggaattggttttgatgcgacttgttccttagtagtcgtatccgctaccaattttgaagaaattgcagttggaccggattttaccaataatgaccagaatatcatattatggatggaccatagggcgatgaaggagactgaagaaatcaactcatctggtgataaatgtttaaaatatgtgggagggcaaatgtctgttgaaatggaaattccgaagattaagtggttgaagaacaacttagaagctggaatttttcaggattgtaagttttttgaccttccggattacttgactttcaaagccacgggaaaagagaataggtcattttgttccgctgtttgtaagcagggatttctaccagtgggtgtcgaaggttccgatataggctggtccaaagaattcttaaattcaattgggctttcagagcttacgaagaatgattttgaaagactgggtggatcgttaagggaaaaaaaaaactttctgaccgcaggtgaatgtatcagcccgttagataaaaaggctgcctgccaattaggcttgacagagcattgtgtagtaagttcaggaattattgatgcatatgcaggctgggtagggacggtagccgccaagccggaatcaccagtgaaaggtcttgccgagaccgaaaattataaaaaggatttcaatggtgcaattggcagattggcagctgttgccggtacgtctacgtgtcatattttgttatcaaaaaaccctatatttgtccatggcgtttgggggccttatagagatgtccttgcaagaggcttttgggcggcagaaggcggccaaagctgcacaggcgttcttttagatcatttaataacgacgcatccagctttcactgagctatcccacctggctaatttggcaggtttgtcgaaattcgaatatttaaacaaaatacttgaaaccttggtcgagaagcgcaaagtaagatctgttatttctctagctaagcacttgtttttttatggtgactatcacggtaatcggtcaccgatagcagatccgaatatgcgcgcttgtattataggacaatctatggataactcaattgaagacttagcggttatgtatctgagtgcctgtgaattcatatcacaacaaacaagacaaatcattgaagtaatgctaaaaagtgggcatgaaataaatgctattttcatgtcaggtggacagtgtcgaaatagcttgttgatgaggttgttggctgattgtactggcctgccgatagtgattcctcgatacgttgacgctgcagttgtatttggttctgccttgcttggggctgcagcaagtgaagattttgattataccagggaaaaaagaactctcaaaggccaaaaatcttctcagacaaagacggaacgttttaacgattcatattcgtcgatacaaaagttatcaatggaagatcgaaactcgacaaatggctttgtatccccacataatctacaactttcaactccaagtgcacctgccaaaataaataactattctcttccgatttgcacacaacaaccacttgacaaaacctctgaggaaagtagtaaggatgcttcattgaccgtgggacaggagagcctaggagagggaacatataacgggacaagttttctatggaaagttatgcaagagctaacgggtaatgcaagaattgtcaatccaaatgagaaaactcatccagatagaattcttttagacacgaagtaccaaatttttctcgatatgattgaaacacagagaaaatataggcgtatggtagataaagtagaagggtcctttagtagataa

SEQ ID NO: 75965 - DNA, 1701 bp, Saccharomyces pastorianus
atgacgaaaccgcgttacaatgacgtgttgtttgatgatgatgactcggtaccatcagaatcagttacgaggaaatcgcagagaagaaaggcaacgtcacctggggaatcaagagagtcctcaaaagatcgtctactgatacttccctctatgggggaatcatatactgagtacgtagactcttatttgaacttagaattattggaaaggggagaaagagaaacaccaatctttcttgaatctctgacaagacaactaacgcagaaaatatatgaactaataaaaacaaaatctttaactgcagataccttgcaacaaataagtgataaatacgatggtgtagtggcagaaaacaagctgttatttttgcaaagacagtattatgttgatgatgaaggaaatgttagagatggccgaaataatgataaaatatactgtgagccaaagcatgtatacgacatggtgatggcaacacacttgatgaataagcatcttaggggtaaaacattacattcctttttattttctcattttgccaatattagtcatgccatcatcgattgggtccagcaattttgttcaaaatgtaataaaaagggcaaaattaaaccattgaaggaatataaacgtcctgacatgtacgataaactactaccaatggaaaggatacatattgaggtattcgaacccttcaatggagaagctattgagggaaaatattcttatgtccttttatgccgagactatcgctctagttttatgtggttattaccacttaagagtaccaaattcaaacatcttatcccagttgtttcctcactttttttaacatttgctagggttccaattttcgtaacatcaagcactttagataaagatgatctttatgatatttgtgaagaaattgcatcaaaatacggtctccgtattggcttgggtttgaagagttctgcgagatttcatactgggggtatactgtgcattcagtatgctctaaatagttataagaaggaatgtctagccgattggggtaagtgcctaagatatggcccttacagattcaaccgaaggagaaataagagaacgaaacgtaaacctgtgcaagtactacttagtgaagttccaggtcacaatgccaaatttgagactaagagagaaagggttatagaaaacacatattcccgtaatatgttcaagatggcaggtggaaaaggtcttatatatttggaagatgtcaatacttttgcccttgctaatgaagcggataatagctgtaacaataatggaattcttcataataacaatataggaaatgataactttgaagaagaagtgcaaaaacaatttgatctaactgaaaaaaactatatcgatgagtatgatgatttggcacatgattcttcagagggcgaatttgaacctaataccttaactcccgaaggaaagcctcctcataatgtcgatgaggaccgaatagagtccaccggcgtggcagccccaatgcagggaacagaagagcctgaaaaaggggatcaaaaagaaagtgacggtgcatcgcaagtagatcaaagtgtcgaaataactagaccagaaacttcctactatcaaactttggaatcgccgtcaataaaacgacagaaattagaccaacagggtaatggagatcaaacaagagactttggcacatcaatggaattgtaa

SEQ ID NO: 75966 - DNA, 1524 bp, Saccharomyces pastorianus
atgacaatgacacaccaacaggatttgaaaggtgtgttcaccgcaaaggatttggattttaagcccgctggcaagattactaaaaaagatttgaatacaggtgtcactaaggcagaatatgctgtaagaggagctattccgaccagagctgacgagctaaaagaggaattgaaaaaaaacccagaagttttgcctttcgatgatattatcaatgcgaacattggtaatccgcagcaactggatcagaagcctttgacctttaccaggcaagtactagccatcctggagtacccggaaattttacgagtaggccataatgaactggcatctttgaacttgttttccagggacgccttggaaagagctgagcgcctcttgaatgatattggcggttctataggggcatattcgcattctcaaggtgtgccaggaataaggcaaacagttgctgacttcattactagaagagacggcggtgagcccgctacaccggaagatatttatctaaccactggcgcttcgtccgcggcaacttctttgttatctttattgtgtaaagattctcaaacaggcctgctgattccaattccgcagtatccgctttatactgcatccgcatctcttttcaatgcacaagtgctgccatactacttagatgaggagtcaaattggtctacaaacagcgacgaaattgaaaaagtagtgcaagatgctttgaaaaaacagatcagaccatctgtgctgatagttattaatccaggtaacccaaccggtgcagttctttctgaagaaaccattgccaggatctgtttgatcgctgcgaaatacggcattacaatcatttctgatgaggtctatcaagaaaacattttcaacgatgttaaatttcattcgatgaagaaagtcctaagaaaattgcagcatctttatccaggaaaattcgataacgttcagctcgcctctttacactccatttctaaaggattcatgggtgagtgcggccaaagaggcggttacatggaaattattgggttttctcaagaaataagagatgctcttttcaaactcatgtctatatccatatgttctgttgtcacaggacaagctgtggttgatttaatggtcaaaccaccccagcctggagacgagtcttatgaacaagatcatgacgaaaggctgaaaatttttcatgaaatgcgtacgagagcaaacttattgtacgagacgtttaaggaactagagggtatcgaatgccaaaaacctcagggtgcaatgtatctttttcctaggcttgttttacctaagaaagctctttgtgaaagcgaacgtcttggcatcgaacctgatgagttctattgcacatctttgctagaatctacaggtatttgtactgtcccagggtctgggttcggacaaagacccgggacttatcatgtgcgaacaacgtttttggctccagggactaaatggattcaagactggaaagaatttcatcaagatttcttcagcaagtatcgtaattga

SEQ ID NO: 75967 - DNA, 309 bp, Saccharomyces pastorianus
atgttcgcattgataatatcatcgaaaggcaaaacttctgggttttttttcaattcctcttttagctcgtcagctctggtcggaatagctcctcttacagcatattctgccttagtgacacctgtattcaaatcttttttagtaatcttgccagcgggcttaaaatccaaatcctttgcggtgaacacacctttcaaatcctgttggtgtgtcattgtcatgtgttcttacttcttccgtgtttaccacttacaaaaacaacactactgtggcgctccttccctttattcgtatcttttatgcctctag

SEQ ID NO: 75968 - DNA, 1122 bp, Saccharomyces pastorianus
atgatgccagctaacgaagataaagagaataatatcgtatatacagggaatgaaagttccggcattaactttccacagacgccggctcacttgctgaaaaggtcgcactctaatattttaaaaccacctgtaagattggaccaactcaaaagggatgcgaacagcaacaatggcaacacattaaagtacatacaaggaggaaaggaggtgtcacccacaaaaaggttgcatacccatgcgcaacaacaaggaagattgcctctggcagcaaaagacaacaatagatcgaaaagctttatttttcccgaaacttttaatcagagtaaagatgcagatttaccacaactacagaatacactatctatacgcaagaacgaccaactcaggaaactttcgcaaatttctcgcagtcgtagtagggccaaccataatgatttgttaagcaattcaagaaagttacaaaagtacggttctgtccttggttataatgctctacctaaaatgaaaagtctagttttaaaagatcttgcagattcaggtaaaaatgaagagagttccgacgatgatgaaggtaatgaagattccgagagtaaacttggcaaaaaactccaaagtgcacttttaaaacaggattcctccgacggtgaaaatgaattaaatggtggcctaggactatttaatgagcaaggtggtctgcaacaactcataaagaactccacgaagaatgagcaaaaaagtaaaaacgataaaagtgataaaactgatgactatgatatcgaaatagcaccacagaggcaggagccgctaccgtatgtaccagaaggctattccccatttcaacaagaagatattgaaaagctgaagacattcaactcaccatataagcttgatttggaagacgaagatgacaccccagataaagttgatttactcccactagaacaaattgatgaagaaggcgaaaaagatgagactgagcgcatcactcggaatcaagaagaagatgcagcgttaccactgctgtctaagaacttcaaagaagttgccgccgtcccaaccatggagttagtgtacagcgaagaaggcctcgatcctgaagaactagaggacttagttacttag

SEQ ID NO: 75969 - DNA, 858 bp, Saccharomyces pastorianus
atgctatccgtagtagcgatcccgaaaatatgtgtcacaggtcctgcaagaagatgcgtttctcatactgcaaaaaaactgtacgcagatgactataaaccagcagctatgtcctccaatgcaccttcgctaacaaaagaccaagccaaaaaaagagagttgaaaagattggtacaacgaaaggccgaggcaaagagaccagctacagcaagcccattgtacatgcctgttacaaaggcactaagatatttacgcgcagcagaagttggcagaccgcaatcgcaacagacaattaatttgactacattggtagtcggtgaaagaggtacagcgcctttatccggtagcgtgacatttcctaagcctttgagatatatcaaaattgctgcctttaccaacgacgaaagtaaattggaagagcttcgtgagaaatacccaaatcatttgattggcggagcagatcttgttgccaaaattaaaagcggtgaaattagcgttgattttgacaaagcatttgcaactcctgatattgttccagctttacaatcgcaggtggccaggatacttggtcctcgtggggttttaccctctgtcacaaaaggtacggtgagtgatgatataggctccctacttcaagaaagtctaggatctatgcctttcaggcaaaggggaaactctatcagcattggagtcggcaaatgctacttcactgatcgagaaattttacaaaacattatatccgctagagcggcatttaaaactgctgttgataatcaaaaatctaagaaaccaaatatactgagtaaaaccacattatcaagcacacatggccccggtattgtaatcgattttgcttaa

SEQ ID NO: 75970 - DNA, 1698 bp, Saccharomyces pastorianus
atgtttaagaaggagcctcacataaaagctttaagtaatttgaagaattccgaaagaaagaagttgctacaaacattccaaaaacaaacgaataatgaggaatatagctttcctacttccactataaaacaaaccaactttaacggccagaaaagtgtaggaacggtttacacagatgagaataataccccaatattattcaaggaaaagcataaggagcaactttttccaactgtgtattcttgttgggaatatcctgcgttattgccaatcgttttaactcatggatttgttatagaagaacatttattcaacggcgctaacttaatgatttccggttcgatcccaccctttgatcctcgttgcaaaataggtactctttgtggtatagctagcaaacaggcaccagaaactgtcttagccatcggcattgtcgaattagatctaccgtcctatgataaagtaattggtgaaacaggagttgctgtcaaaatcatacattatttcaatgatgggctctccaaagtctttaaaatgaaattggaacctccaattgttctcagtactcaatcaaaggataacaatatcagtagtaaacagatagaatcctcggagcaaatcaaggctgttgaaaaggaacaagaagatgcaaaagaagcgtctgttgatgtagaggagattgctgaagttctagaccattttactgtgtcggatgtagattatttcattacaagagcattatattataccttgactcaagataaaggtttggaattacccatttcagcttctaacttcatctcaaaccacattatgcgtaatttgcctccaattgatcacaatgaagtcaatgtaaagaaaacttcatggaaaaaaagcgcaaaatttttgaaacacttcgagaaagaaggcttcttaaaattaaaaggaaagggggatgacttaactattgtgggcaaaaatactgacaaggatgagttaaagaactttgtgccatataagcttggttgtagcaagtctaccacagaaagtagggagagcacaacatcgaaggagaaaacatctggaatgatgtattcactgactctgtataaaccctttaatcttgccaaagatcttttgaaggaggttaatttggcttctcacacgtactacacctctcaggacattagaagcgcggtttctcagtatatttctgtcaagaacctagcagacacaaaagataaaggaaaagttattatggacgatctattattcgatatggtcaataagaagaagaaagtcttgaatgcttcacgtatcattgctagaggtgaaattttgcatcccttactcaccaataattttaccgagttctatcagatattcaaaagcgatgatactctcttgttcaaggcgccaatgaagggttctcttccgcatattaagattattactgaaatgaaaattggcagaaaagttattaccagagtgagcaattttgaagtgtttcaagtcgatccagaatcacttgcggctgacttaagaaagatttgtagcggatcgacaacaataagtgaatcacaaacattcaaatgtgctgaagtgcaggttcaaggtccacacggtcaatcgatcattgatcaccttaacaagctaggtattccaagcaaatggatagactttgagaacaagttgaagaagaaaaaaagaaagtag

SEQ ID NO: 75971 - DNA, 1959 bp, Saccharomyces pastorianus
atgtcgtctcctattaatgattatttcattgattataaccctctttttccaatctttgctacaagaattgcgaaaggccttgctatttacagagtctcggatcacgctaggcttgcagtaattccaataagaaatataaacttggtggcgaattacaattgggatacaactactggtaaatttttgtccatcttttttaaggatgggacgatcagaatccatgacatttttaaagacggtcgattagtttcattcctaagaattccgagtacaaaaatatcaaaaggtatatgggaccgaattccattaagatacgaaccaaataatcgagattttgcatgtaacatcattgatgatttaccaaagctaataaggtttgtaaaggactcaaaaaggataaacattgtcccttacactcaaccgaatagcttgtggagaggtcctgatgaggatgatctagatagtaatgaaaaactagacgttcacgtagtattcaatgagggaaatgataaaattacagttttttttaatggtgattacgctgttttcttgtcggtggataatattgaaaacgaaaattctttaaaatcaattatcaaagttcaagatggcttttaccagtgcttctatgaggatggaactgtacaaactttaaatttaggacctttattacagagcaaatcatcagtgaacctgctgaattatataatggtaataaaagagcttataggttatatgcttactcatctcgagttcattaaccgggaactggcaacaccttatttagatttcgtcaaaagattgtgtgatgaagcctacggatatggaaaactcaaatcggaattagaagccctctttttacttggagagatctcatgtgacttggaagactggctttgcaattcagtaggtgagaagaactttaaaaggtggaagtatttaggttgtgaagcttaccaaaaaactgttcagattttaactttgatattcgtacccgcatgtgaaagaatcattatttatgtggagaagttaagggcaatattacaagccttttctatacagaataagctcagttatacgtcagatttgacagctgttgaagtgctcctaaaaagttcacagaaattgttaactatgacattaaattcaataataggcttggggagggacgaaacactttttgagaagtttttcatatggttcaacgacagacttcatgaagcgctagatgaagattataaactgaaatttcaatttgaggatgatctttactttggatacgatttactaagttactttgacagaatcttatctaaaaaaggtacggaacctagctcaataatcgacgtgaaactttatagagacctaattaatagcatgtctgatatggaaaaagagattgcacaaagtaatgttaattctcatattcaacagcatattctggttgatttaaaaacggatgtttttgcgcaaaaatatccatcttcgcaaataaatttgcttgatgccataaaattaccaaagcataattacatagtctacgttgttcaggtaacaaaacacaacagtgctcaagaacctttctcagaagaaaacaaaaagaaactatatataggaactctgaaagatgagaatttaggcattatatcaagagaatcgtcagtcaagattccggcgctattcaagagctataggttgagcagtacacggtttgtgccgaatagggtccatagcttgcttcgggatattgaattgtcagatggtaactatcatagtagccacgtcaccgattataggggagaaaactataaaaacgaggaagatgatggcataatagctattcctgcttacatcagggagaatgaggaaaatgatgatttcatagcatgcaccgcgaaggtatcggtggatggaagaagcgcatccctagtgtttccaaaagaaaaacgaaatgtttga

SEQ ID NO: 75972 - DNA, 1713 bp, Saccharomyces pastorianus
atggaaagtttcttcaggatacccctcaagcgggcaaatttacacggaatgttgaaggctgctatatccaaaattaaggcgaattttaccgcgtatggtgcaccaagaatcaatattgaggatttcaatatagtcaaggaaggaaaagcagaaattcttttccctaaaaaggaaactgttttctataatccgatccaacaatttaatagagatctaagtgttacatgcatcaaggcgtgggacaacctatatggtgaggaatgtggccaaaagagaaataataaaaaaagtaagaagaaaaggtgcgcggaaactaacgatgattcttccaagcgtcaaaaaatgggaaacgggtcaccaaaagaagccgttggtaattctaatcgaaacgaaccttatataaatattttggaagcattgtcggccactgggttaagagccattaggtatgctcatgaaattcctcatgtgagggaagttattgctaacgatttacttccagaggctgtcgaatctataaaacgaaacgttgaatataatagtgtcgaaaacattgtcaagccaaaccttgatgatgctaatgtcttaatgtaccgtaacaaagcatcgaataataagtttcacgtcatcgacttggatccttacggtaccgttacaccctttgtagacgcggctattcagagtatcgaggagggtggtctaatgctggtaacttgcactgatttatccgttttggccggtaatggatacccagaaaagtgttttgccttatatggtggtgcaaatatggtttctcatgaatcaactcacgaaagtgcgctgagactagtattgaacttactaaagcaaactgccgcgaaatacaagaaaactgtggaaccgcttttgtcgttgagcattgacttttacgtcagagtttttgtcaaagtcaaaacaagcccaattgaagtcaaaaacgttatgtcaagtactatgactacttaccattgttcccgttgcggctcttaccacaatcaacctctgggcagaatttctcaacgcgaaggtagaaacaacaaaacattcaccaaatactcggttgcgcaagggcccccggttgatactaaatgtaaattctgcgaagggacataccatttagctggtccaatgtatgcaggacctctacacaacaaggagttcatcgaggaggtgttgagaattaataaagaagagcatcgtgaccaggatgatacatatggaacacgtaaaagaattgaaggtatgctatctctagctaaaaatgaattatccgattcgccattctatttcagtcctaaccatattgcgtcggtaataaaattacaagtacctcccttgaaaaaagtagtcgcaggcctaggttccctaggctttgaatgttcattgacacatgcccaaccatcgtccctaaagactaacgctccatgggatgcaatctggtatgtgatgcagaaatgtgatgatgagaagaaagacttaagcaaaatgaatccaaatactacgggctataagattttatcggcaatgccaagatggttgagtggcactgtcaaatcagagtatgactcaaagctgtcgttcgcaccaaatgaacaaagcggtaatattgaaaaactaaggaagctaaaaattgtgagatatcaggaaaatccaacaaagaattggggcccaaaagcccgtcccaacacttcataa

SEQ ID NO: 75973 - DNA, 594 bp, Saccharomyces pastorianus
atgccaccaaaaggttggagaaaagacgcccaagggaattaccccactacttcgtatattaaagaacaagagaacattacgattcaggacctgttatttcctaaaagcactattgtgaatttggcacgcgaagtgccacagcagagcggcaaaaagctgctgataaataaagacgcatcactagcgttacagcgtggtgctacagtatttgttaaccacttgctcctgtttgcaagggaaattgcaaagagtcaagataaaaaaagctgcagtgtagatgatgttctgagtgctttggaccatataggacactcggcattgaagggtccggttagagataaactagatgaataccaagctgctgttgaacagaggaagaaggaaaaactagatagtgatgaagtagatgctgatggcgatatagatatgggtgaagataaggagaatgcgcccgtggaaaaggttattaaagagcatgacgaaatagaagaacaaggtgatgcattacaggacgtagaagagtcctccgaaaagaaacagaaaacggagagccaagatgtagaaactagagttcaaaaccttgagcaaacgtaa

SEQ ID NO: 75974 - DNA, 915 bp, Saccharomyces pastorianus
atgcaacaagcaactgggaacgaattactgggtatcctagatctggataacgatatagactttgaaactgcttaccaaatgctcagcagtaacttcgacgaccaaatgtctgcgcacatacatgaaaacacgtttagtgcaacttcccctcctctgttaacacacgagctcggcataattcctaacgtggcaaccgtgcaaccctctcacgtagaaactatacctgccgataaccaaactcatcatgctcctttgcatactcatgcacactatctaaatcacaaccctcatcaaccaagcatgggttttgatcaagcgcttggtctcaagttgtctccttccagttcggggttgttgagcacgaatgaatcgaatgccattgaacagtttttagacaatctaatatcacaggatatgatgtcttccaacgcttccatgaactccgaatcacatctacatataagatcaccaaaaaagcagcataggtataccgaattaaatcaaagatatcctgaaacacatccacacagtaacacaggggagttacccacaaacacagcagatgtgccaactgagttcaccacgagggaaggacctcatcagcctatcggcaatgaccactacaacccgccaccgttttcagtacctgagatacgaatcccagactctgatattccagccaatatcgaggacgaccctgtgaaggtacggaaatggaaacacgttcaaatggagaagatacgaagaataaacaccaaagaagcctttgaaaggctcattaaatcagtaaggaccccatcaaaggaaaacgggaaaagaattcccaagcatattcttttaacttgtgtaatgaacgatatcaagtccattagaagcgcaaatgaagcactacagcacatactggatgattcctga

SEQ ID NO: 75975 - DNA, 975 bp, Saccharomyces pastorianus
atgcgtataggtatggaagagcttagaagggcgctggcgctgctaaatggtcaaggatatgagtttatggtgttcataaaggaaaaagaccatttaataagtgagtcaattccaaaaaacttgttctcagagagttttatatcatcttcaattgaaaaaaaccctccactcacgttcgatccattggtaaataggaaaagaataactgtttatgaagaaaatatccaaccagcgatcatgctacccttagatcaacccctactaatacagaattatctgtatacggcttttaaattattaagacaggtcccatgcaaggcgattgctaagttgtggataaaaattattgagccaaggaagaaaaccaggtttccatacattaaaggcaatgctggaaggccggaatggtggccaaaagatgtagaacataaagagccggaccacctccagaaagcggatcgactgaaattgatgtgcacgataattatgaatgttctaccgcaatctcccttcagccttgagattttggacgagcttacaagagtgaccgccgcaatgaccatttttaagaaagaaactgtgaagaaagtaatcatgaaaaatgttttcgaaattgcgaaatgcttgtgcaacaaagatttcaagcagaagaccatatcacttgatgatttaaatgacctagcccaaaaacagaaaaaatcataccatagtcgtcgatttgatgtaaataaaatggttaaggtagaaaaagatttgttacaacagtcaagtggaagcgattcttcaccctcgatgatccttccttcaaaagaaagtgacacagagtatttccccagggaatatccgaaagaccctgtatcggaggattattcgaatagcatatctcgattagaaaatttagtggaatttgatccgttattcctcactaaattggatgaattaactagtagcgatgattgtaaaggttttatttga

SEQ ID NO: 75976 - DNA, 1362 bp, Saccharomyces pastorianus
atgcttttaataaagaggtacttgatggaccctgaaagtttaaggaggcagataatgaatgtatataaatgttacatgtggaagagagcgttccacagtaatagaagcctattggaagttaaacgtcgtgaaaagagtctccagagaaaaattttggaaaggattcttagacccaaggaggaaaatgctgtcaaaaaatctggattcaagctatggtcaagccatttgaataacccacacaaaacttatatgcggctggaggaattacggagacgtattatggaagaggtacacgttgaaggtattaaaaagaatgataagttattcaacgaaataaatcaatggcatttccaaaatgaaaacacaagtactgttcgaacaccaacattgctgatacatggctatgccgcatcttcaatgtcttttttcagaaattatccaggtctgtccaagcacatccgaaatttatactcaattgacatgccagcgagcggattgtcttcagtaccgtctttagagatcaatacaacaacacctctgccgttagatatcaaatttattggagaaaataaatttaaggttccatatacaataaatgcaaatcacaataaatttgtgattcaaatgtacgaagatttctatctcaacagaatcgagcaatggcgcattgataacaaattgggcaaaatgaatgttgtggggcattcttttggcggatatttatcttttaaatatgctgttaaatatccaaactcggtaaacaaactttgcttggtatccccactaggagtggaaaggaatatctggtctgtaaataataatttccactccaacactctttatactatcgattttaaaaatccaaattccaagttttactccaaaagaaatatgattccaaaatacttatttgaacaacaatttcacattttgagaatgatgggaccattaggagctaagttatgttggaattacataatggcggcatatagccgagtcccatcgttggcatacaaagagtacatatttgaactgttttacggtaagggaggtataccggaggttacgacagatattttcaaagcgttattttcaagatgtatcctagcaaaggaccccttgatggattctctgcaatatttaaatgttaagaaattattgatagtatatgggcaatatgattggatgaataaaaaagccggtatgttcatggtcaaagagttgaacaatttaaagaactgtctagaaggagcaagttatttagaaataccttcttccggtcacaatctttttttagataatccagaatcgttcaaccaatctatagtgtccttcttatcagacgaaactaaatcgccttga

SEQ ID NO: 75977 - DNA, 1011 bp, Saccharomyces pastorianus
atgtcatggaatctactatttgtgctgctaataggattcgtagttttgatattactttcgcccgtcttcaagtcaacatggccattttcgactttctatcgtaatgtgtttcagcccttcctagtggatgaccaaaaatatcgttggaagttccatttagtacctcttttctacacctctatttacctgtacctagtatatacataccacatgagagtggagtctacgattaagaatgagctattccttttagaacgaatactgatcgtgcctataattatactaccaccggtagcattaggaattctagccatggtaagcagagctgaggattcaaaggatcataaatcaggctcgacagaggaatatccatatgattacctattgtattatcctgccataaagtgttcgacatgccggatcgtcaagcctgctagatccaaacattgtagcatttgcaaccgatgcgttctcgtcgccgaccatcattgcatctggataaataactgcatcggaaagggaaactaccttcaattctaccttttcctaattaccaacatattctcgatgtgctacgcctttctaaggctgtggtacatttctttaaatagcacaagtacgctccctagagctgttctgactcttaccatattatgtggatgcttcactatcatctgcgctattttcacgtatcttcaattggccattgtaaaggagggaatgactacaaatgagcaagataaatggtataccattcaagagtatatgagagaaggaaaactggtgagatcattggatgatgattgcccatcttggtttttcaaatgcacagaacaaaaagatgacgctgctgaaccactccaagatcaacatgttacgttttatagcacgaatgcctacgaccataagcactacaaccttacacactacatcacgattaaagacgcgtccgaaattcccaatatatatgacaaaggtaccttcctggccaatctcacagatttaatatag

SEQ ID NO: 75978 - DNA, 876 bp, Saccharomyces pastorianus
atgagcaataaaagcaaccgcaggagtttacgtgacatagggaatacgattggtcgaaataatataccaagtgacaaggacaatgtctttgtgagattgagtatgtcccctttgaggacgacaagccaaaaagagtttttgaaaccacctatgaggatatcacctaacaagacagatggaatgaagcatagtatacaagtaacaccaagaaggattatgtcgccggaatgtctgaagggctatgtctctaaggaaactcaaagcctggataggcctcagttcaaaaattcgaataaaaatgtgaagatccaaaactcagatcatataactaatataatattccctacatcaccaaccaaactgacattcagtaatgaaaataaaatcgggggtgatggttcgttaacgagaatacgggcccggtttaagaatggactcatgtcacctgaaaggatacagcagcaacagcagcaacatattctcccatcggatgccaaaagcaacactgacctctgttctaatactgagctcaaggacgccccatttgagaatgaccttcctcgagctaaattgaaagggaagaatttattagttgaactcaagaaagaagaggaagacgtgggaaatggcatagaatcccttactaaatcgaacactaaactgaattccatgctggcgaacgaaggtaagatacacaaagctagtttccagaaaagtgtaaaatttaaactacctgataatatagtgactgaagaaaccgtggaacttaaagaaataaaggacttgctactacaaatgttgagaagacagcgagagattgaatcaagattatccaatatcgaacttcaactcacggaaataccgaaacataagtaa

SEQ ID NO: 75979 - DNA, 1671 bp, Saccharomyces pastorianus
atgttagataagttaccttatgagatttttaaacaaattgcctgtagaattccgcaggaagataaaatttcgttaacatatgtatgcaaaagatcctatgaatcaattatacctttcatctaccagaatgtatttcttaatgaaacctatcacatcagtggtgactatgataactcatttggaacctgttattggtctgtcttaaactttcactacatagatgaagatgattccaatactaaaaacgacatgtcgaatagaagactagctaaagtgaaatttagttatttcgaaagaacattagcagagtcaccgaaaagattatgtcccttaattaatcgaatacgttgtacatggcatttaaatgaagatgtgatgacaaatgtacttaaattgctatccgagtatggatccaatttgaaatttgtcgatcaatttgttcgctcatcagttaacaaggggctagaacctttatcaaagcaattaaaaactctaacattaacgccaccaacgttaatgcccacccataacagtgtaagcggttcttatttgaataaaattgatcggttgctcttgaagtgcgatctatctcgattagaaaaactttccattcatataaatgcattgaagtacttcaaaaataccgggtctcctatgaagatcaaagcattggtattaaatttgcgacccgacacacttaaccttgcggagtacgacgctttcgatgacttcttaaaagagctagaatacatcgacatatttgatgcttccaccttaaggcagctagagattttgtcttggtacagtcgcgacgattttccctctgtcgaagaaggtggttttgacaggttatatgtcaaatgggggctagaaggattttggaaatttccgaacattgagaaactatcattagcgtcattggtttacagcgaattttttctaatgaattgtttggctgtgtttcacaatttaaagatactgaaacttgattacatgggtaaatttgacttcgatgtgtcgttgattaacttcttatctaaacaagtgtgtggcaaaaaattacagcgttttgacatacactgcgaactgaatcacaggcttttttttcccatgacagataacccactaactcgcttgaatttcgatggtttctgcccttgttcaacttgcaaaaatacaattcacgaggtcattctaaaaaaaatctttcctgaaacccggtcaaaacttttaaagaacccaaataagttccaagcccataatttcttttaccaaatgtttttcgagaacaagatcatgccctatacaaacattattgacaacgaatcacctgcgatgggatgggattctgtacctattgaaacgtttgtacgaaagttcaatgaaaatctgcaaagcaccatagaaaatactgagaatattacagtgaataaaattactagagaagatgccattagtttgtaccacttataccttcattatctaaaagacgtatttaaagtttttgagcaaagtttgccgaacttagaatatctaaccatcaacggtatacctacaaaaataatacaagtggacgagttacaacgatgcgcggttcccctcttctataataatggctataaaagcaactctgtttatgaattggtggacgcagaagctctatttagttga

SEQ ID NO: 75980 - DNA, 348 bp, Saccharomyces pastorianus
atgacgttatcactcaatacaccacctggtgtccattgccaaccactgaagcaccaaagaataccacttctccagctccaactgaaaagccaaccgaaaagccaactgaaaagccaactgaaaagccaacccaacaaggttctagcactcaaactgttacctcctacactggtgccgctgttaaggctttgccagctgccggtgctttgttggctggtgctgccgctttattgttgtaatttactcaaccttttctttaatatatttttagaaaaatggttaagtacttttccgtcaatacagcttccacaaaatccttttatttcaattaataagatattctggtaa

SEQ ID NO: 75981 - DNA, 423 bp, Saccharomyces pastorianus
atgcaattctctaccgtcgcttctatcgctgctattgccgctgttgcctccgccgcttctaacattaccactgctactgtcacagaagaatctaccactttggtcactatcacttcttgtgaggaccacgtttgttctgaaacagtttccccagctttggtttccactgctaccgtcaccgtaaatgacgttatcactcaatacaccacctggtgtccattgccaaccactgaagcaccaaagaataccacttctccagctccaactgaaaagccaaccgaaaagccaactgaaaagccaactgaaaagccaacccaacaaggttctagcactcaaactgttacctcctacactggtgccgctgttaaggctttgccagctgccggtgctttgttggctggtgctgccgctttattgttgtaa

SEQ ID NO: 75982 - DNA, 2259 bp, Saccharomyces pastorianus
atgtctaataccgaggaattgatccaaaactcaataggttttctccagaaaacttttaaagcactcccagtttcgtttgactccattcgacatgaaccacttccatcttcaatgttgcatgcaagtattctcaattttgaatgggaaccgctcgaaaaaaatatttcggcaattcatgatagagattctttgattgacattatacttaaaagattcattatagattcaatgacaaatgctattgaagacgaagaagaaaataatcttgaaaaagggttactaaattcgtgtataggtctcgattttgtgtataactcaagatttaatagatctaatccagctagctggggaaatacctttttcgagttattttccaccatcattgatttgctaaactcaccatctacgtttttgaagttttggccctatgctgaatcacgtatcgaatggttcaaaatgaatacatctgttgagccagtatcattgggggagagcaatttgattagttacaaacagcctttatacgaaaagctgcgccactggaacgatattttagctaaattagagaataatgacatccttaataccgtcaaacattataatatgaaatacaaactagagaactttttatccgagctactacctataaatgaagaatcgaacttcaatagatccgcttctatttcagctttacaagaatctgataacgaatggaacagatcagcacgtgaacgagaaagcaaccgcagttccgacgttatatttgctgcagattataacttcgtgttttatcatctaattatttgcccgatcgaatttgcttttagcgatttagaatataaaaatgatgtggacagatcattaagtccccttcttgatgcaatcttggaaatcgaagagaacttttacagcaaaatcaagatgaacaataggactagatattccttagaggaagctctgaacactgagtattacgcgaattacgatgttatgacccctaaattacccgtgtatatgaagcattcaaacgcaatgaaaatggacaggaatgaattttgggcgaatctacagaatattaaagaatcagatgactacactcttcgacctaccattatggatatctctttgagcaatacgacctgcctttataaacaattgactcaagaggacgatgattactaccgcaaacagttcattttacaactatgtttcacaacaaatcttatacgcaatttaatttcttctgatgaaacgaggaatttctataaaagctgctatttgagggaaaacccgttgagcgatattgattttgagaaccttgatgaagttaaccaaaagcgtgggctcaatctatgttcatacatttgcgacaatcgtgttttgaaattttataaaattaaagaccctgacttttatcgtgttatccgcaaattaatgtcttctgacgaaaagtttacaaccgccaagatcgatggctttaaagaattccaaaacttcagaatatctaaggagaagataccgccacccgcttttgacgaaacttttaaaaagtttacattcatcaagatggggaataaattgattaataatgtttggaaaatacctactggtctagataaaattgagcaagaagtgaagaagcctgaaggtgtctatgaagcagcccaagcgaaatgggaatcaaaaatttcttctgaaacttccggtggagaagcgaaagatgaaataatcagacaatggcaaactttacggtttctaagatcgcgatacttgttcgattttgataaagttaacgaaaagactggtgttgatggtttgttcgaggaacccagaaaagtggaagcgttggatgatagtttcaaagagaaacttttgtacaaaatcaatcaagagcacaggaaaaaacttcaggatgctagggagtacaagattggaaaggaaagaaagaagagggcactggaagaagaggcttcgtttcctgaaagagagcaaaaaattaagtcgcaacgtataaacagcgcttctcaaacagaaggagatgagttgaagagcgaacagacgcaaccaaagggagaaatatcagaagagaataccaaaataaaaagctcggaagtttcttcgcaagatcctgacagtggtgttgccggggagtttgctccacagaatacaacagctcaactagaaaatccaaaaacagaagataacaatgcagctacttcgaacatttctaatggttcatctacccaagatatgaaataa

SEQ ID NO: 75983 - DNA, 666 bp, Saccharomyces pastorianus
atgctaccgaccccttatgtaaaatgcgattacgataaagtatatgagcctgctgaggatagcttcctcatactggactgtttggaaaaagagcatgattttttgaaacagaaatttggtaatcgtttggccatcgtttgcgaaattggttcgggatcaggtatcgtcacaacatttctaatgcaaaacaaaataataccgcaggaaaattccatccacttagctgttgatatcaacccatgggcgctcgaagcaactttggatactgcgaagttaaattcatgtaaaagttcttttttagaagtgattcaagctgatttaaactccagtattcggaataatcaggttgatgtcctaatatttaacccaccatatgtgccagcagaatgtgtgccagatgtcccaggatcaagagaggaggcagaccaatggctagatttagcgttattgggtggaaaagacgggatggcgattactgataaactgctacgacaattagaacaaattctttctccagatggtgttgcatatatattattttgtgcaagaaataagcctaaagaagtcattaagaggtttgtcgatacttacaaatggaatgtgaaacttattgaaacgagaaaagcgggatgggaagtcctcagtgtgtacagctttacaaggtga

SEQ ID NO: 75984 - DNA, 1128 bp, Saccharomyces pastorianus
atgctcagatatcatatgcaaggttttagtgggtacggtgtccagtattctccctttttcgataacaggctcgcggtagctgctggttcaaactttggcctggttgggaatggaaaattgttcatccttgagattgatcgttcaggtagaatagtggaagttaattcctttttaacacaggattgtttatttgatcttgcatggaacgaaagtcatgaaaaccaagtgttggttgcacagggcgatggtacattacgcttgtttgatacaacctttaaagagtttcctattgctatatttaaagagcatgaacgagaagtattcagttgtaattggaacttagtcaacaggcagaatttcttaagtagttcatgggatggatctataaaaatatggtcccctctaagaaagcaaagtttaatgacccttactccacgacctttagagattaccaaaatggtggatccattaaacgccattatattgaaaaagaaaagctttacaggtatttcaaaaaacaggaactgtgtataccaagcacagttctcgccccacgaccaaaatctcgtattatcctgttcagggaattcttatgcaagcttatttgacattagactaccttccggcaaaaatcagaataattttttagtgcattcaggactagaagcattgacttgcgatttcaacaaatacagaccttatgtagttgccacaggaggtgtagataatgccattagaatctgggacattaggatgctaaataaaaatgaatcagcgactatcaagaggactgtgcccggccaacttcacaattcatcatgcatcaatgaaatccctaatgcgcacgggctggcaatcagaaaagttacctggtcccctcatcattccaatattttaatgtcagcttcatatgatatgacctgtcgaatatggagagatctcagcaacgatggtgcaaaagaaacatataaaactaactctacggatgctactaaaggttccattttcaatttcacacagcattcagaattcgtatttggagctgactggagcttgtggggaaagccaggatatgtggcttcaactgcatgggatggaaatttatttgtatggaacggcttaggttga

SEQ ID NO: 75985 - DNA, 1833 bp, Saccharomyces pastorianus
atgagtgaaagtggtcaagaacaagacagaggcacaaatacatcaccaaataatgctgaaaataataataattcaaatgcagcttccggtccactcaatggcggtgctgagcaaacaagaaacataaccgtttccattcagtattcctatttcactccggagagattagcacatttgagcaatatatctaataatgataataacgaaaacaacagcgcagcatccggtagcacgattgccaacggtactgggcccagctttggcatcggaaatgggggccatcaacccgacggtgctcttgttttatcttttcgtgatgttcctgcgtctactccacaagaccgtttgaacagcttcatatctgttgctgctcagcttgcaatggagagattcaacagactattaaatagaccaaaaggaatatcaaaggatgagtttgataagctccccgttctgcaagtttctgatctacccaaggccgaagggcccttatgtagtatatgttatgacgaatatgaagatgaagttgattcaactaaagcaaaaagaaaaagggattctgaaaatgaggaggaatctgaaggaacaaaaaaaaggaaggataatgaaggtgcgcccctacgcacaaccgccgataatgacagtaacccatcgattacaaatgctacggttgttgaaccgccttctattcctctcactgaacaacaacgcactctcaatgatgaagaaacaaatccaagctacaaacactcaccaatcaagttaccttgtggccacatttttgggagggaatgtatctacaaatggtcaagattagaaaattcttgtcccctttgtagacaaaagatcagcgaatctgtaggtgttcaacgtgcagcccaacaagatacggatgaagtagcagctaacgaagctgcttttgaacgtattagacgagttttatacgacccaactgcagtgaatagcactaacgaaaatagttccgccccatccgaaaacacgtccaatacaacggttcccactatcggaaatgcaagttctggcgaacagatgttatcaagaacaggcttttttttagtgcctcaaaacggccaacctttacacaatccagtccgtttaccgcctaatgatagcgatagaaacggtgtcaacgggccgagctcaactactcaaaatccaccctctaattctggtggttcgaataacaatcaaagtccgcgctgggttcccatccctttgactttgttccaattccacagtccaaatccgaatccttccgcttctgattcttcggcaagcccatcagcagcgaacggtccaaactcaaataacactagtagtgacgctacagaccctcaccacaacagactaagagccgttttggatcacatattcaacgttgctcagaggggaacttctgatacctctgcaacaacagcacccggagcacaaactgttcacaaccaaggacgtaatgactcatcgtcctctgatacaacgcaaggaagttcctttttggaaaatatttcacgattaacaggccattttacgaatggctcaagagacaacaataacgacaataaccatagcaatgatcaacaacgaggtggaagtactggtgagaacaacagaaataacttgttttcctccggtgttgccagttatagaaatcaaaatggtgatgttactaccgtcgaactacgcaacaacaattctgctgcctttcctcctacagacgaaaatccctctcaaggccaaggttcaagcagttcggacaccaccattcataacgacgtccctaatgataacaatgagcaacgatcatcacaataa

SEQ ID NO: 75986 - DNA, 1791 bp, Saccharomyces pastorianus
atgaaattatctgtcctcacatttgtcgtagatgcattacttgtctgcagctcaatagtagatgccgatgttacagattttccatccttaccaagtaatgaagactatgtcaaaatgaattttcagaagaaatacggcagttcatttgaaaacgctttggatgatacaaaaggtagaacgcgtttaatgacaagagatgatgattacgagctggtggaactgactaatcaaaacagtttttattcggtggaattagatattggcacccctcctcaaaaagttactgtgcttgtcgacactggttcttctgatctatgggtcacgggttcagacaatccatactgttccactaaaaagaaggataccactggctcatcctttaaacaagtaaacaaggatgctttggctagcgtggttgagagtgtgtttactgaaattagctacgacaccactatagttaccagcgaagccactgctacttttgatagtacagcttctacatcacagttaattgactgcgctacatacgggacatttaatacctctaagtcgtctacattcaactccaataatacagaattttcgatcgcctatggtgatacgacttttgcatctggtacctggggccatgatcaattgagcttgaacgatttgaacattacgggtttatcatttgctgtagcaaacgaaacaaactcaacagttggtgtcttgggtattggtttgcctggcttggagtcaacttattctggtgtttctctcagctctgtacaaaaaagctacacttacaataactttccgatggtgctaaagaattcgggtgtaataaaatcaacagcttattcttttttcgcaaatgattctgattcgaaacatggtaccattttgtttggcgctgtggatcatggaaaatatgcgggcgacctatacacaattcccatcattaatactttgcagcatcgcggctacaaggatccaattcaattccaagtcaccttacaaggattaggtacgtcgaaaggggataaagaagataatctgacaaccctaaccactacaaagatcccagtcctgctagattcaggtacgaccatatcgtatatgccaactgagctggtaaaaatgcttgccgaccaggtcggagctacttactcttctgcatatggttactacataatggattgtatcaaagagatggaagaagagagtagcatcatctttgattttggtggattctatctttctaattggttaagcgattttcagctagtcacagatagtcgttcaaacatttgtatactaggtattgcaccgcagtcagatccgaccattattttgggtgataacttcttagctaatacttacgtggtatatgatctggacaatatggagatatcaatggctcaggctaacttcagcgacgacggtgaatacattgagattatagagagcgcggttccaagtgctcttaaagcacctggttactcaagcacttggtctatatatgaaagtattgtctccggcggcaacatgttttccacggcagctaactccagtatatcgtactttgcttccacatctcattcggcaacaagttcttccagctccaaaggccaaaaaacccaaacaagtacgacagctctctctatttcaaaatctacctcaagtacttcctcaacaggaatgttatctcccacctcaagttcatctacgagaaaagaaaacggaggacacaatctgaatcctccatttttcgccaggttcattacagcaatttttcatcacatttga

SEQ ID NO: 75987 - DNA, 2130 bp, Saccharomyces pastorianus
atggatacatcaaactcttggtttgatgcctcaaaagtacaaagtcaaaattttgacctacaaaccaactcttattactcaaatgctagaggcagtgacccttcgagttatgcaatagaaggcgaatataaaacactagcaacagatgatttaggcaatatattgaacctaaactatggtgaaaccaacgaagttataatgaatgaaataaatgacttaaaccttccgctgggaccactttctgatgaaaaatctgtcaaggtttctactttctccgagttaataggaaatgattggcaaagtatgaactttgacttagaaaataattcaagagaagtgactctaaatgcaactagcttgttgaatgaaaatagattaaatcaagacagtggtatgactgtttatcaaaaaacaatgagtgataagccccgcgatgaaaagaagatttccatggcggataatttattgtcgattataaacaaaagtgaaattaataaaggcttcgatagaaacctcggggaattactgttacagcaacaacaagagttgcgcgagcaattgagagcacaacaagaggctaataagaagttagagttagaactcaaacaaacacaatacaagcaacaacaactacaggctaccttagagaactctgatggtccacagtttttatctcccaaaaggaagatctcccccgcttcagaaaatgtggaggatgtatacgcaaatagcctttcaccaatgatttccccaccaatgtctaatacttcgttcactgggtcaccttctaggagaaacaatagacaaaagtactgcctgcagagaaaaaactctagtggtactgtaggaccactatgtttccaggaattgaacgaaggtttcaatgactccctcatttcaccaaagaaaattcgctcgaatccaaatgaaaacctcagttcaaaaaccaaatttattacgcccttcactccaaagagtagagttagttcagctacgtccaactctgctaacattacccctaataacttaaggttagatttcaagattaatgttgaagatcaggaaagcgaatattcagaaaaacctttgggcctgggtattgaacttcttggaaaaccaggtccttctcctacaaaatcagtgtctttaaagagtgcttctgtggatattatgcctacaattcctgggtctgtaaataatactccatcagtcaataaagtatccctttcctccagttatatagaccaatatacaccaagaggtaagcagttacactttagctctatcagtgagaatgcattgggtatcaatgctgcgacaccacatctaaagccgccgagccagcaagcacgacatcgggaaggcgttttcaatgatttagaccctaatgtacttacgaaaaatacagacaatgaaggagatgataatgaggaaaatgagcctgaaagtagatttgttatttccgaaacgccttctcccattcttaagtcacaaagtaagtacgaaggaagatctcctcaattcggcacacacattaaggaaatcaacacatataccacaaatagtccctcaaaaatcacaagaaaactcacaacactgcccagaggttcaatcgataaatatgtgaaggaaatgcctgataaaacatttgaatgtttatttcctggatgtacaaaaacattcaagagaaggtataacatcagatctcatattcaaacacatttggaagatcggccatattcctgtgatcaccctggatgtgataaggcatttgtacgaaatcatgacttgataagacacaaaaaatcgcaccaagaaaaggcgtatgcatgtccctgtggtaagaaattcaatagagaagacgctttggttgtgcacagaagtagaatgatttgcagcggtggtaaaaagtatgaaaacgtggtaattaaaaggtctccaagaaaaagaggaagacccagaaaagatggaacttcaagtgtttctagtagtccaatcaaagaaaatattaacaaggatcataatggacagttgatgttcaagcttgaagatcaactcagaagagagcgtagttatgatgggaatggaacggggattatggtttcgccaatgaaaactaatcaaaggtaa

SEQ ID NO: 75988 - DNA, 1605 bp, Saccharomyces pastorianus
atgtacaccaattattcacttacaagcagtgacgcaatgccccgaacttacttggtcggcacagcctcaccagaaatgtctaagaaaaagcgccagtctgcaaattgtgacaagccaacgaggagggtgatccacatcatcgatactaatgagcactcagaagtcgacttgaaaaatgaactgccaataacatgcacgaatgaagacggtgagatgacatcaagctcatggacttcacaaaccgctaatgattttctcaagctggcatacgtaaacgcgaaattagacccgtctttgccatctcaatatttcaaacaagatatcataaatgttttacaaagcttggagattcctggatggtctgtgcccggctctaaagaatcctcgttgaataagaatttattaactttgacacgaatcaagggggcccttacaaatgttatttataagattcactatccaaacttaccccctttactgatgagaatttttggtgatagcatagattctgtaattgatagagagtatgaattaaaggttattgcgagattatcattttatgatttaggacccaaactagaagggttttttgaaaatggcagatttgaaaaatacattgagggttcgaggacatctactcaagccgactttatagatcgggatacttcaataaaaattgctaaaaaattgaaagagttgcattgtactgttccattaacgcataaagaaataacggatcaaccgtcatgctggacaacctttgatcagtggatcaaattaatagactcgcataaagagtgggtttccaataatgtaaatataagtgaaaatttacgctgttcaagttggaatttttttttaaagagtttcaaaaattataagcgttggttgtataatgattctgcttttacctcaaaattattaagagaggatgataaagatagtatgataaattctgggctaaaaatggtattttgccataacgacttacagcatggtaatttactttttaaaagtaagggtaaggatgacatctcagtgggcgatttaacaattattgactttgagtacgcaggccctaaccccgttgtatttgatttatcaaatcatttgaatgaatggatgcaagactataatgatgtgcagtctttcaagtctcatattgataagtatccaaaagaagaagatattttagtttttgcacaaagttatataaatcacatgaatgagaaccatgtcaaaattgcttctcaagaggttaggattctttacaatctaatcatcgaatggaggccttgtacacaattattctggtgcctttgggctcttttgcaaagcggaaggctaccacaacgaccactgatagaaggtgaaaaactaatgagcgaaaaggctggactaggtgatgaaacgcaccttatggagcacaaaaataaagagaatggaaaatacgattgttctgaagatgattcgttcaactatttaggattttgtaaagaaaaaatgactgtcttttggggcgatttaattacattgggagttatcgacaaagactgcccagatattggaaaaacagattacttagacactaaacttattttttaa

SEQ ID NO: 75989 - DNA, 1410 bp, Saccharomyces pastorianus
atgctttccagagcgacgcgtactgcagctgccaaatccttagtaaaatctaaagtggctagaaatgttatggctgcttctttcgtcaagagacatgcttctacaagtttgttcaaacaagctaacaaggtcgaatccttaggttcaatatatttatccggcaagaaaatttcagttgcggcgaatccgttctccataactagcaatcgttttaaatctacctctattgaagttcctccgatggcagagtccctgactgaaggctctttaaaggaatatactaaaaacgttggtgattttattaaggaggacgagctgttggccactattgagaccgataaaattgatattgaggtcaattcgccagtatcaggtactgttacgaagctaaatttcaaaccagaggacactgtcactgttggtgaggagttagctcaggtcgagcctggtgaagcacctgctgagggttctggagaatctaagccagagcctaccgaacaagcggagccatcgcaaggtgtcgccgcaagggaaaactcaagtgaggaaacggcttcaaagaaagaagctgctccaaagaaagaagccgctccaaagaaagaagccgctccaaagaaagaagttacagaaccaaaaaaggctgatcaaccaaagaagaccatctctaaggcgcaggaacccccagtagcctctaactctttcacaccatttccacgtacagaaaccagggtcaaaatgaaccgtatgagattgaggattgccgaaagattaaaagagtctcaaaacactgctgcttccttaaccacattcaacgaagttgacatgtcagctttgatggaaatgaggaaactgtataaagatgagattattaagaagaccggtactaaattcggattcatgggtcttttctccaaagcatgtaccttggccgccaaggatattccagccgtcaatggtgccattgaaggtgaccagattgtttatcgtgattacacagatatttctgttgctgtcgccactccaaagggtttggttaccccagtcgttcgtaatgcagagtcattgagtgttttagatattgagaacgaaattgttcgcttgagtcataaagcgcgtgatggcaaattaaccctagaagatatgacgggtggtactttcaccatatctaatggtggtgtttttggttcattatacggtactcctatcatcaattcaccacaaacagccgtcctaggcttgcatggtgtcaaagagagacctgtcactgttaatggacaaattgtctcaagaccaatgatgtacttggctttgacttatgatcatagattgctagatggtagagaagctgttaccttcttgaagactgttaaagagttgattgaagaccctagaaaaatgttgttatggtga

SEQ ID NO: 75990 - DNA, 978 bp, Saccharomyces pastorianus
atgatgccgaatgttgctccaaacagctactatttaaacataccgaatgccaattcgacctcaacgactacgtcctcgatcttttctgatctcaacaaggagtacgagtcaaagattaaagaaatcgaagaatattatataaagacactgctcaatgaaaataccgataatgatgacagcagcagctccgaggggcataatataaatgaaacggacattttaagtgaatactcaccaaggccttctccttggttaccatccaaaccaaactgttatcatccgttgggagattttaaagacttgatcatatctgattccagacctacaaatacattacctattaataaccctttcgcaggcaataataacatctcaacacttgctacaactgagaaaaaacgtaagaaaaggtcactcgaagttgagattaaccctacttacacgacaagtgcattttcattacctctgacagcggagaatttacaaaaactatctcaggtggattctcagtctactggacttccatacacacttccaattcagaaaacaacaaaactggaaccttgtagaagggcacctttgcagcttcctcaattagtcaataagaccttatacaaaactgagctctgtgaatcttttactattaaaggctattgtaagtatggaaataaatgccaatttgctcatggtcttaatgaactgaaattcaagaaaaaatcaaacaattatagaactaaaccttgcataaattggtcgaagttaggctactgtccgtacggtaagcgttgctgtttcaaacacggtgatgataaggacgttgaaatatatcaaaatgctaacgatggaagaagtaaggatacggcgttgactccacttcctacttccctagccccaagcaacaacgataatatcactaatttgagtaagcctaggaacttacatactagtgttaaagcattgcaaaggatgacttggtag

SEQ ID NO: 75991 - DNA, 798 bp, Saccharomyces pastorianus
atggattataaggaagaacagaagcaggaactagaagttttagagtccatttatcctggtgaactgaggatcataaacgatgaatacccaaagattaaatttgaagtagccattaaattagagctggatacaggtgattctacttctgttttaaccaaagagcacactataatcgccgaattcaagttaccagaaaactaccctgacgaaccatgcctgatttcattggaagctcaagaagtagccctcaatgacaacgaagaagataacgaggaagatgaagacgaggttgaatatgacgaccatggtaataaagtactgaaaaagtttgaaaacctgccagatttaataagctttaaggggtacttgcctgaattaaccgtacaattagaatcgcaaatcgaaaccgatatgttattgggtatgcaaatgtgttttgcattgatttcatccataaaagaaagatgtgagcaatggtatagtgaacaattgaataagctcgagaagcagtacgagctggaagcacaagaacgtgaaaagaaggaacaggccaagttccatggtactaaagtcacaagagaatcgtacttggaatggaggtctaaatttcgccaagaactgaaactggatgaaagagaccaggtgagaaggatgaaggctcatcatgggaagctaaccggtaagcaaatgtttgaacaaggcgtggtgggcacaggcgacgagtatatggaagaggatgacgcgagtgtagatgacgtagccaagggacttgccaagaccgaaatagcaaatcaataa

SEQ ID NO: 75992 - DNA, 1236 bp, Saccharomyces pastorianus
atggactcattatcaaaaaagattcaaaatttaggtatccatgatattagaaatgccgcaaggtttgcccaaaacgtgatagttcaatatgagccttatcagatagatatccgtcgtgctacaaataccgatgcttggggccccacaccgaagcacctcgccaaggttttaaggaacagataccaagtgccgctctacttgatgacagaatacacgttgaaaagattagtcgaccatatcgctaccaggcccaagaacctatacgaaaaggcaagaaaggactacgttaattatgggtccgaatggagggtggtcttaaaatgtctagtagtcattgaattcctattattgaacgtcgacacaggtgacgaactgaatcagattagatcatgtttgctcactcataagcatattttaaccagggagattgcccaattcaaggtaaaattctccaatgatggtaaaatggagattcatgagagaggtattaggaaaaagggagaacttatcttgcaatacttggaagacccacaatttttgaaaaaggaaagagccaagaataagaagaatgccttgaaaattcgacagcaaggagaatcctccatttataatgccaaccagatttcaacctctgcaagttacgataacatcgacgacgatgaatttgatgcagatgcagatggctttgacagtgaaatggatgctaataatgtgaccaacttcaatgttcctgtggaaacagaagcaaattcgaatactcgcaggcgttctcatatggaagaacaaagaagacaaagaagggagatattaagagagcagatcaaaaataaagaacagcagaggaaaagaaagcaacaacaagatagcatccctgacttaatcgatcttgacgatagtactagcaccacgaataatataacaatagacaatggtaataatgacaacaaaaacaataatatcaacaacaatagtgatgatgatgatgatgagtttggcgacttccaaagcgaaacgagtcccgacacaacagcacctaaaacttccaatagtaaaatagatgatttgcttgactgggatggcccaaaatcagacacagataccaccgctgctgcgcaaacatcattgccctttgcggagaaaaaacagcaaaaagcccgtcctcaggctacaaaggacaagtcgaagggaaatgatgcattttccgacttattctcttactccaagtcgttggtctaa

SEQ ID NO: 75993 - DNA, 351 bp, Saccharomyces pastorianus
atgacaacttcaagaagcaccacgacagaccaggtttgtcgtccatggccaacgccggtccatactcctacggttctcaattcttcatcaccaccgttccatgcccatggttggacggtaagcatgttgtctttggtgaagttgttgacggttacgacatcgttaagaaggttgagtccttgggttctccttccggtgccaccaaggctagaattgttgttgccaagtccggtgaattataaccgctctgcctggaacaatacagcaaaaattgaaacgaactattctctcttaaattatatgtatatgtataaggtatgtgtatgtatgacaatcaattcttataactaa

SEQ ID NO: 75994 - DNA, 414 bp, Saccharomyces pastorianus
atgatgaaaggttctagaagaacaggtaataacactgctaccacgctaaacacgcctgtggtcattcatgccacgcagctgccccaacatgtctctactgacgaggttcttcaatttctggagagctttatcgatgagaaggagaacattattgatagtactaccatgaataccatcagcggcaacgccgctgacgcggacgctgccgctgtggctaacaccagcctcaacatcgacaccaacctttccagctccatatcgcaattaaagaggattcagagagacttcaagggtctgccacccgcccaagacttttccgccgcgcccattcaggtctccacgacggagaagaaggagacaagcataggtgtcagtgccaccggcggcaagaaaactacattcgccgatgagtga

SEQ ID NO: 75995 - DNA, 402 bp, Saccharomyces pastorianus
atgagtgagacctgtagcagcagccttgcccttttacacaaaatcctacatatccattcacatacgccttctgtatactacaatatatgcatatcagttagaatcctgacatctgagcgtcttcagtgttttttttctctttctttccagatccaaatatcaccggcagcggcctcaaagtacccggttttctttttttttcacactttttttttttccaaaccatgttgtcaagcattgattgactcattttcctctgactactaccagttcaaaatgttagagaaaaatagaaaagcagaaaaaataaataaaagaaccatatttatttgttcattcactttcgagtataaaattaaatcttgtctttcttgttttcacttaagtacacatacaaattaa

SEQ ID NO: 75996 - DNA, 1164 bp, Saccharomyces pastorianus
atgagtgaacttgaagccacaattaggcaagccaaagaagccctggctgaaaataatgccaaaaaggcgctcaaaatattgaagccgttcaaaagttcactgaaaaaagaaaacgcaagcaatgtaatactgaatgaagtgtttgccgatgcatacctggataatggacaggtagagaaagcctacccaattttagcgcgtgcttgcgaattagatcctgagggacaagttggcggaccggacaaattttttaccatgggtcaaatcatgggtggacaggatggtgtatcgataataactcgcggaataatgaacatctctaatactggaggtgaaatgttaaccaacgttcaggttgaaaagattgtaggtggactgctttctatgattgaaatttggatgacggatttatgcatggagccaaatgcagaagagcagtgtgaggagttaatacaaaaggcgatggaactcacagagggaaaatctcctgaaacatggtctaccctgggttctatcaaaatctcgcaacaaaaatttggagaagcttatgaagcattctcacaagcctggaatttctttgagttgaaaaaacaagaaattggtagcggtataaatgaaaatggtgacacaactcagaaagctggtttacagtcagagtatgtagatcttttacaacctcttttatctttaacaaagatgtgcctcgaagtgggagcttacgaagtcgcattgaaagttattgccgcagtaagagatatagatgaggataacatagagggttattatctagagggttttacttattatttaatgagtaaattagaaattttcaagttgaacaatcccgaagtaagcctgcgtccggaaaatatatacgagtttaaccaactcattcaagaagttcctttggatttatcccacgagccaatctcccagttaatctatgactcaagattagcgctaagtttcgcattgcaagcaggtatcaatgctgacagcaaagatgaaattgtgcaagaattattgggcggtgctaatgctttactccaagaaattggtggtcctctagatccaagtgagttaacacaaatcaagaagggtgatttagtgaatgagaatgaagacttggaagagttggacatagaggaagaatattctgactaa

SEQ ID NO: 75997 - DNA, 711 bp, Saccharomyces pastorianus
atggcaacgatggaaacgaccacacaaaaagataccaatattttgaaatctggtctcaaaaaaactataggtgttctcaatgaggcagtattacagaacgggagagaggtggaggcagtgcaggcaggaaatagtgacacaatggaagatacagaaacaaccacaataggttatatatcaatcaaagattatgcgtacgcagattcgaatcctctccattatggttattttgatggagacaatgaggaggatgaaatggtttcagattcttcaaatggagaagacacatacaataaaagacaaagtataacactaccagacgactacatagttaaccaacgtgctgttgccctctacgatttcgaacccgaaaatgataatgaattgagattggctgagggtgacatcgtatttatcagttacaagcatgggcaaggttggctagtagcagaaaatgagtcaggatcaaaaacagggttggtaccggaggagtttgtctcttatatacagccgcaagatggtgagaacgaggtggagaataaggctcgacctttctatttgacacatttgattacacagagcgttagtcctaaaaacaatattgataacactaacgaagatgaatacgacgacaacgatgaatgggaagatattgatgatgttgcggaggtcgaagcagatatgaaaacaaaattagatatatcggattga

SEQ ID NO: 75998 - DNA, 528 bp, Saccharomyces pastorianus
atgaccacatcacacagaccacagttagaagcaagaagcggtgcaaaagcggccgcttatacaccaacaggcatcgagcatgccagattactaccaggacatacaacattaaaatacaggaaatttaaagaggaggaaaatcttaaagcaaactgtgcgcaagaagataggagcaacgataaatctttagaggaggcagtagtgaacgaagagaaacaggatgttgtggggagtgggaacctccaagaaacccgcagtgagaaagaccaaaaagactcgttgcaagagctgctgattactcaaaaaaataaagtggaagataaagcagagcttgaaggaaatgaacaattaaagggtggaaattcgtctaggcgatcgtggagaaagggcacggcgtttggacgccataaagtaaccaaagagacaaatattaaggaacatgcaactaaaaaatcagcgtccggatacattaacgatatgaccaaatctgaatatcatcaagaatttctccataagcatgttagatag

SEQ ID NO: 75999 - DNA, 2175 bp, Saccharomyces pastorianus
atgtctgatttaattgaattacagaggaactatttgataggggttttgaatcagattgagacgaaaaataacttgaagtttcttattatcgataaaactgtggagacaatattaagttatcttttcctcacaccccaagaacttttaaataatgttacatctgttgatttgattgattccccaacaagaaaaggacaatcctccatcgaggcaatttacatattggaaccaacgaaatataacatcaattgtatcgatgctgacttcatggtaagaccacctaagtacagaagatgtcacatcagatttttaccaggattaacaaaccctatatttcagttttttcaatcaaaacgttacattgctcaaaatttggagtcatttaagccgatcgaactagggtttttcgtcaaagaatctcaattcttcgaaactttacaaatggaacactcattacaggtttttttcaacaacaactgtaaggctttgattcctactaacgtgaggaagattgtaggctcactggttagtttgtgtgttattacgggggaatatccgattgttagatattctgtatctaatcctgtggaagaggaagatgcccgcaatggaaacgccgtagtcaacgcaaattctttaacaaggtctattgcaaacgctttccaaatagcgatagatacatacgctcgcaataatccagatttccctcctcaaaacactgaaagaccgcgttccattctaataatcaccgatagaacactggacccttttgcgccaatattacatgattttagctatcaagcaatggcttatgacctggtagctaatgtggacacacaaaaagatatatatcattattctgccgagaatgaagctggtgagcaagaggaaaaggtttcaaaattggtagatttgtatgatcctgactggattgatttgaaacatcagcatattatggatgccaacgaatatattcaaggaagaatcaaggaactgattgctaaaaaccctctgctggttgatagatcgaacgtaaagaatactaccgatctgctgagtgtcgtagcgcacctgaaagattttgatgaagaaagaagaaggctgattttgcataagacactggtagatgaatgcctaggagagaacgcggaaagaaaattagcggatatttctgctattgaacaaaacctatccggatttggaatggattttagtggtgagaagataaagcatattatcgatgatctcttaccagcgttagcaatgaaggaaccgacaatcttagataaattgcgttacattattgcgtatgctcttttcagaggtggaattatcgagttagacttcattaagttattgaactttataggagttactcatgaacatgaaaatttccagcaatatttaaaaatattcagaaattacgatttaattgatttcaaattgatcaaagacaaaccgaaggataaaccatttcaaaaggaatggtttcatgatactttagtgaatgatccaaatatctatcacacttcaaggttcgttcccgctgtagggaatattctttcaaaggttatagcgaatccattgttattgagcgaacaatacttcccatatttaaaggacaagccaattgagttattgaatgaagaagaattccaagcaggcttagcgaatacctctgctaactcctcctcatccttaaggaatccccgtcacaaggcagcttggaccacgaaaagctctaatataaaaaaaaacatacctagacaaagattcttctactatgttattggtggtatatcaatccccgaaattaaagctgcttatgatcaatcaaacttgaagaacagagatatctttattggcagcgacgagatattaacaccaacaaaattcttagatgaagtggaacgtttacaaaatcctagagaatttttcaaattcaaggaagatcagcgccagcaagtaaacccgcctgatttccttctaagggaaatgaaaccggtggcacaaccagtctctcatgttcatttaaaaagccaagacaatagtcctaagtctggtacttctagtcccaaagcagcaggttccctcaagtcagaaccacccgaaaaagagaagaaacgtagcaaattctcgaggttcttgaaaagaaaatctcaccatgataaatga

SEQ ID NO: 76000 - DNA, 2916 bp, Saccharomyces pastorianus
atggataggtttcaaattggcgacgagcaactacttcgtttttatcagttgaagactattaatccgacccattcctgggcccaagattcctcaaaattgaataatgaagaggctacaagcaatgaacttggcgttgaaacgtcattcgacatattaaaagacttcaaatatggcaatcaaattagcattgacaaggaatcgagagcatatttaaacgatgagtcgttaagttatattagagatcccttgaatggacaagaaatgtctaaagaattgcaacatctaccaaatgattcaatgcggttgaactatcttgtcaacagtaaacaattcaacgtcaaagcctttctgagagatatgcacaaacaagactctttcaatgatctaaataactcactggacaggttggacagtgatatacaagaccaatctatacatttgaaacaattggttggtaaaaatttcaccaagtatgttaagattaaaaacaagttagaccaaatttacaaagaatttgacgagaaaacgaatgaaaaaaaccaatgtgattcaccaaaagaaaatcaaataaatgtggaaagcttaaataaaaaggtcgacgaggttattagaacgacaactttcaaactgaaaccgctaatggataactatcagaaaattttgaattaccaggccaccaaaaaatttattgaactgaataagttttacttcaacctacccaaatctttaaagagatgtttgactaacaacgatttcaatgagttcattatcgaatattcaaaaggtcttacgctccgtcgccgtttcaaccagagttcagatgcttcacaatctcttgttataaaaagaatttggactcaaatagaaaatttattagtcacgtataaagatctgatttggaacagtttaataaattcaaattttaacattgaccaaccccaagaaacaattttgtccctcttttcaaaattgttgaacttagaaaactttatcaataataatcaaagagaaagtgaaagtggtaacaagaacacaacttcatcatccaatgaaaatccaatcctaagatggatgtccatcaaaatgaatggctttcagaatgaactgaacgagttgtctggccatatgattagtaaaatcattcattctcaaaggcttatattacaaaacaatactaatcaagataaaagtcaagggtgcgtggagctgtcgtattatttgaaaatcaatcaattattccaaataataagtgatacgggcaaggatagtgaaggtttgaaaagtaccgttgaacccaataaagttaacaccatttctggaaccagctatctaaatttgaattgccaacccagctctcaaggactaactgattccccaactatcattgaaatgtggctattaatcttaaaatatattaacgacctgtggaaaatttgtgatcaatttatagaattctgggaacacattgaaaagttcctcgatgggacttaccaaaattccattataaatgaaaaaagaaaagaaaacattttgatcggtgattctaatattattgaatcataccaaaaaagcctgatcttgaaggaagagcagattaacgaggttaggttaaagggtgaggaattcatcacttcagtctcacaaaatttaatatcatttttcacatcttctcaatcatctctaccatcatcattgaagaattctactggagatattacccgcagtaataaagattcggggtcacctttggattatggatttatacctcctaattgtaatggattgagttgtttaagatatctaccgaaaattgtggagcccattttgaaattctctaccgagttagcgcaattaaatatcacaactaacggaatcaccatttgcaggaacactctatcaactataatcaatcgttgcgtaggtgccatatcttccacgaaattaagagatatatctaacttttatcagctggagaactggcaggtctatgaaacggttacattttcaagcaaatcacaggacagtagtaaaaatctaactttcgaatatggtgtgacacaatttccggaaattgtcacctcgtttcaagaagtgagtatcaaaactactagagatctattattcgcatatgaaaaattaccaatcattaacggaatttcagtagtaagttatccgccaaaacaactgctcacaggtatagaaattcaacagattatatcgatggaagctgtattggaagcgatcttaaaaaatgcggcaaaggataaggacaacccaagaaattctcataccatcttaacattaacaaatctacaatattttagagaatgtgcattcccaaatattttgcagtattttgatgacgcattcgagtggaatttggcttccaaaaacttagaattatttagcctactatctaagatggaatcttcaattttcggtaactatctttctgacttaaagatcaacttaagggatactcttgaagaaaaattccacgaaataaattggcccatgtatacatcaaattcattcagggttggtgactatattatagaagcgttaatgattctgatcgtggttcacagtgagtgctttagaattgggcctcagctcatccataagattttaattgaaacgcagatttttatagccagatacctctttgaggcatttaagccttatgttggtaatctttctaatgatggctcattacaaattatagtggatttggaattctttcagaaggttatgggtcctttacttgaaaaggacaccgaggccacattaagggcatgcttacaaaactgtttccagaacgacacaaatagactacaaaaatgtatcaatgagattaatcctattgtatctgccaatttaaaaagaactgctattcaattcgccgccttcagctag

SEQ ID NO: 76001 - DNA, 621 bp, Saccharomyces pastorianus
atggattttgaggaagattacgatgcggagtttgatgataatcaagaaggacaattagaaacaccttttccatcggttgcgggagccgatgatggggacaatgataatgatgactctgtcgcagaaaacatgaagaagaagcaaaagagagaggctatagtggatgatgggagtgaaaatgcatttggtatacccgaatttacaagaaaagataagactctggaggagattctagagatgatggacagtactcctcctatcattcccgatgcagtaatagactactatttaaccaaaaacgggtttaacgtagcagatttacgagtgaaacgacttttagcacttgctactcagaaatttgttagtgatatagctaaggatgcctacgaatattccaggatcaggtcttccgtagcggtatctaatgctaacaacagtcaggcgagagctaggcagctattgcaaggacagcaacagcctggcgtgcagcagatttcacaacaacaacatcaacagaatgagaagactacagcaagcaaagttgttctgacggtgaacgatctcagtagcgctgttgctgaatacgggctcaatataggtcgcccagacttttatcgttag

SEQ ID NO: 76002 - DNA, 1542 bp, Saccharomyces pastorianus
atgtcagaaaaccaaaaggaggtatcgcctcctcaagccatatcggtcaaatccgaggcaagctctaatatattttccaaacctatctccacatcatcacccgctgggttagcagccgctcaaagagttacgcccgggaaactgtccactttattactagaaaagggaccattggccattagacacattacacagaccttatgcctagatattccctgttttaaagatttatcatcttccaagcaaagacgacttataatgagtgctatggaaagtggtgataaagaaaaatcagtggtatttgaaaaaattggatggggtcaatggtccgcgaaaagagtagaccctgccaactttgataaggagctggaagcgaccaattttgcaaatgcaaaggtgaaagacttgatttctcaagagagtcaaagaaggaaaagcaacaattcaaattctaattcaggcggcaaagttgaaatgcctatgaaagttgagcataacatcacgaatatcgatggagccaccaccccgcctaccgctgttgcttccaccaccattcctgttaatatcaaacgcagcaaatctccacttgcagcagcaaacgtagtatatatagatgaaaatgcgctagcatcggaggatgaggatgaggagtttgatgaagatgaccatcatttacattaccaaaacaaatcgaggaacagcagtaataattttggaaaatcttcaaatggtgatccctatagtttcggcaggagaaggtctcaagttgtgttcgccgattcaactcccgagaatattgagcatgaaataatagcacaaaagattagaccgctattaagaaatagacgccgttcgagcataaaaccacatacacctttcatttccaaactaaacacacaccaagattcatcctacctttcccccaatacaacctcaacgacaaccccatcaaataacaacagtaactcaaaccaggcgaagatagatttagagaaacttactgcgacaagtgagccaacttcaagaagagcttctcgtctgtctgtatcgaaaaaatcaagtattagatcgacacttttcccaaacaaaaactatttgatcgtcactacaaaccctaactctaaagctacgtcggtttccacctcccctaagctagaagaacagatgaatgtaagttcaaatccgatagtattatcggacaaggagaaacatagagtagcttcacaacacctgaatggggaatcgtcgccacaacttgttccccattctcatcatcaacctcactcagatacagacgaagaagactgggaatcaattggtgcagcttctctgagaaataacagtttagcacctaacatagacagcgtagcaagttctactaatggcgtagttagccctaaacctacaaatccaagttttactaactctcagaatggagatattgagcctcccctacaacacgaccaacagaaacatgaacagcagccaagaaatggggaagacaatagtgctgcgtttttattaatgagcttaaaatcttaa

SEQ ID NO: 76003 - DNA, 1128 bp, Saccharomyces pastorianus
atgagtttttatcaaccatccctatctctttatgacgttttgaacgcattatccaaccaaactggccagagagggcagcaaggatatcctcgccaaccacaaaggccacagagataccatccccattatggacaagtgcacgttggcgggcatcatcctcgtcatcatccattgtatagcagatacaatggtgttcctaatacctattactaccagttccctggacaagcctattactatagtcctgaatacggttatgatgacgaggatggtgaagaagaggaccaagacgaagatatggtgggtgacagcggcactacaagacaggaagatggtggcgaggacagcaactcgagaagatatccatcatattaccattgtaatactgccaggaataataggaccaaccaacaggcaaacagtttaaacgacttattaaccgcgttaataggtgttccaccatatgaaggtactgaaccagaaattgaagcaaataccgagcaggagggcgaaaagggagaagaaaaggataagaaggataagtctgaagcacccaaagaggaagctggcgaaaccaacaaagaaaaacctttgaatcagccggaggaatcgtcgagaccaccattagccaaaaaatcttcatcgttcgctcacctacaagcgccttccccaatacctgacccgttacaagtatccaagcctgaaacgagaatggacttaccattttcaccagaagtgaatgtctatgataccgaggacacttacgtagttgttcttgcgttaccaggtgctaactctagggctttccacattgattaccatccatcttctcatgagatgctcatcaagggtaagatcgaagacagagtgggcattgatgaaaaattcttgaagatcacggaactaaaatatggtgcgtttgagagaaccgttaaattccccgtgctgccacgcattaaggacgaagaaattaaagctacttacaacaacggtctactacaaattaaggtgcctaaaattgtcaatgacactgaaaagccgaagccaaaaaagaggatcgccattgaggaaatacccgacgaagaattggagtttgaagaaaatcccaaccctacggtagaaaattaa

SEQ ID NO: 76004 - DNA, 741 bp, Saccharomyces pastorianus
atgactacagatccttctgtcaaattgaagtccgccaaagactccctcgtctcctccctcttcgagttatcaaaagctgctaatcagacagcctcctctattgttgatttctacaatgccatcggcgacgatgaagaagagaagatagaggctttcaccactttgactgagtctttgcaaacattgacttctggtgtaaaccacttgcacggcatcagctcggagctggttaaccctattgatgatgataaagatgctattatcgctgctccagtcaaggctgtaagaagaaagatcgaacgtgatccaaatgctccaaagaagccactgactgttttctttgcttactctgcgtacgttcgtcaagaacttcgtgaagacagacaaaaggctggcttgccacctttatcgtcaactgagattactcaagaaatctccaagaaatggaaggaattgagtgataacgaaaaagaaaaatggaagcaggcttacaacgtcgagttggagaattaccaaagagagaaatccaaatacttagaagcaaagaaaaacggtaccctaccaccagcttccttggaaaacggtccaactcatgcgccggttccaattcctttcagtttacagcacgccgctgaacctcctgtggaaaagagacctcacgatgatgatggatcttcggaaaagaagaagaagaagaagaagaaggataagaagaaggacaaatccaactcttctatttga

SEQ ID NO: 76005 - DNA, 960 bp, Saccharomyces pastorianus
atgaaagtaccattggggttatggaaagtctctcggggcaatttgtggagcacccagagaagggttttgacaatgtctagatgtttgaacagtgatgctggtaatgaagctaaaactgtgagagaaggaccagctttttcagcagatctctatatgcatcccgaaaaatggaagggtttacctcctcaaagaattttagagttatattgggagagaatggctagattgggttcagagtataaacctaacaaagacgaactgaatgccttattaaccacttctgagtactcaaatgtacctgttaacgatattaaaaagctatatcacagaggagaacaaggcgctattgatataaaaggtggaaacgtgaatcgcgataacagtcttagaccgtttatgtttgatgaattgccatcgcaagctcaggaattggttgcccaacatcgtgaacaaaggttctataatcgattagccgcatatgagttaccgctattagctcaatatcgccaggaatacaagagaccatctccagaaagtcatccggtcacttatagatacactagttatgttggcgaagagcatcctaattcgaggaaggttgtattaagcgttaaaaccaaggaattgggcctggaggaaaaatcattacataagttcagaatattagccaggtcgcgttatgatcatactacagatatttttaaaatgtctagtgacaaatttgagcatgcatcacaaaatgcacgttatttgcatgatattcttcaaaggctgttagcggagtcaaaagatttgacggaggacgattttagcgatgttccccttgacacaaggcatactatagctaagagtttacgtaaaaagaagcgggattatgagtttcctgaacactggaaacgccctgaagatgcaccaaagaagaaatttgatattgtagatcaattattgagcactctttaa

SEQ ID NO: 76006 - DNA, 489 bp, Saccharomyces pastorianus
atggtaatgagggaagaaacaataaaatcgctagaagatccttacaaatatcactacaaagaagaatggttaaatactaaagatcccgatgaacaacaattattcgaaatatttgcctttggaaacattaaagatctaccggaaaacataatcctaacatcattaatgcgatcaaaactggagaaattaacattggtaacattaagcgaaatatataatgagttaagttacgagttaattaaagaagaatgtcaaattgaagacgatggtatcatcgaaagccatttaattcagctacagaatatttttaaagcagagatggattcagtcagtaaatctatgaaattttcaagaagatttgactgtagagatgtgtactgtcatgaaaaggaactgactataattgaaaatccgcgagtgacgaaagagtatttagttcaaaatcttcggagctgggaaacaaagctcaaacagaatatattggagtaa

SEQ ID NO: 76007 - DNA, 1446 bp, Saccharomyces pastorianus
atgggtatttttcaatcaatagaagaagcaaataatacttctgagagattgctgaggtctgagattaaaaatagtcatggagaatttgaaaaattcgattttgatacagaagaatacgaaattaaccctaaaaggaagttaagattagtcagcaggataaacccaaatgctggacatctaaggaaatctaagtcctgctttactgtagatgagcatgttgacgaaacgcgttgtcagaaacctgtgatgaagtcgccgttcatgagtaatgtcgatgatgagatcaagaaaaagagagagacaattacaaagatgacactagaaattgaacatcatgaattgagccagaatattagaaaaccaactgatgatctgcttcctgatagcacgtatcagccttaccacaagaaaatgttgaagcaagaaaatagaatgattcaatcggacatcgtaaatggtgaaaatgaagcagacaggctttcattaatttcagatagactgggtatgttgaattgggaagtaacattacagaaggttactaaaataaatgaccccactgacgagaatgaaatggagactaaacgttaccaaactaaagagctgattgattcaatgttacataaatttgaatctatgaaaaaaaaaagccgcaatttagctagaaggccagcctcaagtgattcattgttgaaattggttagtggcaaagattggcccaagatatatactcgaatcgatcgaacttttattccagattacgcaagctcctctgacgaagaagaagaaaaaataaccgttgaggaaataagggagagacgcctaaagaagagagagcagcaatgcggtggttccattatagtactgctgagcgatcatcaatcacaaaagggaatgacacggtttgctatcgtagctgagccgctccgaaaaccgtatttgattaaaacctccactaaagagagaaattcatggaaaaacaaagttcctacaaatccaaaaaaattcaagaaagctcctcgaatatcaacgcaaattgctgtgaaaagaagaagggaagtcatcccgttaacgatggaggtggaaccagaagtcattcgggatataaggcgagatacacaaaagtctatgaaactgaatgttaaagcggaggaaatatctgtgacagagactgtcaaatcaaaagaaatgaatgccttaaggaacaatgctgcatctataagtccaactctttcagagaaggcacctttaggttcaatttcatcttgcactgcatctcagatttcacaaaggtcttctgagaatgtgggtgctattattaacaatatcaacccaaacttagcaatagtgccctcttgtaacgaaaagacctttgtaaaaacacacaatggaatgaaaactaactcaggtattgatattttgcctgtccgcaagaaaaaaaaggtttag

SEQ ID NO: 76008 - DNA, 1476 bp, Saccharomyces pastorianus
atggtatatcgtaacaggtcaaagagcgttttatctacacacagcaagaagagcgacgataaggcccactataaatcacgttcgaaaaagaaatcaaaaagcaggagcaagaagaggttaagaatctactggagatacatatctattgtatggatcttatggttaggattaatatcttattatgaatcagtggttgtgaagagagcaatgaagaagtgccaatggtcgacttgggaggattggcctgaaggcgctgaaagtcatagggtgggtttatttgcagacccacaaataatggacgaatattcatatcctgggaggcctcaaatagttaattattttacaagagtgattgttgaccattatcacaggagaaattggaaatatgtccagtattacttggatcctgatagcaattttttcctaggtgatctatttgatggagggagaaactgggatgataagcaatggattaaagagtacacacgattcaaccaaatattccccaagaagccactgagaagaacggtcatgtctttaccaggtaatcacgatattggttttggagacacagttgttgaatcgagtttacagagattttctagttactttggagaaacttcctcctcattagacgctggaaatcatacctttgtacttttagatacaatttcgctttctgataaaacaaatccgaatgtctcgaggattcctagacagtttttggataattttgcaatgggttcacatccgcttcctagaattcttttaactcacgttccattatggagggatccagaacagcaaacgtgcggtcagctacgtgaatccaaagaaccttttcctattcagaaagggcaccagtaccagacagttatagaaaacgatatatcacaagaaattttaacgaaaattcaaccagaaatattattttccggggatgatcatgaccattgtcagatatcacactcatatccgtttcaggggaaaactaaaaatgctcaagaaattacagtaaagtcatgtgcaatgaacatggggatcagtaggcctgctattcaattgctctccttatataatccttcagatttgacaatggtaaatgccggcggagagtatgcatcaaaaacttaccaaacagagctatgctatatgccagatccctataaggcaatcagaatgtacctatggggattattattctctgctgcctttatcgcatacatgcattttttcccaaaatcttttaataatcgcgtagcaaccataatgaacagagtatttacacgacctgatggtaacacctcagatttgccattacctacaagtatttccaaatcgaaatccaaaaaatcattgacacatagtaaatacgctgtgaatgatacgcgttcgatcaaacaatttctagttaatgcaattgtcctttttgtttctgtgatgcccatttttatttatttttatactgtagtctag

SEQ ID NO: 76009 - DNA, 204 bp, Saccharomyces pastorianus
atgaacaagagatataaattataccgggtgtggtattactatgctcaccaaacagtttgcataacctctactggatttgcattatgttttgtggtccaagctaaaactgcaggactgggcgtaacaccaattacttcactatacggggacaaaaaagaacacctaggtaagttgttggttcctttagttttatatcaaatttag

SEQ ID NO: 76010 - DNA, 258 bp, Saccharomyces pastorianus
atgaaaaatcatccaaggaaagttaaatttagagtcagttctgctaagtttatctgcatttattggtttttttgtctttactacaaagatggtccaattttatatacaatatacactacctttctcagtcatcgttattcgtactcaacttttattattttaaggaacacagtcgcatttttgagtttcatgtataaacattactatacgcatatttcgtatttaactttctataaatcccccaaaacgttttattaa

SEQ ID NO: 76011 - DNA, 885 bp, Saccharomyces pastorianus
atgaacacgaatcagtccaatccgaatacagatttaacagatgatgccaatatagaacatacgttgcatcggctgctcactcaggcaaataatcattttgatgatacagtaaagattgatgggcagagtttagatttgggaaaggatctcgaacaagttatgatggataatttagactgcactgatatttttgattccgacatcgcttctcagaaacacctaacattggaatctttatttaacgatgaacacaacaccgattcgagcacacttttggaaatgcagagaagtgctaatgatagcctagttggtattgatctcgataggcataaaaagggttatactggcaaggcatcattagataaaagtacaaaccaaaataacgtacataaacctgataaagaacaaaagaactataagatagataaacccaccatcaagaagaaaaaatcccttttgaaaaccacaaatgaacccatgttatcccctgcatccctatcaccttcatcttcgttagcttcatccgacgctaatgaatcccacctaaaaatagaatccatgattactgatataacatctaaaatagattctgcaagacaagacattgtatctgcaacgaagcctgctaagttcacaaatgagtttacaataagtcaaatttcggaaatgaaggcaagaataattaatactcataaattgctgctcaatttcaattttattaaagaaggttacgcgagatcttgtattcaattgaaaaaaactatggactctttaaaggatagtgaaattcacagagcacatttattggttgagaatgatgacttgaagcaacaaatcctagaacttactcaaaaactcaatgaaaaatcatccaaggaaagttaa

SEQ ID NO: 76012 - DNA, 540 bp, Saccharomyces pastorianus
atgaaatcatttcaaaaatcttatgaattcgattacccatgggagaaagtcaccacggcgaactggatgaaatatccaaacaagatctccacacacgttattgcagtcgatgtgctccgcagagagctcaaagaacatggcgatgtacttcttacagaacggctgataaccatacgtcagaacacccctcactggatgtccattttagtggggaacactaatttagcatacgtgcgagaggtctccaccgttgatcgaagggacagatctttaactatgaggagttgcaatatgaccttcccgcatattttgaagtgttacgaaaccgtacgttatgttcctcatccgaaaaatccatcgaatgtgactcttttcaagcaggatgcaaagtttctgtctggtgttccgaccaaaacctttagtgagaaagtagaaaactggggcgttaaacgttttagtgataacgcggtgaaggggaaagtcgggtttgatagtattctagcaatgttcaacgatatctggaaaaatgctaacgaataa

SEQ ID NO: 76013 - DNA, 519 bp, Saccharomyces pastorianus
atgaaacggtgcgcttgtctaagcaattcacccacaagacacacaaccgtcgtggtcccatcgcccgtgatttcatcctgcgcggcagctgccctagcaatcagtaccgctgtaggcgactggatctgcatctcggtcagcaacactttaccgtccttggtcagcttgatgttaccagcaccatccaccagcatctttagcgtgcccttagggcccaagttggtctctaggacggattgtaagccctcagcagatgtgacgttaaccttcaaagccgcatcccttctcaacgattcagccttcggattcagcaattgcaatgacatgcttctactctacttatattataatcttctgcttctcactgcttccacacccttaacctttaccctttccacacactgcacacatacactgttatacataatcctttccgtctttcgttcgtttcttaccagaataacaactactaacacatcaccgagcgaaaattttgccaccaaagcaaaactcccgtaa

SEQ ID NO: 76014 - DNA, 1113 bp, Saccharomyces pastorianus
atgaagcaaaaatttgtactaccgatcaccccaccaagtacagcggaaaagaagcctcaaacagaaaaccgttgcaatgagaatttgaagcctagaagattgctaccgcaattgaaaaaaagtgtccgtaacaggaaacctagactgtcatataggcctgagttaaactctgtgtttgatctggatgcgtacgtggattcgacacacttgtccaaatcccaacgccatcatatggaccgcgacgccggttttattagctatgctctgaattatagcaaaagaatggttgtagtcagcggggcaggtatatctgttgccgctggtataccggattttagatccagtgaagggattttctctactgtgaacggcggctctgggaaagatttgtttgactacaatcgtgtgtatggcgacgaatcaatgagtttgaaatttaatcagttaatggtgtcattgttcagattatccaagaattgccaacctacaaaatttcatgaaatgctcaatgagtttgctagggatggcaggctattgagactgtacacgcagaatattgacggtttagatacacaattacctcatttatcaactaatgtgcctctggcgaagccaatacccagtacagtacaattacacggaagcataaaacacatggaatgcaataaatgtctgaatatcaaaccttttgaccctgaactgttcaaatgcgacgacaaatttgattctcggactgaaatcataccgtcatgtccacaatgtgaagaatatgaaacagttagaaaaattgcaggcttaagatctactggtgtgggcaagttgcgtccaagagtaattttatacaatgaggtccaccctgaaggtgattttatcggtgaaattgccaataatgacttaaagaaaagaattgattgtttgattattgttggaacgagtttgaagattcccggagtgaaaaatatttgcaggcagtttgcggccaaagtccatgcaaacaggggtattgtgttatatttaaacaccagtatgccgcctaagaatgtgctagactctttgaaatttgtagacctagttgtactgggagattgtcagcatgttacctcattattatag

SEQ ID NO: 76015 - DNA, 399 bp, Saccharomyces pastorianus
atgggggcgctagagccaaatgctggtgctccaaatgctgacggtttagccgcattactggtgttcccaaaagcgctaattgacgtattgccagtattgcctgtattggtaccaaactggggcattccaaatgctgaagtggtggttcctcctgtcattgtgtttgctgttccaaaactaggtcttccaaatgcacttcctcccatgttattggtactagcagcattatttgtgaaagggttgataccacttgtattagaaagattaggcttagcacccgacgtgaatgggttaccgaaagctgacattacagttgagtcgttgctcgggtcgaaatttaatgatagcttgatgagcttttgcgttaaagtacaacagttcagtgttatagtactttaa

SEQ ID NO: 76016 - DNA, 1995 bp, Saccharomyces pastorianus
atgttgacctctatattgataaaaggtcgcacacctgttcttgcaagcagaaatttattagcagctctctcgaattgcaaccatattacttgggctgtttcaagaagattatacaatgatggaaacagagatcaaagaaattttggtaggtatcagagaaacaacaacagtaacaggtatagaaactcccgtttcaattctcgcccaaggacaaggtctagagaagacgatgatgaagtgcactttgataagaccactttttccaagctaattcacgtcccaaaagaagataatagtaaagaagtaacgctggactctttactggaggaaggagtccttgataaagaaatacataaagccattaccaggatggaatttcccggtttaactcctgtacagcaaaagactatcaaaccaatcttgtccagtgaagaccatgatgttatcgcaagagctaaaaccggtacaggtaagacatttgccttcttgattccaattttccagcatttgataaatacgaagttcgattctcaatatatggtaaaagctgttattgtcgcaccaacaagagatttggccttgcaaatcgaagcagaggtgaaaaaaatccacgatatgaattatggcttgaaaaagtacgcttgtgtctctttagttggtggtactgacttcagggcagctatgaataaaatgaataagttgagaccaaacattgtaattgccactccagggagattgattgatgttttggaaaaatactccaacaaattttttaggttcgtagattacaaagtgctagatgaagctgacagattgctagaaattggattcagggatgatttagaaactatttctggtattttaaatgaaaagaactccaaatcagccgataacatcaagactttgttgttctctgctactctggacgacaaagtacaaaagttggcaaacaatatcatgaataaaaaagaatgtctctttttagacacagtagataagaatgaacctgaagcacatgaaagaattgatcagtctgtcgtcatttcagaaaagtttgccaatagtatatttgctgctgtggagcatataaagaaacaaataaaggaaagagattctaattacaaagccattatttttgcaccaactgttaaattcacatcctttttgtgcagtattttaaagaatgaatttaagaaagatttaccaattttggaatttcatggtaaaattactcaaaataaaagaacaagtttagttaaaagattcaaaaaagatgaatccggtattttggtttgtacggatgtgggagcccgtggtatggatttcccaaacgtccacgaagttttgcaaattggtgttccatctgagttggctaattatattcatagaattggtagaacagccagaagtgggaaagaaggatcttctgtgctattcatttgtaaagatgaattgccatttgttagagaattggaagatgcaaaaaatatagtcattgccaaacaagaaaaatatgagcccagtgaagaaataaaatctgaggtcctagaggcagtgaccgaagaaccggaagacatatcagatattgtaataagtttaatctcatcctacagatcctgtatcaaggaatacaggttttctgaaaggcgcatacttcctgaaattgcttccacttatggtgtactgttaaatgatcctcaattaaagattccagtatccagaaggtttttagataaattaggtttgagccgtagtccaattggtaaggcaatgtttgaaattagagactatagtagtagagatggaaatgacaagtcctacgattatgatgatgattcagaaatttctttcagaggcaacaaaaactataataataggagccaaaatagagattacgatgacgaaccgtttagacgcagcaacaacaatagacgctcattctcccgtagtaatgataaaaataattactccagtagaaacagcaacatatattag

SEQ ID NO: 76017 - DNA, 153 bp, Saccharomyces pastorianus
atgaaacagatgatgattgaagcatccataagtaaagacactttgaggttgctaatttgctttttcgaaataaaacagtgccatatatcactccagcctacttgttattatcagaattgggtacggtattcatctatatattaccagttgtaa

SEQ ID NO: 76018 - DNA, 726 bp, Saccharomyces pastorianus
atgctggtagtgggattgacaggtgggatcgcttgtggtaagagtacagtgtcgagaagactcagagacaaatacaagctacccattgttgatgcggacaagattgctagacaagtggtcgaaccaggacagaatgcttatgatcaaattgtgttatacttcaaggacaaaataccgaatttattattggaggatgggcatttaaatcgtgaagccctagggaaatgggtttttagtcataaagaagatttgcaagccttgaatgggataacacatcctgcaatcaggtatgcaatgttcaaggaaattggctactattacttgaagggatatagaatgtgtgtattggatgtgccactcttatttgaaggaaatctggattcaatatgcggagtgactgtaagcgtaatttgtacgcaagaattgcaactagaaagattaatgacaagaaatcctgaacttagtgaagaagatgcaaaaaacaggctaaaaagtcaaatgagcgctgaagaaagaatggcaagatctgactatatcctacaaaataacagcacattggttgacttatacgaacagattgaaagtgttgtaaaaaaaatccaacctagtaaattaagaactgttttggagtatttcccaccttttggggccgtaagtgccagtagcatcgtcatgtccagattactgatgaaaaaacttcaaaataaaaagtcttcagcggtataa

SEQ ID NO: 76019 - DNA, 366 bp, Saccharomyces pastorianus
atggaatatgtgcttatttataatatatggtttttctcatttctacaggacaagccctgtttttgctttgtagattatgcttgtagtatttttcttctttcgagttattgtggcaattgcttaacggccgtcgcaactaaaccgaatgaaatggcaactattccaaagagcattcccttactaactcttgttttcttgccttcgacgactcctagttcttcagtgcttattaatgtatcttcggtatcctttttttcttctcttgaatcattttgttttactttagcgttattgtcattgttaataccaccattaaaattgctttgtgttaaaactaaatttttccccctctcttcttctatttga

SEQ ID NO: 76020 - DNA, 1815 bp, Saccharomyces pastorianus
atggtagaactggaaaaaagaagaaggccccctccgcaactgcaacattctccctatgttagggatcaatcgaattcgcagggaatgacaaagacgccagaaacgtcaccgcctaagaggcccatgggaagagctagatcaaactcgagaagcagtggatcccgttcaaatgtcgatatagatcagtataccataccaccaggcttagatttgttgcctaccgcttcatctccaccttccgtccatcaagtttcacaacagcaacaattatccccaatattagccaacaaaatccgttctccatttgaaaatcaaagtcaggatcaaaatgacaattcaatagacccaacaccggctggacaagtaacaattcctgtagaagccatatctccaccggcactggacgaattatcgaaattccaaaatggttcaactgagacattatttagaactggatcaccccgtaagaagcatacacatattattatactcaaatccttaaatgcaacttttgagaccaagtttcttgttgtaccatttaaacctgacggacttaaattaggtcgaccagttaccaatagcgtaaacaagaataattcaggatcgaaaagagatttattttcgcaacaagttagaccagataacggaaattttgactcaagagttctttccagaaatcacgcttgtctcagttgtgatcctacatcaggaaagatatatattcgcgatctaaagtccagcaatgggacatttgttaatggggttaaaataggccaaaatgatgtagaattaaaagttggtgatactgtggatttgggaactgatattgactcaaagtttgaacatagaaaaatcagtgcgtatgtggaagagatttcagtaattcccttaatgaacactgtatctgatcccacaaatttggtgatgaaaaaacaagatcatactaataagaataatgggaactccactaatataaacggaataaagatagacagaggtcatcataatcaacacattccaatacgatctcatttaaaggaaaattataccgaagctggtgtaacatctgcaacaacggctcaaagggcagcctttgaggcagctatgtttggagatattaataactcagaattagatgatgatattttaggtccagaaactgaggttctcagtggaatttttatcaacaattcagcaggtacaagcataaatttgataaatatgataaaaactttgactactgagctgtccttagaaaaacaagagctggaaaaattacattccatgcaaaactttatgcaaaactatacgataaaccttgatttcatcaataagcacatgattgatatgaatgaaaagcatttactgaaactgagcacggctttacaaaaaactctatcagaaaataatgatgcgctactcaaagaatcggaagatcaattaaaagaaatcaaacaacaaaataataaagtaaaatctgcatgtagcttgaaggaaaaacaaaaccatgaaaagctacaggagctcgaaagtgaattaagagagctgaaccttcaaatagaagaagagagggggaaaaatttagttttaacacaaagcaattttaatggtggtattaacaatgacaataacgctaaagtaaaacaaaatgattcaagagaagaaaaaaaggataccgaagatacattaataagcactgaagaactaggagtcgtcgaaggcaagaaaacaagagttagtaagggaatgctctttggaatagttgccatttcattcggtttagttgcgacggccgttaagcaattgccacaataa

SEQ ID NO: 76021 - DNA, 498 bp, Saccharomyces pastorianus
atgacagatgctttggaacagagcgtccttgcgttggagggaacagtttcagtattgaaggattctgtggagtctttaaaatgtgcaaatgagccaagcacgaaccttgcatcgacaatgttgcaaaccaaaagggttttccgtttagttcccgaatatgatgttgaaagatcaaaattagatttgattgaagaggtagaaccactggttaggactctgggcgataagttacgtaaatctatgggtagaatgcaaagggaactcgatactttgcagcaaacttatgaattaaacgatttaaggctaaagaagaacattagtatggatgacgatgatgctctgaatagtccagacatgggtcaagaatacgaaggcagagacgcggacgacgtggttatgatggcatcttctactaatgaggaattggaagaattgaagaaactaaaggaaaagaagaagcaactggagaataagttggaaatactcaaacagaaatag

SEQ ID NO: 76022 - DNA, 318 bp, Saccharomyces pastorianus
atgtattggccttgtcttgtgataacaccctttaccgtcggagagtcgttttgtttgttactttcgttgggaataccattagatacaggcattttgaatatttggtcactctctagcatctctaggcatttagaaaagttgtcaataatgttgggtaattgcggtttgacgatttcttcgatgagccaggagcattcttttacggcatccttaaagttgtcgtatttatcttctgcaccaaatctatcatttggaaacaaatcaacactcatattgcttttcgagcacttccactgtgtgcttgatcagatactataa

SEQ ID NO: 76023 - DNA, 2511 bp, Saccharomyces pastorianus
atgctagacaaggcgcgctctcaaagcaaacacatggacgaatctaatgcggctgcctctctgctttcgatggaaacaaccgccaacaatcatcactatttgcacaataaaacatctcgtgccacgctgatgaatagcagccaagacggcaaaaaacatgcagaagatgaagttagtgatggagctaactcccgccatcctacaatttccagtgctagcatcgaatctctcaagacaacctacgatgaaaaccctttgctttctattatgaaatcgacatgtgcgcccaacaacactcccgtgcatactccgtctggttcgccgagtttgaaagtccaaagtggcggagatatcaaagacgatcctaaggaaaacgatactactactacgaccaatactacacttcaagatcgccgtgacagcgataacgctgtgcatgctgccgccagcccactcgcgccttccaatacaccttcggatcctaagtcattgtgcaatggccatgtcgcacaggctacagacccgcaaatttccggtgctattcagccgcagtatactgcaaccaacgaggatgttttcccttactcctccacctccactaatagtaacactgccactactactatcgtcgccggcgccaaaaaaaaaatacatttgccgccaccacaagctccagcggtttcttcccccggtaccaccgcagcaggctcgggcgcgggcacgggctcgggcatccgttcccgcacaggatcggatttgccgctcatcattaccagcgccaacaagaacaacggtaagactaccaattcgcctatgtcgatactgagcagaaacaacagtaccaacaacaacgacaataattcgatacaaagctcagattcgagagaatcctctaataacaatgagattggcgggtatttgcgcggcggaactaagcgcggcggcagtccatctaacgactctcaggtccagcataatgtgcatgatgaccaatgtgccgtgggcgtggcgcccaggaacttctatttcaacaaggatagagagataacagacccaaatgtaaaactggacgagaacgaatcaaaaatcaacatatcgttctggctaaattcgaaatacagagatgaggcttattctttgaatgaatcatcctccaacaatgctagttcaaacacggatacgcctacaaactctcgacatgcgaacaccagctcttccattaccagcagaaacaatttccagcattttaggttcaaccaaataccttctcaacctccaacttccgcatcttcgtttacaagcacaaacaacaacaaccctcaacggaccaatatcaatcgcggtgaagacccgtttgccacttcgtcaagaccttccactgggtttttttacggcgatttgccgaatcgtaacaatagaaatagtcccttccatacaaatgaacaatacatcccaccacctccaccgaaatacatcaattctaaattggatggattgagatcaagattattgctcggtccgaattctgcgtcttcatctaccaaactagacgacgacttgggtacagcagcagcagtgctatcaaacatgagatcatccccatatagaactcatgataaacccatttccaatgtcaatgacatgaataacacaaatgcgctcggtgtgccggctagtaggcctcattcgtcatcttttccatcaaagggtgtcttaagaccaattctgttacgtatccataattccgaacaacaacccattttcgaaagcaacaattctacagctgtttttgatgaagaccaggaccaaaatcaagacttgtctccttaccatttaaatctaaactctaaaaaggttttagatcccacttttgagtcaaggacaaggcaagttacttggaataagaatggtaagcgaatagacagacgcctttctgctccagaacaacaacagcaactggaagttccaccattgaaaaaatcgagaaggtcagttggaaacgcaagagtagcaagccaaaccaatagcgattataattctcttggcgaatcctcaacttcgtcagctccatcgtctccatctttgaaggcttcttctggcttggcatataccgctgattatcctaacgctacttcgccggatttcgctaaatctaaaggaaaaaatgtcaagcctaaggcaaaatcaaaggcgaaacagtcatcaaagaaaagaccaaataatacaacttcaaaatcaaaagcaaacaattctcaagaatcgaataatgctacttcctcaacgtctcaaggtacaaggtcccgtactggttgctggatttgtagattaaggaaaaagaagtgtaccgaggaaagaccgcactgtttcaactgtgaaaggttgaaattggactgtcactatgacgcgttcaaaccagattttgtatctgatccaaagaaaaaacagatgaaactggaggaaatcaagaaaaaaacaaaagaggccaaaagaagagcaatgaaaaaaaaataa

SEQ ID NO: 76024 - DNA, 414 bp, Saccharomyces pastorianus
atgaacgatggtcaattcttgttccaacgtaacgatcccatcatattatatacatttttgcttaaaagtaattatatagtctttcgcagcatagatgaaaggctatgtgatttcgttttttatattgaccacttcttgaacaaacgaatcagttatcgcataccaattctaataagaaacaacaacacaaacattttaaacaactgtccaagcagctttcctcctttggttgaccttgttggacatagactggttgctgctgaggataaccctgttgcggtggaccttgttgataataaccttgttgtggtggaccttgttgataataaccttgctgtgggggtccttgttggtagtaaccttgttgttggctcattagttttcgctcttttgacttgtttcgaagacggatag

SEQ ID NO: 76025 - DNA, 228 bp, Saccharomyces pastorianus
atgagccaacaacaaggttactaccaacaaggacccccacagcaaggttattatcaacaaggtccaccacaacaaggttattatcaacaaggtccaccgcaacagggttatcctcagcagcaaccagtctatgtccaacaaggtcaaccaaaggaggaaagctgcttggacagttgtttaaaatgtttgtgttgttgtttcttattagaattggtatgcgataactga

SEQ ID NO: 76026 - DNA, 3930 bp, Saccharomyces pastorianus
atgtcaggccagttagttcaatggaaaagctctccagatcgagtcacccaaagcgctataaaggaagcactgcattctcccttggctgatggcgacatgaacgaaatgaatgttcccgttgatccgttggaaaacaaggtaaatagcacaaacataatcgaaggaagtcccaaagcaaatccaaatcctgtcaagtttatgaatacaagtgagatatttcaaaaatctctgggattacttgacgagagtccaagacatgatgatgagttaaatattgaagtaggagataatgatcgaccaaatgctaacatattgcataatgaaaggactcctgaccttgaccgaattgctaactttttcaaaagcaatcgaacccctggtaaagaaaatcttttgaccaaatatcaaagctccgatctggaagacactcctctgatgttaagaaaaaaaatgacttttcaaactccaactgatccattggaacagaaaaccttcaaaaagttgaagtcagatactgggttttgctattatggagagcagaatgatggagaagaaaatgcgtcattagaagttacagaggcggatgccacttttgtacagatggctgaacgttctgctgataattatgactgtgcattggaaggaattgttacacctaaaagatataaagacgaattaagtaaaagtggaggaatgcaagatgaacgagttcaaaaaactcaaatcatgatatcagcagaatcacctaattcgataagctcttatgacaagaacaaaattaccgggaatggccggaccacaagaaatgtaaacaaggtttttaacaataacgaagataacataggagctatcgaggaaaaaaatccagtaaaaaagaaaagtgagaactattcatcagatgatctcagagaacggaacaatcaaataatacaaagtaatgaatcagaggagattaacgaattggaaaagaatctgaatgtttcgggtagagagaatgacgtgaacaatttagatatcgatattaatagtgctgtgtctggcaccccttcacgcaacaatgcggaagaagaaatgtattccagtgagagtgtaaacaatcgggaaccatccaagaagtggatattccgatactcaaaagacaaaacggaaaataatagcaatagatctacgcaaatagtcaataatccaagaacacaggaaatgcctttagatagtatttcaatcgatacgcaacccttatctaaaagtttcaataccgaaacaaataatgaattagagacacagataattgtttcatcgctttcccaaggcatatctgctcagaagggacctgtttttcattctactggccagacagaagaaataaaaacccaaataataaattctcctgaacaaaatgctttgaatgcaacctttgaaactcccgttactctttctcggattaattttgaacccatattggaagttcctgagactagttcaccatctaagaatacgatgtcaaaaccctcgaattcttcacctattccgaaggaaaaagatacatttaatatacacgagagagaagtagagacaaacaatgttttttcaaacgatatacaaaattcttcaaatgcagctaccagagatgacattatcatagccggttcatctgatttcaacgaacaaaaggaaataaccgatagaatatacttacaactttcaggaaagcaaatatctgattcaggaagtgatgaaacagaacgtatgtccccaaatgagcttgatacgaaaaaggaaagtacaatcatgagcgaggttgaactaacccaagaactgcctgaagttgaagagcagcaagatcttcaaacgtctccaaaaaagctggtagtcgaggaagaaactttaatggagataaaaaaaagcaaggggaactcacttcagcttcatgatgataataaagaatgcaattcagataaacaagatggcacagagtctttggatgtagctttgattgaacacgaaagcaaaggacagagctcagaacttcagaaaaacctcatgcaattatttccaagtgagtcacaggagattattcagaaccgaagaacaataaagcgacgtcaaaaagatacaatagagatcggtgaagaggaggagaacagaagcactaagacatcaccgacaaaacacctcaaaagaaattcagatttggatgctgcttctatcaaaagggaaccgtcttgcagcattaccatacaaacaggggagacaggttcgggcaaagactctaaagaacagtctcacgtgtttcctgaaggtattagaacggcagataatagtttcttatcgaaagacgacataatttttggaaatgcggtatggtgtcagtattcgtggaattacaaattttatccgggtattttattggaagttgacactaatcaagatggctgttggatttatttcgaaacaggaagatcgctaaccaaagatgaggacatctactacttagatattagaataggggatgctgttacctttgatggaaatgagtacgtagtcgttggtctagaatgtcgtagccatgatctcaacataataagatgtattcgaggatatgatacggttcatttgaaaaaaaaaaatgcaagcggattgttggggaaaaggacgttaattaaagcactaagctcgatcagtcttgacctaagcgagtgggctaaaagagcgaagatcatattagaagataatgagaaaaataaaggcgacgcgtataggtacttgagacatcccattaggggaaggaaatcaatgaccaatgttctgtctccgaagaaacatactgatgacgaaaaggacataaatacgcatactgaagtgtacaataacgaaatagaatcgagctccgaaaagaaggaaattgttaaaaaggattctagagacgcattagctgaacatgcaggagcgccaagcctgcttttttcttctggtgaaatcagaacagggaatgtatttgataaatgtatttttgttttgacaagcctattcgaaaatagagaggaacttcgacagaccattgaatcgcaaggcggcactgtaattgagtcaggattttccactttatttaacttcactcatccgctagctaaatctttagtcaataaaggtaatacagataatattcgagaattggccttgaagctaacctggaaacctcattccctatttgcagactgcagatttgcttgcctaatcacaaaacggcatttaagaagcttaaagtacttagaaactttggcgttggggtggcctacactacactggaaattcataagtgcatgcattgaaaagaaaagaatagtaccacatttaatataccaatacctattaccttcgggtgaaagttttcggttatcgttagattctccatcaaagggaggaatcattaaatccaacaatattttttcattttatacacaattcttacgcggatctaatttaagagatcagatatgtggagtgaagaaaatgttaaatgactacattgttattgtttggggtagatctgagttggacagttttgtcaaatttgcttttgcatgtttgagcgcaggtagaatgcttacaattgatttacccaatattgatgtagatgatacagagccattgttaaatgccttagattctttagtacccagaataggatcagaattatctaatcgaaagttaaagtttctcatatatgctaacgaaaataatggtaaatctcagatgaagcttctcgaaagattgagaagtcaaatatcactgaaatttaagaaatttaattacatatttcacactgaatctaaagaatggctaattcagacaataattaacgaggacactggttttcacgatgatattacggacaatgatatatacaacactatttctgaggttagatga

SEQ ID NO: 76027 - DNA, 294 bp, Saccharomyces pastorianus
atgcttcctaaatgcagtgtggaagcctctgcttctaccataacatcttccaacacagtcttcatatactattattattcattttatagccgggtaagtatttttaaaggcattggcaatacccgttttgttttgacccaaacaactgtttatcattattcctggtgctgtcttcttagaaactataaacgtttgtgcacctacccagtatttaaccagttgggaggagctaacaatatttacttactttttcacaaaataggaaaaggaaagttatactttgctatagtttaa

SEQ ID NO: 76028 - DNA, 1248 bp, Saccharomyces pastorianus
atgcttgaatcgagcagtgataagataaagtttgcgcctattaaagaggtagattacaaaaaaccggtaagtaagagtaagaactatactcttattaatgacatccaaccattggagtggtattgtcacaatgatagtgaaacgggctaccaacacaccataagtaacaagacagatggtggtagaggtttattcagagtgatgaaaaaatcgatggagaccagagtcgagacccaaacgttatatttcacagatttgcatacaggcttgtgtggatttgttcaattactgtattctacggttatgggtggtatctataaaggcttccaattgaatttcaaggtttttggctcagaaagtaataatactgactacgacgtttgggaaagttttaaattggatgacatagctgaatttcaaccattaaagtttgtctctagaaatgttatttttgaatttttgagcaacagaaatgaaaaattaggttccattggccagttatctatcaaatgtgatttaccaacatgtaacaatacaattcaaaatttgaaaatcgatttgttggtggatttgtttcaaggttttaagatgaaccccaacggttgcaattattattttgacaaacaaatctcgacgagtgacgaattcgtttcctcagacaaaatgatcagacatgtttttgtgcccagaggtaaatgtaatggtaatatttcctacgataaaaaactcaatagtggggactttcaaaataaaaatatttcattaactgatgttcctgtcgtttatctggacgctgttcaaggtcttttgccgaataaagcagccagtaaatggaatttcctatgttttcaaagcgaaaactactctgttttagcaattgaattcactactcctcgagatcatgataacgtcaccgtaacagtttggtcaattactgaaaaaaaaaaactgatatctattggttcttctgtgcagagcccaaaacgtcatgttaggttccgtgctacgagtacagataaggaaagcggctgggtatatccaacctctatcaagttccccggtggattttcagaacacgacttgaggctggttaatcgatacgacgttctcggtgagttaccaagcatggtcaggtcgttagctcagaaaattgtgagcatcaaacctttcatttatcaatactgtcaaccttctaaatataagcacgagaaaggtatttccatcgttgagagcaccttcattagttga

SEQ ID NO: 76029 - DNA, 669 bp, Saccharomyces pastorianus
atgtctagctcagaatccattagaatggtcctaattggcccacctggtgccggtaaaggtactcaagctccaaatttgcaagagcgtttccatgccgctcacttggccactggtgacatgttgagatctcaaatcgcaaagggcactcaattaggtttggaagcaaagaaaattatggaccaaggtggtttagtctctgatgacattatggttaacatgatcaaggatgaattgaccaacaatccagcttgtaagaatgggttcatcttggacggtttcccaagaaccattcctcaggctgaaaaattggaccaaatgttgaaagaacaaggaactcctttggaaaaagccatcgaattgaaggttgatgatgaattgttggttgccagaattaccggtagattaattcacccagcctctggcagatcctaccacaagatctttaacccaccaaaggaagacatgaaggatgacgtcaccggtgaagctttagttcaaagatctgatgacaatgcagacgccttgaagaagagattagctgcttaccatgctcaaaccgaaccaattgttgacttttacaaaaagaccggtatctgggctggtgttgatgcttcccaacctcctgctactgtttgggctgacatcttgaacaagctaggtaagaattaa

SEQ ID NO: 76030 - DNA, 348 bp, Saccharomyces pastorianus
atgttgcatatatacataggaaagcggttaaaaggccctgcttctaccttctgtttccccctggttcttttcaccagaacttgtaccatttcttctcagaggaggcctgagataaattctggttactttgttcaaactgactctgcttttcatttttggcggcctcccattgccccggcagagatgggtcatgagggacattatggagcattggtttttcctttttcgccacggtttcctttgccaattgtgcgatctggaaacttttttgtctctttagcctacattgctcccatccgacaatcgagcccagtatcagggagctcatcgcccaattcgtggccttag

SEQ ID NO: 76031 - DNA, 618 bp, Saccharomyces pastorianus
atgggttggtggccgtggtcaaatcagacagaagatcaaaatcagcagcaacaactgcagggtaaagcagatggtgatcgcgtgctgacaaattactcgcggggtcaaaagatcctcttagaagacactccacccaagtttgccgatgacttgtccaattctcagttggccaaaaagcaagaacgggctactttgaaagaggcttgggactcgatcagatggagtgattttagtttgcagaagctgacttcaatcccgtgcttcagagacgcgggcatgctcgggttttccagcatgttcttgatgggatctattatatttatataccataagagcccgactaaggccacgaattgggcgatgagctccctgatactgggctcgattgtcggatgggagcaatgtaggctaaagagacaaaaaagtttccagatcgcacaattggcaaaggaaaccgtggcgaaaaaggaaaaaccaatgctccataatgtccctcatgacccatctctgccggggcaatgggaggccgccaaaaatgaaaagcagagtcagtttgaacaaagtaaccagaatttatctcaggcctcctctgagaagaaatggtacaagttctggtga

SEQ ID NO: 76032 - DNA, 888 bp, Saccharomyces pastorianus
atgtccgcctcagctcaacatagccaagcccaacaacaacaacaacaaaaaagctgtaattgcgatttgctattatggaggaaccctgttcaaaccggtaaatatttcggtgggtctctgttagccttgttaattttgaaaaaagttaacttgatcactttctttttgaaggttgcctacactatcttattcacaacaggatctattgaattcgtatccaagctctttttgggacaaggtttaatcaccaagtatggtattaaagaatgtccaaatatcgccggctttattaagcctcgtatcgatgaagctttgaaacagctaccagtcttccaagcccacataagaaagactgtattcgctcaagtccctaagcacactttcaagaccgctgttgccttatttctactacacaaattcttctcctggttctccatctggaccatcgtctttgttggtgacatttttaccttcactttgccagttatctaccattcctacaagcatgaaattgatgctactgtcgctcaaggtgtagaaatttctaagcaaaagacccaagagttttctcaaatggcttgcgaaaagacaaaaccatacttggacaaggttgaatctaaattgggcccaatttccaacttggtcaaatctaagactgctcctgtgtcttctactgccggtcctcaaaccgccagcactactaagttggccgctgatgttccattggaaccagagtctaaggcttacacatcttcagctcaagttatgccagaagttccacaacacgaaccttccactacccaagaatttaacgtcgatgaattgtctaatgaattgaagaaaagtacaaaaaacttgcaaaatgaattggaaaaaaacaacgcctga

SEQ ID NO: 76033 - DNA, 657 bp, Saccharomyces pastorianus
atgtttacgtggactatttatgtttcgttattgctagtgttagcaggtactttcttaatgaaccgaaatacgaatacagatataattgatacttttaaacgagaagtcgatttgccaatacctgcgcaaccaggtccaccattcccgcttgttactgactattgtgacattgtatgtggatttggccgcggatccgccgaattgggtattcccactgccaatgtacctataaatcagttacctaaaggtatcaacgatttggatttaggggtttactttgggtttgctcacattaaaactgttgatggtcaagaactgtcggtggaaacaaggcgggatggaagaactgtggtttataattacggtcaatatttaagtgaagcgaacgatgatttgtccgtacttcctatggtactttcagttgggaaaaatccattctacggaaatgatttcaaaaccatggaattacatattatacatgattttaaaaatgatttttatggggccaaggtcaagttcaatattttaggtcatatcagacccgaattgaactacactactaaggaagctctgatcgaagacatcaatatcgatattaggactgcgcagactgtccttgccactccaccgtatcaagtattcaaacaacaattatag

SEQ ID NO: 76034 - DNA, 879 bp, Saccharomyces pastorianus
atgcaaaggttttcactagtcactcacagatcattctctcactcctgtgtgaagcccaaatctgcatgctctttggtcaaaccagttcatcacttggtgaaaattgataagtcgaagttatcccctagatttccagaattgaaatatgacaaaagtgatattaggtcacctggatttaaaccaaaagacactcatgcagatagactcaatgaccattaccttaacactttacaatctgatttgttattgattaattattcacataacgctgcggtggtaaagggtctaaaacaaagagcgtggagtggtgattcgccataccacttgaacagaccaccgaaaaatcctcgaggttcgaaagctcaactacctgacattcatcctatcaaatggagtaacattcctgggctagaaagtgttgtaataaactgttttgttagggaagcgagagaaaatcagctattggctatcaccgctgcgttacaattacaacaaattactggatgtaaacctcatccaattttctccaaaaatgatgttccaacctggaaattgagaaaaggtcatcagatgggagctaaagtcgaactaaagggaaaagaaatgtctcagttcttaagcacattgaccgaaatcgtcctaccaagaatcagagaatataaaggtataagcaaccagtctgggaacagatttggtgggattagtttcggcctgacggctgaagatatcaaattcttccctgaaatcgatgcaaaccaggactcatggcctaaaacttttggtatgcacataaatataaacacctcagctcaattagattaccaggcgagaactttgttgagtgggttccagttcccatttttcggagaggagaaataa

SEQ ID NO: 76035 - DNA, 2364 bp, Saccharomyces pastorianus
atgtttgatggctttagcaacaataaaggtaaacgaaggtctttttttcggtttggttctgaaagtaaaaacaatgactctgaaaaatccgttagaaagccatcggtgccctctacaataaagaaatcaacaaatatcgcacgaacttcgacggctgaaacttctgcccctgatataccgccaagaagtccaaataggaatgctcatagcaggagccattctatccaggcaccattacaaaaggaaacattaaagaatactaatccatttttgaatgctgaggataccttaggagattctcttgaattaacacagtccaaggaagcgtcaggaaacgatcacaaaggaattgaatatttacaagaaaacaacatcattgggcagagaaccaaccccttcacaacaagcgcaaattcaaatgcacatttctccaagataaaacgttcgaggcctccaccaccgcctatggacatgaagtcaataacaacgtcaataagcaacaatactactaaggaagaaatagagagtaataatgattctgagcgggatagtattgcaatctcatccacccacaatcaacataggcggcagcgttcagaagcagaaaagttggtagatgatattgaaaattacattaatgaacacaaggtaagttccggtagctcactatccctagacacgtctgaaaactcagatactaaagcatcgcaagataagttgccagtagatgtcatggaagctcccattttgagaaatgtcagcgcggagagttccttaagctacgtaaaaccacttattgtggataatgaagaagtaaataaagcaagtaacggaaatttagtacaatcagatcatctaaaagaattttcttcgaatctggatgatggagatgataaattttcctttagtacatcggctagtggtaaatccaccaaaagccttcagcaagtttctaaagacgaatctagtggttttaaagctgcacattttgattttgcatataaatcaaatgagcaccttgggagtgatggaagtattgcaagcgccagaaagcctctgcggataactaatgagattgatagcggttcttccaacgaggatgatgatgatggtcttcaggaaaaaggttttgtggatagtgaaagtaaagcatttataaattacgcaagtgatcaaggctcatctataaaaaatgacgtctcaacacaagagcctgagttaccaagtcatcgtagaatatttagggtggttaatgaagatcgccctagtttctatttaaatagtgtaaacgatacgggcagtctaaccgacaagcattcttttgacactgcatcatctggtgagtatgatgccaagtcaaacttctctagccagtcaggactttctatatcaaaaggctctaaatcaactgttttggctgctcttgactcaaacggaaacacaaaatcatcaaataaaacatccgagttaaacagtttaaactccatttcagaaagtttagtgccggctgctcactcgttcaatgaacacacagttactatccctgcaacggtggatttaccaaatccggtacatgatgccccaagcgaaagatctgtcaaatgttcaccgttaacatctgtcgtatcgaacaaatcggaaaagtccgtgcctttggtttctagttacgtagaagaactgcgactaaagtattacaagacttctaactttttacaagcgcctcctaacttgccggttgctctaaaacaaaaaaataatttgattcaacccaagaatattaaggtcaagttgaggacaagttctaagcaaattggtatcaagcatggtaaagttaaacagaaattactggcgttggagacaagaaatgaagaatcagatggaaccgctacagggctgaaaaataaaatcaatgttgaccacacaaaggaattccataaattgttagggaaggaaaatgaaactggctctatttcaaaaaaagaaggcactgacgcagaacaagccgaagactacctcaaggacatacccggtgatgaagcatataacagtgatgatataatggcgcctttacgagaaaaaagagggcaaaacggttctgttgattccgtgtcaagatctaacacggtagtcagctactacacaaggtctcagaacagaatgagaagtggaacactggataatgattacgtgaacagacaaaagcttcctacacatatctctcttcaagattatcgtgatgctaatgctagaagtaatatatcgcgtcagggctctgtctccacaacgaactctgatgtggtagacctcagctattctctgggacatggcttgcgtgtggcaaaccctgattcagacccggaatga

SEQ ID NO: 76036 - DNA, 1479 bp, Saccharomyces pastorianus
atgcgcccaagaaggagaggattagcgtatcatcataccaagccgaagggacaactttcacaaggacattatcctacgacatccaatgatggccaaagaaggaaggtcggtaattctgaagcattccaatcttttgatatatggaaaaacctagataggataaggtcgactaagaagaatgcagggcaattcataaaaggtagtctgctcatactccccatgagaacggaagataaacaacagttcgacgagtgcatggatgaattgcataagtatatatcgaaggatatattacgatgttatccacagaaagagcagaaagatgaaggcatgcttttctacatagttttgaaggacttcaatatattggactcttgcttcgtattatcagttctgcttgctttccagaagcgattatggatggcaccatccgaaaaatcatactttagagttcctaagaatattaacttgacaggttcgttttatttgcccaagaatatagaaactggtagaggccatataataacaagctatagaagagagcagccctcatccagtattgtagaagttggtttcaatgttgttccagattttcaacagtttcaagttaaggcttgtcatgtaagtaagttcatgaatgagctttctaattttttttcacaagtagaatttggcaagtgtgaagctaacgtgataaactactttaagcgtgaatataaccgcacttattcacagatatcacttgccctctacgaacttccattaattggcgatggcttgtttgatataaagtcgtacattagtaaaaccaggccaattatagaaacatcaaaagctcaaatgattaaacatatttctgaaatgaaggcatataacgaaataagtggccttcaaggagatcaatttccacgacaacaaagacctttatcgaattcgccctcttcaaattcaatttcctcttcccaaactattgaagcaggtgcaacttcatatcaaacacaaccacagagacacgctgttaataagccatcaaatgtattgaattcttccaatcgtcattccgggccaaaaacttttgaggacggaaggtatagtgaaggtaataaaccgggttttatgacgcaggatgaaatcaaacaacattgcattggtaccataaaagcttctatggatgcagtgaaaaagaagtcttcgtatcaaattctaaagacatacgttaggtgtccaagacaaaattatattgatattgtttatcaaaatctaaatgatctacgatcaaagacaaattgtaatatcgtcgtattgaatctgaataatcttcacgagtcacaaatgtggcttgaatctttaaatacaacaaattacactatttttgctcaggcgcctcacccaagtaccatccgcgttattagtattggtggagtcggtgaatatatagtcaaagcattagagctgatattgaatatattagaacattga

SEQ ID NO: 76037 - DNA, 288 bp, Saccharomyces pastorianus
atgatactaatattttttgcttatattagtcgaagggaaactgtttctcaacgtcaaacttctactatagtatataatataactttaatgttttctacactgcgatgcgcgctgaaaattctagctcaaataaaaaaaaggttacaacaaatcagtagcaatcatgagaataagaaatatgaagaagtaattaaagatcatgttggagtaaaaatccaaaatatcatctgtttattagcattcgtgttagtagtatattatcaaatgcggtgtaagaagatgacataa

SEQ ID NO: 76038 - DNA, 1650 bp, Saccharomyces pastorianus
atgactgtgcactcaacgtggaaggaaaaagttcaattaaaaaaagatcaactgaacagtaagataaaagacgaatggaaattaaacagcacaactataacgagattgaagaacgataaaaaaaatttaatcaagaatatcgatgatttatgctcatcttcagaaaatcagatcacccactccacgattatggccttgagacaggcactggaagcaaaagagttaagctgccatgaaataacagctgcattttgtcatagggctgctttaattcatcaagtagtgaattgtctatccgaaatcatgttttcagaggcattgagattggctgactattacgacagcaatagaccagccatattgccacccttgtacggtataccgatatctctcaaagaccaatgtaacgttgagggtgtagacacctcactgggttatttatgtcgaactttcaaaccaaaaaccaagaatgaagaatcattgattgtcagttttctgagagatttaggagctattatatttgtaaaaaccaccgtaccttcatcgatgatggctacagatacacaatctaacacctttgggtacacatataatagtattaatttgagcttctccagtggtggatcttctggtggagagggttcgttaattggtgctcatggttccttgctgggactaggaactgatataggcggaagcatcagaattcctagtagttaccaaggattatttggtttgaaaccaacttttggacgcgtcccttacttgagggtggataattcatttgagggaagggaaacaattcccagtgtaattgggccgttggcaagagatctttcggatttgagatacttcatgagttgcgttatcaacatctgtcaaccatgggtacaagacgtcaagtgtattccataccattttgattcctctacaagtaaattacacgataattatgttgttggaatatggtatggtgacggcgttattgatcctccgcccagtgacatcagggctttaaagacgtgcgaagacctagttaataaaactaaaggaatgaaggcagttaaatgggagccttccagtgaactgagcagggaattgtttgatctcgcaaatgaagcagatgttgctgactcaggtaacgagataaaaaacgaattcgaaatttccggagaaccactcctagatattttaaaaccaatggttttggaaaacggaaggcccccatatactgttaatgaatggtgggatttgaccaaaagagtttataatgcacaacaattaatgagagattattacctttctttcccggaatcagaaaggcctgatgttatcatatctcctacaacgctgatgccatttaggcctggtgacatgctaaagacaactttacgatacattttactattcaacgttttaaatttcccatcattatctatacctgtaggtagtgtcgattgccaaattgatgggctaatggataccacttctgcgctcaatccagaagataaaatgatcaaaacatattggaatgatttaatacaatctggtgagatagatgggtttccaataggcctacaagtagttagcccgactttcaatgacaatgaagtttgtaaatttgcgtcttggctttttagcaaaatatag

SEQ ID NO: 76039 - DNA, 1767 bp, Saccharomyces pastorianus
atggcaagaccaatcgatgttagtcagctgattgctggtataaacaagaaaaaaggactagatgaaaatacatcaggtaaaatcagcaagcctaggtttttgaataaacaagaaagatctaagcaagaacgtttgaaggagaacgaagagagtttgacgcctacgcaaagtgatagcgctaaggtggagattaaaaaggtaaactctagagatgacagttttttcaatgaaacaaatgataagaagagaaatccatcaaagcaaaatggctctaaatttcacttttcttggaatgaaagcgaagatactctgagcggatatgatcctatcgtttcaactagagctatagatttgctacggaagggaaagactcctaaaaatgctgcagaatcttcatatatggggaagcattggactgagaagtccttgcacgaaatgaatgagagagattggaggatactaaaagaagactacgctattgttacaaaaggtggggcagtagaaaatccattgagaaattgggaagagctcaatataataccaagggacttgttacgtgttattatacaggagctgcgatttccttcaccaactcctattcaaaggattactattccaaacgtttgcaatatgaaacaatatagagattttcttggtgttgcctctacaggttcgggtaagactttggcctttgtaataccgatactaatcaagatgagtaggtcacctccaaggccaccatctttgaagattattgatggccccaaagcgttaattttagctccaacaagggaattagtgcagcaaattcaaaaagaaacacaaaaagttacaaaaatatggtccaaagagagcaactatgactgcaaagtaatttctattgttggtggacactccttggaggaaatttcattttctctatcggagggttgtgacatcctggtggccactccaggacgtttaattgactctttagaaaatcacttacttgtgatgaaacaggtggagacattagtactagatgaagctgacaaaatgattgatttaggttttgaggaccaagtaacaaacattttaactaaagtcgatataaatgctgactctgctgtgaatagacaaaccctgatgtttaccgctacaatgacacccgttatagaaaaaattgcagcaggatacatgcaaaagcctgtttatgcaaccattggggttgagacgggttctgaacctttgattcaacaggttgtggaatatgcagataatgacgaagacaaattcaaaaagttgaagccaattgtcgctaaatatgatccaccaataataatttttatcaattacaaacaaactgctgattggttagcagaaaaatttcaaaaggaaaccaacatgaaggtgacgattttacatggttctaaatcgcaagagcaaagggaacattctttgcaattatttcgcaccaacaaagtccaaatcatgatcgcaacaaacgttgccgcaagaggattggatatccctaatgtttccttggtagtcaatttccagatttccaaaaaaatggatgactacatccatagaattggtagaacaggtcgtgcagcaaatgagggcactgctgtctcctttgttagtgccgctgaagatgaatcattgatacgtgaactttacaaatacgtcaggaaacatgatcccttgaatagcaatatcttttccgaagccgtaaagaacaaatataacgtcggcaaacagctcagtaatgagattatatattaa

SEQ ID NO: 76040 - DNA, 1839 bp, Saccharomyces pastorianus
atggacgtaggaagttgctcagtgagaaataatccgcttgcgcagttgcacaaacatactcagcagaacaaatcgcttcagtttaatcagaagaataatgggcgtcttaatgagtcacctctacagggtaccaacaagccaggtattagtgaggcttttatatccaatgttaatgctatttcacaagaaaacatggcaaatatgcaaaggttcataaacggagaaccactgatcgatgataaaagaagaatggaaatagggccatcctcaggcaggcttccacctttttcaaacgtacattctctacagacttcagcaaacccaacccaaattaagggagtgaatgatatatctcattggtcacaggaatttcagggtagtaatagtattcaaaatagaaacacggatacaggaaattcagaaaaggcatggcagcgtggctcaacaaccgcatcaagccggtttcagtaccctaataccatgatgaataactatgcttatgcttctatgaacagtcttagtggatcaaggctgcaatcgcctgctttcatgaatcaacaacagtctggacgttctaaagaaggagtcaatgagcaagaacaacaaccctggacagatcagtttgaaaagctggaaaaagaagtctcagaaaacttggacataaatgatgaaatagagaaggaggaaaatgtgagtgaagtagaacaaaacaaaccagaaactgttgagaaggaagaaggagtatatggagatcagtatcaatctgatttccaagaagtgtgggatagcatacacaaggacgctgaagaagtcttgccatccgaattagttaatgatgacctcaatctaggagaagattacttgaaatatctcggcggtagagtaaatgggaacatcgagtatgcttttcaatctaacaacgaatattttaataatcctaatgcttataaaattggctgcctactgatggaaaacggagccaaattgagcgaggcagcgctagcatttgaagctgctgttaaagaaaaaccggaccatgtggatgcatggctaagattgggcctagtacaaacccagaatgaaaaagagttgaacggcataagcgctctcgaagaatgtttaaagttagacccaaagaatctggaggcaatgaaaactttagcgataagttatataaacgaaggttatgatatgagcgccttcacaatgctggataaatgggcagaaactaagtacccggaaatttggtcaaggatcaagcaacaagatgacaaatttcaaaaagagaaagggtttacccatattgatatgaacgctcatatcacaaagcaatttttgcaactagcaaacaatttaagcacaatagatcctgaaatacaactatgcttgggtctcttattttacacgaaagatgattttgacaaaaccatagattgctttgaaagtgcgttgagggtgaatcccaatgacgaactcatgtggaatagattaggggcttcactggccaattccaatagatcagaggaagcaatccaagcctatcatagggcactacaactaaaaccttcttttgttagagctcgctataatctggcggtatcatccatgaatataggctgtttcaaagaagcagcaggctacttattaagtgttctaagtatgcatgaagtgaacactaataataaaaaaggagacgttggatctctcttgaatacgtacaatgatactgttatagagactttgaagagagtttttatagcgatgaacagagatgatttacttcaagaagtgaagccaggcatggacctgaaaagatttaaaggagaattttcgttttga

SEQ ID NO: 76041 - DNA, 1182 bp, Saccharomyces pastorianus
atgtctagtgtaccttataattcccaacttcctatatccaaccatctagagtacgatgaagatgaaaagaagagcagaggctcaaaactaggcctgaaatataaaatgatatactggaggaaaactttatgcagttcactagcgagatggagaaagctaatactattaatatctttagctttgtttttattcatatggataagcgattccaccataagcagaaatccatctaccacaagttttcaaggccaaaatagtaacgataataagttgagtaatactggttctagcatcaactccaaaagatatgtaccaccatattctaagagatcaagatggtcgttttggaatcaagatcctaggattgtcattatattagcggcaaacgaaggtggtggtgtattgaggtggaaaaatgagcaagaatgggctatcgaaggcatatcaatagaaaataagaaggcctatgcgaagagacatggatatggattgactatcaaggatttgacaacgtccaaaagatactctcacgaatacagagagggttggcaaaaagtagatatattgagacagacgttcagggagtttcctaatgcagaatggttctggtggttggacctggatactatgataatggagccttctaaatcattagaagaacatattttcgacaggttggaaactctggctgacagagaattgaaaagttttaatcccctaaacctaagagacgacataccctatgtcgattattcagaggaaatggagtttctaataacacaagattgtggaggcttcaatttgggctcatttttgataaaaaatagcgaatggtctaagctgcttctagatatgtggtgggaccccgttctgtatgaacaaaaacatatggtctgggaacatagagaacaagatgcgttagaggcattatatgaaaacgaaccgtggattcgttcgagaataggatttttgcccttaagaacgatcaatgcattcccaccgggagcatgctctgaatacagtggtgactcaagatacttttacagtgagaaagaccatgattttgttgtgaatatggccggatgcaattttggcagagattgctggggcgagatgcagtactacaccactttaatggaagaactgaataggaaatggtacacgagatttttcttcccataa

SEQ ID NO: 76042 - DNA, 201 bp, Saccharomyces pastorianus
atgcgccgcctatatcgtcatcttgcttcctttttcttactcccttcctgccctggaaacaccatacaatccatcacatcatatcctgccaatgcactattacgcagctttcggcacgtgagtacggaaacaccagttcgggaccgggtacacaatagggatagtcaaagctgtccattttttccgctgatggatgactga

SEQ ID NO: 76043 - DNA, 276 bp, Saccharomyces pastorianus
atgaatggcctggtgataatagatatgaacaacttcgctatcgtgtatgccaatatcacttttcttttctactacttactcgactttactctaccttttcatgtttgtagatttctgtttcattctagtctcgagaatggcccacagcacggccaacagggggctgcgacaatttcgcgtagagcccattgtgaaaaaagccacccaagctattattgtacacagaagaatatggaagcaaatcgccagtgctacgtgaatgggacaaaaacatga

SEQ ID NO: 76044 - DNA, 2493 bp, Saccharomyces pastorianus
atgacatctgcattaagggttttggtatgcggagatcacccaaatctcattctgtacacatccaggtttcaacatgccaaaaatatagaattttatcttgtgaacaactcaaaaaatgccaactacgaggttagttcactattttatgggacggaacggtttcagattcaaaaccatttccaatcgctcctagatttagtagaccttaataatgaaaatagcggcttggtattcgacttgataataatgagtgcgtcttcactgcaagaaatcccgcaggtattgagagatataaaacctatgatgaataagacaacaaagatactatttgaaagtagcgggtttatatatttggagccattcatcaaggcttcagttgatctttcgctgtcaaatattttcagcattttcaccgattatgacataagacggttggacaatggctcatacaaacagttcacgaatgcaaatgccaaatccttttctgtttcgatcggtcaaacgacatccgttcacgaaaacagctattcaagtgatattattcctattttgaatacatttcagaaattgttccagaaactgtttcctagggacgttgtgactctttatgatcattctccctccgctttcttggcaaaagaatgggaactagctttgcctcaaatatgtttcgatccattattaataatattagaagagaagaatccatcaaccttggatgaccacgttttggccaaacctcttatttcaggtttactaggcgagagcttattaataataaaaaaaatgggtatagccatgaacaatccaaattttcaaaatgaacagactatattgaaacattggaagaataagtgcgaagacttacctgatgggccggcacttttatataatttcatccataaggcttcatctttgaatattgacttattgttattacagccgattttattagcagatgactttggcgtgaagacaccatatttagaatgtttgtttacaatgatgactcaatatcaattgttaaataaaggcgattctgaatggtttattagaaaggatgagaacacagcgttaactcgcgttgatgatttacaaaacagtatcgcacttaaagatggaaaaatcatgcagctgcaaaattcggaatcaaccctgaaaaatgagataaaagaacttcaaagtcaagttttgagcttaaaacaagaagtgtcctcaagtaaagcaaataatgaacaagagttggaaattttaaagaagaaagtgcaaatgggagacaattcattatttgatcgcccaaatagtaatactaatggcatatctccctctgataacattgttgatgttgatttaaattacgaaaggagtgaccaaggtaataatagtagtggtaatgatagcagaagacaatcttttttcaactccacatctgatacaacattatccagagatgaaacctcgttgaaagagcgtgagttagaagtacgaatgaaggaattagaacttcaagagcgtgagttagagttacagagaaaagccctccagcaacaacaacaatatcaacagagaccgcctaagcaagtatactccggtccttctggtacaccaaccagcggcaataacaataataaaagttacaatccaaatagaaaatcttcctatagtcggcctcaacatgtggctatgatgaccagcagaggtctacatggtcctagcgctgcaagctctagccctgtcatttctgccaacaattttgttgatccagtttcttctgggacgccatatagcagcaatagttctcgatttagtcagcaaattccatcgcagcaatacatgcatactgttaagccaacgagtagaaaaaacagaagtagtgtcatgcctaatataggttacgtcccagggctaaccaataacgagtatggtagaaaatttaacggtaatggtatgaatggtacacaaagccgtctgaattcactttcaaaccaaagtacgtttagatctcaacagggtccaccgataacacagcaaaaatcgtttcaaaataacggtggtagcatgaggacaaatcgcataccatctgcaagttacaatatttcaaatcagcaatcgggttttgttaactctatttcaagtccaaatctaagcaatttggagaatagaaacacagtacaaaacagtagaaatgcggattctgctccgtgcgttaatcaattgaacagtgactctccgccccaattacagtctctatctcaaaacggtacctcaaaagttcctcagatcaatattacgcaaccatcaccaattcggaccaactttgctacgagtgataaccctgctgctgtaataaaactagggacacctttcgaagatacagtttcagctgcggcaacagccaataatataagtacaatgggagatgaaagccgcaaagaggacgttaaggaaaaaaagaagaaaaagttcagtttctttggaaaaaggaaaaagtaa

SEQ ID NO: 76045 - DNA, 450 bp, Saccharomyces pastorianus
atgcctgtagatcaagaaaaattagctaagctgcacaagttatcagcagcaaacaaagttggtggtaccagaaggaaaataaacaagaaaggtaatttatataataacaatgacaaggataataccaagttacaagctgaacttcataaactgcatccaatgaccattgaaaacgttgccgaagcaaattttttcaaaaagaatggcaaggttttacattttaacagtgcagttgtacagattgcccctcaatgcaatctcacaatgattcatggccaaccgaaagagaatacacttaatgggctgtatccgagcgtagcctctcaattaggtagtcaagaacttgagtatttgacaggtttggcccataacctagaaaatgaacagacggtgctcgaccagctgggcgacagatgcagcgagacaaaacaacaagtgatgaatagctga

SEQ ID NO: 76046 - DNA, 1377 bp, Saccharomyces pastorianus
atgtctaacgaattacggcttgaagataactatgtaccaacttccgatacactagtagttttcaaacaattgatgaagctgccggtaacggtattatatgatcttacgctatcatggttcgcaaaattcggtgggtcatttgatggtgacatatatttattgacagaaacattagacttactgattgagaaaggcgtgaggcgaaatgttatagtaaataggatattatacgtatactggccggatggcctgaatgttttccaattagcagaaatagattgccatttaatgataagtaaaccagagaaatttaagtggcttccatcaaaagctttacggggagatgggaaaccttacgtagtaaagctccaacctgccaaatttatagaaaatttacaaacagatctagcgaaaatttaccattgtcatgtttacatgtttaaacatccctcattgccagtgttaattaccagaatacagctatttgacagcaataatttatttttgagtacgtctaatatagggagtataaataaagagtctctttacaacaagttagacaaattccaagggaaaccattaatatcaaggagaccatattacgttgcattcccgctaaattctccaataattttccattcagttgacaaggatatttatgctagactagttttgcagagcattagtcgaacgatatcagaaagagaaacaatcatcttcaaaccggtacagaaaatacccgtgaaatcaatacataatataatgactttattaggaccttcgagatttgcggagtctatgggcccatgggaatgttatgctagtgctaactttgaacggtcaccactacacgactacaaaaagcaccaaggccttactggtaaaaaggtaatggttagagaatttgatgattctttcttaaatgacgatgagaatttttacggaaaagaagaacctgaaattagacgactaaggttagagaaaaacatgatcaaattcaaaggttcagcaaacggcgtaatggatcagaaatataatgatttgaaagaatttaacgaacatgtccacaatattaggaatggaaagaaaaatgaagattctggtgagccagtgtacatttctagatacagttccttagttcctattgaaaaagttggattcactttaaaaaacgaaataaacagtagaataattaccataaaattgaaatttaatggtaatgatatttttgggggattacacgaactatgcgataaaaatttaataaatattgataaagttcctgggtggttggctggagaaaatggatcgttctcaggaacgataatgaatggagattttcagcgagagcaggttgctaaaggtggtttactgtag

SEQ ID NO: 76047 - DNA, 1548 bp, Saccharomyces pastorianus
atgtcgaaattgggacaagaaaaaaatgaagtaaattcctctgatgtaagagaggatagagttgtgacaaactccactggtaatccaatcaatgaaccatttgtcacccaacgtattggagaacatggccctttgcttttgcaagattataacttaattgattctttggctcatttcaacagggaaaatattcctcaaaggaatccacatgctcatggttctggtgccttcggctattttgaagtaaccgatgacattactgatatctgcgggtctgctatgtttagtaaaattgggaaaagaacgaaatgtctaacaagattttcgactgtgggtggtgataaaggtagtgccgacacggttcgtgatccaagggggtttgccaccaaattctacactgaagaaggtaatttagattgggtctacaataatacaccggtattctttatcagagacccttccaagttccctcactttatccacacacagaagagaaacccacaaaccaacctaagggatgctgacatgttttgggatttcctcaccactcctgaaaatcaggtggccattcatcaagtaatgatccttttttcagaccgtggtacccctgccaactaccgtagtatgcatggttattctggtcatacctataaatggtccaataaaaacggagattggcattatgtgcaagttcatatcaaaaccgatcaaggaataaagaatttgaccatagaagaggctaccaaaattgcgggatccaatccagattactgccagcaggatttatttgaggctattcagaatggaaactatccttcctggacagtttatattcaaacaatgaccgaacgcgatgccaaaaaattaccattttcagtctttgatttgactaaagtatggcctcaggggcaattccctttacggcgtgtgggtaagattgttttgaacgagaatccactgaacttcttcgcacaggtggaacaagctgccttcgcccccagtaccacggttccttaccaagaagcaagcgctgatccagtattacaggcccgtttgttttcatatgcggatgctcatagatacaggctaggtcctaacttccatcaaatacccgtaaactgtccatatgcatctaaatttttcaatcccgctatcagagatggaccgatgaatgttaacggcaacttcggctcagaacctacatatttggccaatgataaatcgtacacgtatatccaacaggacagacccattcaacaacaccaagaggtatggaatgggccagctatcccttatcattgggcaacatccccaggtgatgtagatttcgtgcaagcaagaaatctctatcgcgttttgggtaaacaacctggacagcaaaagaacttggcatataacatcggcattcatgtagaaggcgcctgtcctcaaatacagcagcgcgtttatgatatgtttgctcgtgttgataagggactatctgaggcaattaaaaaagtagctgaggcaaaacatgcttctgagctttcgagtaactccaaattttga

SEQ ID NO: 76048 - DNA, 1152 bp, Saccharomyces pastorianus
atgcaaaaccctccgttaattcgtcccgatatgtataatcagggaagcagctcaatggctacttataatgcctctgagaaaaatctaaatgagcatccttctccgcaaattgcacagcccagcacgtcccaaaagttaccttatagaataaatcctacaaccactaatggtgacaccgacatatctgttaacagcaatcctatccagcctcctttgccaaacttgatgcatctatctggtccgtctgactatagatcgatgcatcaaagtcctatacatccatcttatatcatccctccgcattcaaatgaaagaaaacaatcagcttcttacaacagacctcaaaatgctcatgttagtattcaaccttccgtggtattcccccctaaaagttattccatatcttatgcaccttatcaaataaatcctcctttaccaaatggacttccgaaccagagcatatctttgaataaggagtatattgcagaggagcaactatcaaccctcccatctcgcaataccagtgttaccactgcacctccttcttttcaaaacagtgctgataccgctaaaaattcagctgataataatgataataatgataatgtaaccaaacctgttcctgacaaagacgcccaactcataagtagttcaggaaaaactttaagaaataccagaagagctgctcaaaacagaaccgctcaaaaggcatttagacaaaggaaagaaaaatacatcaagaacctcgaacaaaaatcaaagatatttgacgatttactagcagaaaataattacttcaaatcattaaacgattcattaagaaatgacaacaacattttaatagctcagcatgaagctataaggaatgcaattactatgttaagaagtgagtatgatgtcttatgtaacgaaaacaacatgttgaagaatgagaatagtataataaaaaatgaacacaacatatcaaggaatgaaaatgaaaacctaaaacttgagaataaacgcttccacgctgaatatatacgaatgatcgaggatattgaaaatactagaagaaaggaacaagaacaacgagatgaaatagagcaactaataaaaaaaataagatccctggaggaaatagtagggagacactcggatagtgccacgtga

SEQ ID NO: 76049 - DNA, 513 bp, Saccharomyces pastorianus
atgagttcaagttcttatagggattcatattttcaataccgccatttaccagcaccacatcacatattatatgcggaatggaatcaagatatactggcgcttccggacgaagtggcaaatattacaatggctatgaaagataatactcgcaccgacgcggaggagggaagagctccccaagatggggaaaggaattctaatgtacgcgagagcgctcaaggtaaggcattaatgacaagtgaacaaaatagcaaccgctactggaactcttttcatgatgaagacgattggaatctattcaatggcatggaactggagagtaatggagtagtgacgtttgctggacaggcgttcgatcattctttaaacgggggaaccaattccaggaacgacggtgccaatgagccaagaaaagaaacgataactggttctatttttgataggcgcatcacacaattggcgtacgcaagaaataacggttggcacgaactggctctcccacagtcacgatga

SEQ ID NO: 76050 - DNA, 1689 bp, Saccharomyces pastorianus
atgcctttgaagtcgttttttttttcagcatttctagttttatgcctgtctaaattcacgcaaggcgttggcaccacagagaaggaagaatcgttatcgcctttggaactaaatattttacaaaacaaattcgcctcctactatgcaaacgacactatcaccgtgaaaggtattactattggcggctggctagtaacagaaccttatatcacgccatcattatatcgtaatgctacgtcactggcaaaacagcaaaactcttccagcaatatctccattgtcgacgaatttactctttgtaaaaccttaggatataacacctctctaactttattggataatcacttcaaaacttggattacagaggatgattttgaacaaatcaaaaccaacggtttcaatttagttaggatccccatcggatattgggcgtggaaacaaaatactgataaaaacttgtacatcgataacataactttcaatgatccatacgtaagtgatggattacaactgaaatatttaaataatgctctcgaatgggcgcaaaagtacgaactaaatgtatggttagatttacatggtgctcctggatcccagaatggattcgataactccggtgaaagaatactctatggcgatctaggctggttaaggttgaataatactaaagaactgactctggctatttggagagatatgttccagacatttttaaataaaggtgacaaaagtcctgtggtgggtattcaaatcgtcaacgaaccgcttggtggcaaaatcgatgtttcagacataacggagatgtattacgaagcatttgacttgttcaagaaaaatcagaattcgagtgacaacactacgtttgttattcatgacggttttcaaggaatcggtcactggaacttggagctaaacccaacctaccagaatgtatcgcatcattatttcaatttgactggtgcaaattacagctctcaagatatattggtcgaccatcatcattatgaagtgtttactgatgcgcaattggccgaaactcagtttgcacgtattgaaaacattatcaattatggggactctatccacaaagaactttcttttcacccagcagtagtcggagaatggtcaggcgctattactgattgtgcaacctggctaaatggtgtcggggtgggtgcacgttacgatggatcatactacaatacaacgttgtttaccaccaacgacaagccagttggaacatgtatatcccaaaatagcttagctgattggacgcaagattaccgtgaccgtgtgagacaattcattgaggcacagctagccatttattcgtcaaaaacaacgggatggattttttggaattggaagaccgaagacgccgtagaatgggattatttgaagctaaaagaagctaaccttttcccttcccctttcgacaactacacgtacttcaaagcagatggatctatcgaagaaaaattctcatcctctttatcagcacaggcatttccaagaacaacgtcatcggttttgtcctccactacgacttccaggaagggtaagaatgctgcaatttctaataaactaacaacttcgcagctattaccaatcaaaaatatgagtttgacctggaaagcgagcgtatgcgcactcgctatcaccattgccgctctttgcgcttctctttaa

SEQ ID NO: 76051 - DNA, 2295 bp, Saccharomyces pastorianus
atggtgaacgaattagagaatgtgccacgggcgtcgaccttgacgaatgaagagcaaacggttgatcctagcaataacgactcacaggaagatattagtctgggtgattctaacgaaattacttcgttggcatcattaaaggctatccgatcaggaaatgaagaggaaagcgggaacgagcaggtgaatcataatgatgaggccgaagaagatcctctgttaactcgctaccataccgcttgccaaagaggtgatctagcgactgtcaaagaaatgatacatggaaagttgctcgaagttaataacgacggtgactctacggaacatatcactggtttgcattgggcaagtattaataacagactttctgtagtggattttctagtttcacaaggcgctgatgtcaatgcaagggctggtgctttgcatgccacaccattacattgggctgcaaggtatgggtacgtgtacattgtcgattttttgcttaagcatggagctgatcccaccatgaccgatgaccaaggtttcaatctactacacttatctgtgaacagctcaaatataatgctagttctatacgttttattcaacgttgtcagcaaaggtcttttagatatagattgccgagacccaaagggcagaacttcactactatgggctgcttaccagggagattccctaactgtagcagaattgttgaaatttggtgccagcataaagatcgcagatacagaaggattcaccccactgcactggggcactgtaaaagggcaaccacatgtactaaaatacttgattcaagatggtgcagattttttccaaaaaacggataccggaaaagattgctttgctattgctcaagaaatgaacactgtgtactcacttagagaggctctaacacattctggattcgactaccatggttatcccattaaaaaatggttcaaaaaaagtcaacatgctaagctcgttacattcataacgccatttctatttctaggaatcgcatttgctcttttctctcatattaaccctttgtttgcaatcattgtcctttttttattggccattgccactaacaaaggcttgaacaaattcgttctgccgtcatatggacgaatgggtgtccacaacgttaccttgttaaggtcacctttgttatccggtgttttttttggcactttactttgggtgactatcgtttggtttttcaaagttatgcctcgaacattttctgatgaacaatatactaacatcctaatgctggtaatacttgtttctgtattttacctttttgggcagcttgttattatggacccaggatgtttgccagaagaaactgatcatgagaacgtgcgacaaacaatctcgaacttgctcgaaatcggtaaatttgatacgaagaacttttgtatcgaaacttggattagaaaacctctaagaagcaaattttcgcccttaaacaatgctgtggttgcaagatttgatcattactgcccttggatctttaatgatgtcggactcaaaaatcacaaagcatttatattttttattacattaatggaaagtggtattttcacatttcttgcactttgcctggaatattttgatgaacttgaagatgcacacgaagatacatcccagaaaaatggcaaatgtttcatcctaggcgcttcagatctctgttcggggttaatatatgatagatttgtctttctgatattattatgggctttactccaatctatttgggttgcaagtttgatcttcgtccaagcctttcaaatatgtaaaggaatgaccaatacagaattcaatgttttgatgaaagagagtaagtccattggccccgatgggttatctttcaatgaaaacttcaatactactccagaaggatttgcgccgtcgattgatccgggtgaggagagtaatgatactgtactagcgccagtcccaggctcaacgataaggaaaccacgcacttgttttggcgtttgttacgcggtgactggtatggatcagtggttagcggttataaaagaaaccattggcatcaaggatagcaccggacataatgtgtattcgattacatcaagaataccaacaaattacggttggaaaagaaatgttaaagacttttggcttacaagcgatataaatgcgcctttgtggaggcgaattttgtatcctccttcgggctctaaagctttgctcaacgggatagaagttgactattttaagctttacaaattgccaaataaggatgttgaacaaggaaatgatatggtatga

SEQ ID NO: 76052 - DNA, 1014 bp, Saccharomyces pastorianus
atgaagaatgataataagttgcaaaaggaagcacttatgcgactatcgcagctaagatttccatttgccgatgctccaagtatagtacaagcgcatcaaaaagatgaacaaatccagggccttttgattatgaaagtgactgaattgtgcaaattggtaaagagtcaattgtttgttaactcttaccctaaggaactgtccatatttgtcaagctcctgtatttgctctttactacaggaagacgtggtagaacgttaggtgaggaatatgttgacttgacatacactaataggaagggtaccagacttgcaggacggctcaaaatgattgtattcgctttcgcttatcctttatgtccatatttcatcaccaaactatacaagaaaataatgaaggacaacaaggaaagtaaaattgaagatactgaaagtgttgccgcgttttgtaagggccttttagatttcattttagacgtacacatgaccctcttttatttcaaaggagctttttacagtattttcaaaaggatttttggtatgaaatatgtttttaaacatatattgtcaaaaaatgaggccaattttagagaagagggctcacaaaagtacaaagtattaggttatatcctattagctcaaaatgttatgaaatggtaccctgtcctaacctctacgctcgggtcctggatttatgggagaaaaaggaccaatgattcaattactaggtcgtctgttggtctacaggagcgttcagaacatgaatctatagaaggcataccgaaggaatcgcagctgactcatataaatttgtcagataaaaaccaattgccatttattccagaagcctcgagaaaatgcattctatgtctcatgaacatgagtgatcctagctgcgcgccatgtggacatctattttgttggagttgtcttatgagctggtgtaaagagaggccagaatgccccttgtgcagacaacactgtcaaccacaggaaattctggtcctgcggcaatag

SEQ ID NO: 76053 - DNA, 324 bp, Saccharomyces pastorianus
atgccttccacttgtttggtgactgtagaaacacaagacccacaggtcataccttgtacactcagtagtccttccttcgtacttatggctgtaatttcagaatctcttagtatctcacagtcaaatccacaatcctctataatttccttaatagaatcggcggtaacctcgttatcgtatgtcacctggcactcattagtcactaaactaatatcacattttgttacaccctttaaagctcgtaactgcgtattgattgtattagtacaggcgctgcatgtcattccatgtacagcaagtatcacttctctcatttcgttttaa

SEQ ID NO: 76054 - DNA, 3015 bp, Saccharomyces pastorianus
atgagagaagtgatacttgctgtacatggaatgacatgcagcgcctgtactaatacaatcaatacgcagttacgagctttaaagggtgtaacaaaatgtgatattagtttagtgactaatgagtgccaggtgacatacgataacgaggttaccgccgattctattaaggaaattatagaggattgtggatttgactgtgagatactaagagattctgaaattacagccataagtacgaaggaaggactactgagtgtacaaggtatgacctgtgggtcttgtgtttctacagtcaccaaacaagtggaaggcattgagggtgttgaatcggtagtcgtttccttggtaacggaagagtgccatgttatttatgaaccgtccaagacaacgctagaaaccgtcagagaaataattgaagactgtggatttgactcaaatattattatggatggcaacgggaatgcagacatgaccgaaaaaacggtgatcttgaaagtaactaaggctttcgaggacgaatccccactcatactttcttcagtaagcgaaaggtttcaatttttgttagacctaggtgtaaaatcgatagaaatttctgatgatatgcacacactcaccataaaatactgttgtaacgaactcggcattagagatttattgaggcaccttgagaggaccggatataaattcactgtattttccaatttagataatactacccagttaaggcttctctctaaagaggacgagataagattctggaaaaaaaacagcataaaatccacccttttggctataatatgtatgctattgtatatgattgtccctatgatgtcgccaacaattgttcaggaccgcatattcccttacaaagaaacctcctttgttagaggtctgttctacagagatattttgggtgtaatattggcaagctatattcagttcagcgttggtttttacttttacaaggcagcatgggcatctttcaagcacggttcaggaaccatggatacactagtttgtgtttccactacttgtgcatacacattttctgtgttttctttagttcacaatatgttccatccctcaagtactggcaaactcccaaggatcgttttcgacacatcaatcatgatcatttcatatatttccatcgggaaatatttggaaactttagctaaatcacaaacatcaaccgcactttctaaattaattcagctcactccatcggtgtgttcaattatatctgacgtggagcggaatgaaaccaaggaaattcccatagaattattgcaagcgaacgatatagtggagattaaaccagggatgaaaattcctgctgatggcatcataacaagaggtgaatctgaaattgacgagtcgttaatgacaggcgaatccattttggtgcccaagaaaactggttttccggttattgctggttctgttaatggacctggacatttctacttcagaactactaccgttggggaggaaactaaattagcaaatactatcaaggtaatgaaagaagcacaattgagtaaagctcccattcaggggtatgcagattatttagcctctatttttgttccggggatcctaattttggcagtattgactttctttatttggtgttttattttaaacatctcggctaatcctcccgtcgctttcaccgcaaatactaaggctgataatttttttatttgcttacaaactgctacttctgttgtcattgtcgcatgcccatgtgcattgggacttgccacgccgactgctataatggtgggtacaggggttggagctcagaatggtgtcttaataaagggcggagaagtattggaaaaattcaatagtattactacttttgtttttgataaaacaggtaccttaactacaggttttatggttgtgaaaaaattccttaaagattcaaattgggttggaaacgtggatgaagacgaagttctcgcctgtataaaagcaacggaatccattagtgaccatccagtttcgaaagcaattatacgttattgtgatggtttgaactgtaataaggctttaaatgccgttgttttagaaagcgaatacgtgcttggaaagggaatagtctcaaagtgtcaagttaatggaaatacttatgatatttgtattgggaacgaggcgctgattttggaggatgcattaaaaaaatccggatttattaacagtaatgtcgaccaaggaaacactgtatcatacgtatcagtaaacgggcatgtgtttggcttgttcgagattaatgatgaagttaaacatgattcttacgcaacagttcagtatctacaaagaaatggatatgaaacgtatatgattactggcgataataactcagcagcaaaaagagtcgctagagaagtaggtataagcttcgaaaatgtttacagcgatgtgtcacccacaggcaaatgtgatctcgtgaaaaaaattcaagataaagaaggtaataacaaggttgctgttgttggcgatggcattaacgacgctcccgctttagcactgagtgatctaggtattgccatttcaacaggtgcggagattgctattgaagcagctgatattgttatactgtgcggtaatcatctgaatactaatagtttgagaggactggccaacgccatcgatatttcactaaaaacgttcaaaagaataaagctgaatttgttctgggcactttgctataatatattcatgattccgattgctatgggtgtgctcattccttggggcataactcttcctccaatgctcgccggtttagcgatggcattcagctcggccagtgtcgttctaagttcattgatgttgaagaagtggactccaccggatattgaatcacatgggatttcagatttcaagtccaaattttcgattgggaatttttggtcaaggcttttttctacgcgggctattgcaggtgagcaagacatagaatcacaggccggactaatgtcaaacgaagaagtcttgtaa

SEQ ID NO: 76055 - DNA, 1098 bp, Saccharomyces pastorianus
atgggaaagaaaaatagaaagggaaaagaaaataatgctgctaaaatctcttttctaaaagtagagaatattaaaaacactaattcgggattggagcttccatcgcaagactatacaaacgttgaagaaaaagaaagtagcccgaaaactgactttccattaattacaaaggaacatgtaaacacgaaaactgacagcaatattctcgattatcccaccataggcgatttagtttcctcagtagagaaattatgtgtcttgaaagaattgaagatagcatttccagaagtagatgatacattaattaaagccattttaattgcctcccaaggggttttggagccggcattcaattctttactctactactcaagtccggaggaaaacactgactttgcattaccaatgaagccgataagtgtggaagactatagtaaaataaatgtgtctgagattttgcaacgtgaaatattcgatgatattgaagacgaattttctggtcaaggaataaatggctccatggtaatttcaaaaattgaatcagaactaagttctttggccgaacacattggcaacattagcacccccggatcgaatagagaagtcgccgaatcgactaggaacgtggctgttgcagagggccataatacaattttatcaaacgaagatagtatactcaagggaaaagagaagggaaaagaggaggaaaaggagaagggagaagaaaagggagttaacagcttaaaaggcgccgctgtgaaagttgttgcgaagtcattgaagaataatcgcattcccgtcactgtgaagagaaatgagccttcaaacaatttatttgacgttttaaactgcgacgaaagcgaggaagaagaagagcaagatgtcgaaaccaatacgtcgaatcaagaaaggaagaaccagggcggtaatactgaagtgccggaggctcagcgtgacagtgcagataggttacctgccaaggacgacggtggatacaaatctgcctttggcactgatagttgtggtctatttgcagctgacgctaaagatgaaaaaaagcaggttcatccatctagacaagaattaagttttacgtag

SEQ ID NO: 76056 - DNA, 372 bp, Saccharomyces pastorianus
atgttttcttgccttttacattccacacgccctactgacagctattgcactttggcggcaccactcagccagaccgcccgtacccgtacgatgaccttccatgcagccacggcgaaacgcaagaccgagcattcgggaatcaaggaatctaacttgcatttgtcccgggtcctactaagctctttctgccgtgcaaaaggacgtttcgtttcgtttttcatatgctatccatttccttttgggctaactaggtttccgcgggttttgtggtcaataggactcgacaaatcattatttacgcgcgtgcatttttcgccatcattcttttcccttcttgcaccactacaattttccgggattgtacgatcgtag

SEQ ID NO: 76057 - DNA, 168 bp, Saccharomyces pastorianus
atggattctgccaagatcattaacattatattatcccttttcttaccaccagtcgccgtttttctagcccgtgggtggggtactgactgtatagtggatatcattttgaccattttggcttggttcccaggtatgctatatgccttgtacattgtcctacaagattaa

SEQ ID NO: 76058 - DNA, 318 bp, Saccharomyces pastorianus
atgaacgtttcttttaggtcaaactatcaccaaggtacaatccgatgtagtgtaacggctatcacatcacgttctcaccgtggagaccggggttcgactccccgcttcggagtttcttttttattttctagaaaaatccacatgctgattcttttaacgttactgtttcactgtgatgctactagtcatattcttcttatatcaattttttttctattgctgtttgcattaccgcaacatacgatgggaataaacagcacaagctgttgtgtacatttttcctcatcatataactacaatgtacataagttagcttga

SEQ ID NO: 76059 - DNA, 1053 bp, Saccharomyces pastorianus
atgaccgtttccaacattgggggggaagaacgactaataattttaccagacgattatgaaacttcgaaaactataaacacttttacactgccgccaccttccaatattacatccaaacctcgtatcgagctcctcgaaaatattaatggaaaactttacgaaataagatcttttcaattcggcaaagggccctcgtattcacatgaggaagatttggcaaatgataaatatcactatactaaggaaaatcacccgatcaaatcaactttcattgtaaatacgtctgatcccaccgatggttatgtttttaactcaagcaaaatacacttttgttctttatacgatattgcttttagtttgattggattttactatagaaacagtgtttcagcagatgaacaagattactccaattcaagtgatactggtgaaaaccaaaaaagcaacagcaaaaccaatgagaaatttcttacggtgcgtgattaccatgatttcttaacggataaccatgacaagaattgggaaaacatttctttaagtcgtctcaagagtggcttagcaaaagttagtgaaaccattgaggaagctggtgacgtctattacaagatcacatctgcaatgataacacaatttttgttaggcaaggtatcaaaaattgtagaaaactttcctccaagtatccctacacttaaaaatgccccaacggaaataaatcagtgctacaaggtagttatggctacaaatcttttagtttccctgattccaagggcggcctaccataatttacttaccttttcacctacaatggatagtggttgcctaaatctggatataaaagctagcttcatagaactcgaaaactacgagactacgaacgaattacagaatgctgaaagagaattactgatgaaaagtgccatgaatgtaggcctaaattcgaatggcagcgtttcattgccagtgaaaaaagttaccaaaaaaatagttcaaaataaaaaaccaaaagtagccataggaaaaggggccattgatggattttttaaacgtaagtag

SEQ ID NO: 76060 - DNA, 918 bp, Saccharomyces pastorianus
atggccaaagacattgagatatccgcatccgagtcaaaatttatcttagaagcactgagacagaattataggttggacggccgctcctttgatcaatttcgtgacgtggaaataacgtttggtaaagaatttggtgatgttagcgtaaaaatgggcaacaccaaagttcactgcaggattagttgtcaaatagcacaaccatacgaagacaggccatttgaaggattatttgtaatatctacagaaatatctcccatggctggttctcaatttgaaaatggaaatatcacgggagaagatgaagttttatgttcaagaataattgaaaaatctgttaggcggtcgggcgcattggacgtggaaggactatgtatcgtagctggaagtaaatgctgggctgtgagagctgatgtacatttcctggattgtgatggtggatttattgacgcttcgtgtatcgccgtcatggcaggattgatgcattttaagaaaccagatataactgtccatggcgagcagatcattgttcatcctgttaatgaaagagagccagttccactaggtatactgcatattccaatatgtgtaactttttctttcttcaatcctcaagacaccgaggaaaacataaaaggtgagactaactcagaaatttccatcattgatgcaacattgaaagaggaactactgcgagatggtgtattgacggttacgctaaacaaaaaccgtgaagtggtacaagtttccaaagcgggtggtttaccaatggatgcgttgacgctaatgaaatgttgtcacgaggcttacagcattattgagaaaataactgatcaaatactgcagcttttaaaggaggattcagaaaagagaaacaagtatgcagccatgcttacatctgaaaatgcccgcgagatctaa

SEQ ID NO: 76061 - DNA, 315 bp, Saccharomyces pastorianus
atggaagatacctcgaggtgcatcgatgatgtactgaaaataggacaacaggagaaggaaataagacaggcagagttttctgaggcacaaggggagagagaggaggttaagtgtattgattacacagtagatttggaagcaggtcttccgcgccacgagagtagtggaaaaagtaataccctcaaacagtgttataacgccgttctagggtttctcgaggaactcatcatcgtcattattattgtgttgctgttgtacagtttgacaatggtaggtcttttttatgtgatgacgatgacgaagtttttgttttaa

SEQ ID NO: 76062 - DNA, 345 bp, Saccharomyces pastorianus
atgttgagagcgttccgctgttctatacatacttcgagggtattgttacatgatgctggagtgaaattaactttcttctcaaagcctaattgtgggttatgcgatcaagcaaaggaagtgatagatgatgtatttgaaagaaaggaatttcataataaagcagtttcactagagatagtcaacataactgaccgaagaaacgcaaaatggtggaaggaatattgcttcgacataccagtacttcatattgagaaagttggtgatcctaagtcgtgcaccaagatcctgcactttcttgaagaagacgatatcagtgataaaataaggagaatgcaatctagatga

SEQ ID NO: 76063 - DNA, 330 bp, Saccharomyces pastorianus
atgtattctttccacgtttctgccactttgggagcatctctatactgtagaagcaaccactttgaggcactggaaatagattcttgggaatcttccaacgtatttaatttggttgtgaattgctcagaagagaaaggcataccgtctattttaatcttggattattgctttcttcaaattttctacctcttcgttaaaaccttcttcgcttgtacttatattattatgttggcttttcaagtttatatatttttaaaggaaaaaaataactttttcatttttcgttataaaacagaaccgttatacatattgagatggttaaggtcgtag

SEQ ID NO: 76064 - DNA, 2025 bp, Saccharomyces pastorianus
atgagtaggaaaaattctaagaaactaaaagtctattacttacctgtaacgctaacccaatttcaaaaggatttatcagaaattttgatatccctgcacgccaagtcattcaaagcaagcctaataggagaaccacaggcagatgcagtgaacaagccttccggcttacctgctggccctgaaacacatccgtatccaacgctatcacaaaggcaattaacctatatctttgattcaaacataagagcaatagccaatcatccttcccttctagtggaccattatatgcctcgacagcttttgagaatggagcccacggaaagctctattgctgggagccacaagtttcaagttctcaaccagctcattaattcgatatgctttagagacagagagggctcaccaaacgaagttataaaatgcgccatcatcgcacacagcataaaggaattagatttgctagaaggtttaatattaggcaagaaattcagaaccaagagactttccggtacatctctttataatgagaaacacaaattccctaatctacctacggtcgattccacaataaataaagatggaacaccaaattctgtaagcagcacaagctctaattccaattcgacctcctatacaggttattcgaaggacgactatgattactcagtgaaaagaaacctgaaaaaaagaaaaataaatacagatgactggctgtttttagccactaccaaacatctcaaacacgatcaatacctattggctaactatgatatagatatgataattagttttgatccaatgttggaaattgaattgcccgctttgcaagtactgaggaataatgccaataaggatattccgataataaagctattagtacaaaattctccggatcattacctgttagattctgaaatcaagaattcaagtgttaaatcgtcgcatttgagcaataacggtcatgtcgatgatagccaagaatatgaagagatcaaatcctccttactatattttttgcaagcaaggaatgctccggtgaacaactgtgagattgattatattaaattggtaaagtgttgtttagaggggaaagattgcaataacattttaccggttttggatttgataacgttagatgaggcctccaaagattcgagcgattctgggttttggcagcctcaattaacaaaattgcaatattcgtctacagaattgcccctttgggacggaccattggatatcaaaacctatcaaacagagttaatgcatagagccgtcataagattgcgagatatacaggacgagtatgccaaaggcactgttccactgtacgagaaacgattaaacgaaactcaacggcaaaatcagttggatgaaataaagaattctgttggtcttacattcaagaaaaaacaagaaatggaaaaatccattaatgactctgaaaaaaggttgaagcatgcgatgacagaatctaccaagctacaaaataaaataaatcacttactgaaaattaggcaggaactagagaatttcaacaaattgccctcgaatactacttcatcagaaaatcatctggaagagggatctgccttaacagacaagttgaaggaatacatagacaaaaatgcgactctttttaataagttaagggaactccaacaagcaaatgcggaaaaatcaaagctcaatgatgaactacgttccaaatatcaaatagaatcttcaaaagccgcagagtccgcgcaaacattgaaaattttgcaagaatcaatgaagtctttagaaaacgaagttaatggtccactgactaaattttccacagaaagcttgaagaaggagctggaacgtttacagaatgattttcagtcgcttaaagcaaaaaacaaattcttaaagaattacataaccttaatgaaccgacagtacgacttaaaaaacaaaaacaacgtccaggtggaaaaagctgccgcaaatggtacacggtttagatcaacaagatccaatacccctaattacacatga

SEQ ID NO: 76065 - DNA, 681 bp, Saccharomyces pastorianus
atgaaggtaaaccattcaatttcaagattccgccccgcttcatggttcgaaaagacaaagataattccaccccaggtatacatctttaggaacctagagtatggacaagtactatattctcaatttcccaacttttcgcaaacacaggtggataagctgtttgtgagaccaaactggagcaacagaaagccatcattgaggagggacatctggaaatgtatgtgtgtagtgaacttgcaaaactataagcagagtgtccatctataccagaacctctgccggttgagatacctccgtgatgtggcacagcgtaaggagagtgacaagctaagaaaaaaggactctaacggacacgtctggtatagcggacagtatagacctacatattgtcaagaggcagtggcagacttgcgggagtccttgttgaaggtgtttgagaatgccacacaagcagaaaagcagacagcacccgccaaaaaaccgtccatatactgggaggacccatggaggatgggtgacaaggacaaacattggaattacgatgtgttcaatgctctggggctggaacacaagcttattcagcgtgtggggaacattgcgagggaagaaagcgtgattctgaaggaactagctaagctcgaatcacatcctacagagcagacggaagtgtcttcccagtag

SEQ ID NO: 76066 - DNA, 639 bp, Saccharomyces pastorianus
atgtttaatagagtctttaccaggtcatttgcatcaagcttaagagctgctgcttccaaagctgctgctcccccaccggtgagattgttcggtgttgagggcacttacgcaacagctttatatcaggccgctgcaaagaactcctctattgatgctgcctttcaatctttgcaaaaagttgaaagcacagtcaaaaagaatccaaaattaggtcacttattactgaatcctgcattgtcattgaaggacagaaattctgtcattgatgccatcgtggagactcacaagaatttggatggttatgtcgttaacctattgaaggttctttccgaaaataacagactgggatgttttgaaaaaattgcgtctgactttggcgttttaaacgatgctcacaacgggttacttaaaggtacagtgactagtgctgaaccattggatcctaaatctttcaagaggattgaaaaagctttgagcgcctccaaattggtggggcaaggtaaatctttgaagctggaaaacgtggttaagccagagattaagggtggtttgattgtagaacttggtgacaagactgttgacttaagcatttctacgaagattcaaaaactgaataaggtcttagaggacagcatctaa

SEQ ID NO: 76067 - DNA, 1632 bp, Saccharomyces pastorianus
atggaaaaatcactagcggatcaaatttccgatattgccattaaaccggtcaataaagacttcgatattgaagatgaggaaaatgcatctttatttcaacacaatgaaaaaaatggagaaagtgatttaagcgactatggaaatagcaacacagaagaaaccaagaaggcgcactatttggaggtggaaaagtctaagttaagagcagagaaaggtttagaactaaacgatccaaaatatacaggtgttaaaggttcaagacaagcattatatgaagaagtttccgagaatgaggacgaagaagaagaagaagaagaagaggaagaaggagaggaagaagaagaggaagaagaaaaagaggaagatgctctttcattcaggacagattctgaagatgaagaagtagagatcgatgaagaagaatcagacgcggacggcggtgaaacggaggaggctcaacagaaaaggcatgcactatcgaaactaattcaacaagagactaaacaagctattaacaaactgtctcaatcagttcaaagagatgcttcgaagggttattccattttacaacagacaaaattatttgacaacatcattgatttgagaataaaactacaaaaagctgtaattgcagcaaataagcttccattaactacagagtcctgggaagaggctaaaatggatgattcagaggaaacaaagcgtttgctgaaggaaaacgaaaaactgttcaataatttattcaatcggttgataaatttcagaataaaattccaacttggcgatcatatcactcaaaatgaagaggtggcgaagcataaattgtccaaaaaaagatctctcaaagagctttaccaagaaactaatagcttagactcagaactaaaagagtacaggactgccgtattaaacaagtggtctaccaaagtttctcctgcatcaggtaacgctgctttatcatctaacaaattcaaagctatcaacttacctgcagatgtacaagtcgaaaaccaattatccgatatgtcccgtttgatgaaaagaacaaagttgaacaggagaaacataacgcctttgtatttccaaaaagactgtgctaatggcaggctaccagaattgatttctcccgttgtcaaagatagtgttgatgacaatgagaattcggatgatgggcttgatatcccgaaaaactatgacccaagaagaaaggataacaatgccattgacattaccgaaaacccatatgtttttgatgacgaagatttttaccgtgttttactaaacgatttaattgacaaaaagatttccaacgctcacaattctgaaagtgcagcaattacaatcacctcaactaatgctcgttcgaacaacaagctaaagaagaatatcgatactaaggcttccaagggtaggaaattgaactactcagttcaagatccaattgcgaattatgaagcccccatcacatccggatacaaatggtcagacgaccaaatcgatgaattctttgcgggattgttaggtcaacgagtgaactttaatgaaaatgaggatgaggaacaacatgccagaatagaaaatgacgaagaattggaggctgttaaaaacgatgatatccaaatctttggttga

SEQ ID NO: 76068 - DNA, 1287 bp, Saccharomyces pastorianus
atgaaggatgctaatgagagtaaatcgtatactatagtgatcaaattaggctcttcatcgctagtagatgaaaaaaccaaagaacctaagttagctatcatgtcgcttattgtcgaaactgtagtcaaattgagaagaatgggacacaaagttatcatcgtgtccagtggtggtattgctgttggtttgaggactatgcgtatgaataaaagaccaaaacatttagcagaagttcaggccatcgcagctattgggcagggtagattgatcgggagatgggatcttctgttttcgcaatttgatcaacgtatcgctcaaattctattgaccagaaatgatattctggactggacccaatataagaacgctcaaaacacaattaatgaattgttgaacatgggcgttattcccattgtgaatgaaaacgacacactatctgttagagaaatcaaatttggtgacaatgacactttatcagcaattacttctgctttaatccatgcagattatcttttcttactgacagatgttgactgtttgtatactgataatccaaggacaaacccagatgccatgccgatcttagttgtcccagatctctcaaagggtttgcccggtgtgaatactgctggtggttcaggttctgacgttgggaccggtggtatggaaactaaattggttgctgcagatttggcaacgaatgccggtgttcatacgttgatcatgaaaagcgatacacctgcgaatataggtaaaattgtcgagtatatgcaaactctagaacttgacgatgaaaataaagttaaacaagcatataatggcgatttaacggatttgcaaaaaagagaatttgagaaattaaaggctcttaacgttccactacatacgaagttcattgctaatgataataaacaccatctaaagaatagagagttttggattttacacggtcttgtctctaaaggcgctgttgttatagaccaaggtgcgtacgcagccttaacaaggaaaaataaggcgggattattgccagcaggtgttattgatgttcagggcactttccatgagttagaatgtgttgacataaaagttggtaaaaagttaccagatggcacgttagatccagattttcccttgcaaacagtaggcaaggcaagatgcaattacacgagttctgaattaactaaaattaaaggtttgcacagtgaccaaatcgaagaggaattgggctataatgacagcgaatatgtcgctcatagagaaaatttggcattcccacctcgttga

SEQ ID NO: 76069 - DNA, 2079 bp, Saccharomyces pastorianus
atggccaagagactgttagaatcaagccaaaatgatcaggccagtcgaaaaaactcaaagattgagaagaaagaagtatcgttttatgaggaggaagaaacagatgattcttttgatagtttttaccaggatgaagaagataatttaagtgatgttgattgggaagaagtttctttagatggaagcttaactgtcacatttggcaatatacgcagagacagggagaaagtaagcaagtacaaaagaaagcataataaaaaagcattcaattatcagcgacttaaatatggactccatttgataatgattccatttatgttatttttgttaaaatctaggatgaaatggatagacgatgaaagactaaataggcgactaagaaggtctgtaccaaaattaattggcaaaaaattcaaagattgggatgtaagggatccagcttttaaaatggattctttaagaacccttttgcttggtttggtcttatggttccgttccaattacaaaatgaatagcaatggcattagacagaatttcaacaggctgcaataccttatcaagtatgccgataaccaaaacgaaaattcaatctttgaatctacatataaaaaagttcttgaaaatcaacaagaattttatggaaataggccgttgataaatcatggtgttgaagatattcgcaagatggctaaaagaaaaatggccaacagagatattctaacgttgttcttctttattatcttagaaaatgtgctaccggggcctaagaagctttacttatgctttgccttgcccttgcacgattacgatattaggtgcaataaggtgaagtggcaaatcgaacatggtattggcaaagttcgcaacagatttgactctgacctaatacaaccttatttttggattgaattagaagttcctactttgagcgatggtgaattatacatcattgaccctatagcccatctgggtgaacgtgaaatggtcttgaaaacacgcgaagatcagtttgtccctacttatcaaccttcggtagacatgaagtacaacctaaaccaaaagtttcattatgtagtccgtatcaatcatgctgaaaaggtactacaagatgtttcaccaagatatgtgccaaatgtttgttacaggtactttgaattatctgagtcttctcctattttgaaatcgaagcattacactagctaccaatatctatctaagtggttgaaagtcttgaacaagaaaaaagcatctgttcatcattacgcaataatgaaaaagattgctttaactaattttacattaccaaagagtgtgacagagattaaaagaacagataatttcgtgattccctctctgttaaagtctaatgaagtattaaaagcatgtgcaaaacaagccgcaacatttactaagggagacaattcgcaagagcccatattttggagaagagacgtcattcaattaaagagtaaacagcactgggcaatattagggcgttccattctacctaatgctcaaccattaaaacgtaaaaagtatctaccgatgagggaaaggatggtaagaaacctagacaagtacgttatcaaagaattgttttcgtatgagcaaacaatgaagtctcctaaataccccagcacgtattgcgatcatttaggacaggaacatgtgataacagatttgtcgcattataaaaataaatttggcaacatcgaaatttactcgaaagaaactaagcctgatggatttgaattaataccgcttagcaaagaagttgatattaaatgcctgataaaggagtataacaaaggtaaaagaaagatgcaaaaaatcaagtatttggatgtggtaagtggatttgattttaaacagaaaaaaggccatgccattccgaaaattgaaagcattctagtcaaagagacagactataaagcagtccagcttttgaagcagcaaactaaagtactactgggactctcgttctgggacattctattaagaaagctacgagttaacgatcgattaaatgctgagtacggtaatgttggaaataatgaagaaacgttggacgaccattga

SEQ ID NO: 76070 - DNA, 846 bp, Saccharomyces pastorianus
atgcaagtcatcggacgtggtggggcaaatatactgattgattatggggatcctacgtggttgtggcgatgctgcatccgttggcccgatctgttatcatcaaataattcttatacaatcaaaaacatcagttatattaaagattatgtagaacctcttctacatggcttgctttgcccgatgtatctgattgacgtcgatatagaagctataaggccaattctcagtgactttattctaaatttagacgataaggtagtcaaagttatcaaaattaaaaatctcaccaataatacctcaaatctgatattaaataaccactttttaaaatcttattgttcacaaaatctgcaaacagttattttagaattgaagcctaaatggttatactatgatacagattactgtaggaactgtactcataatgcatttaagggtagaggcactaagtactgttacaatcaattactaatgaatccagcacacttggaattaatatttggagaatgtactatatttccggttaagtttaaagctgtcatgcatgagtacttgcgcaatgacaataacattttcaagatcctttatgatttacagaaaaaacttacaaagaacacaactccaataagcgacataaaatcaatcaacgatgtaaacgatgagcatctgctactcatgacactcagagacgtgacatgtttcattgaatggaacagtgctgaaaatgcgttgcacgtgaatataatagatgtagatctaaagccaaaagaaaaatggacccattggacaaaaacttacagccagttgacatcaagccaaaaaatttatcatacttcaaataaataa

SEQ ID NO: 76071 - DNA, 825 bp, Saccharomyces pastorianus
atgatacgtcagctcaattattggtcaaggaaggcgtatctcatttatccctttcaagtttttgtaggcgcattattatcaatagtagtatcttcagaaacattaaaccatcaaaaagagacatgcgctctattgaaatcgtccaatattttcaatgttatttttgcatacaaagcgaaccaactgtggccatttttattctttagtttggcttttctgcaaatatacttccactatctagcaagaatggatatattgcctttaccaatatcaagtaccgaaactagctcttcctatttaacatatactaaccattggcctctgctcaaaaatagaataatcagtattatgatcactcaatatgcttgcaagttcgttctaaaatatctattattgtttttgaatttccaatttatcgatcatgttttcatttggacagggggagaatgcagttctggtagtaaaacgacatcagctgaaaagtgccgtctagaaaatgggaaatgggatggtgggtttgacattagtggacacttctgctttcttgtgagtataagcatgattctttggatggaactacacttattcagtagatttgttcaagctgaagatatgttttgggttgtgaataagtgggtacgagcttgccttgccattgtttgcgctgtcctagtaatttggatatgtattctctgggttaccgctatttattatcatactatcttggaaaaagtgttaggttgccttatgggtttcatatgccctgttttcatataccacattctacccaaaattgggatactacacaattacttatatctatga

SEQ ID NO: 76072 - DNA, 2007 bp, Saccharomyces pastorianus
atgtcagatccatttgcacatttactgacttctttgaagaataaggactctgcatctgcatccaaggaaacaactcctcagagcagcaattcgccttccattactggttccgctgttgcagatgttgcaaggacggataaaagccccaatgatagtctgcattcaatttcagctcctccgctgataccgtcaccgaaggtagatttttctgcacctcctttggtcccaactaatagcaccactaaatctaatactgccaacaacacacctccctcggctcttgccactaccgatgacgacttcaatcaactatttggtatgggcacagtaactacaacggatacgatccaaaaaccggatgaggattactatggaagcaaggaagaccacctttacaatggtgatgacgccttagttgatgaagttaaggatatggaaatagcaagattgatgtctctaggtttatcaattgaagaagccactgagttttacgaaaatgacgtaacttatgaaagatatttggagattttaaagtcaaagcaaaaggagcgcaacgatctagctataagaaagaaagaaagtggtataaaaatggaaaagtcaggattatccaacattgttggtacagatagcaataatttattcagcatggccactaattttttcaataagggtaagaaactggtagaccaatggacctccttcccacctgaggcaaatgatagactgaataattactcaaaaactcatgataaggttgaggattatgatttgcctcaagtaaacgactcacccaatagaattttgtttgaagataatgaagtcgtagggaacttaccacctgccgataatccggatcaagatcttttaactgatttcgaaacaaagattgatataacaaagaggacagcgcctgatgtctcccactcctcctcaccgacttctggtatactaattgaagaaagttcgcgaagaaatgagcctctgatagaggatagtcttctcgacttttcagaagaaaatctcaccaatagtaaaagcaatgaagatagcaccctcttcaatgaaaacagcaacactgactctacaatacccatctcagatattgaattatcggggtataacgaatttaaggcgaaaggtactagtttgttcaagaacggggattatattaactcattacaagaatatgaaaagtctttaaatacattgcctttaaatcatccattgaggatcattgcattatcaaacattattgcctcgcaactgaaaatcggtgagtactctaagtccatagaaaactccagcatggctttggaattattcccatcaagcaaagctaagtggaagaataaaatctcaaatagtgaccctgaaagatcatttaacgacatctggccaaagattatgattaggcgtgctgagtcttttgaacatttagaaagtttcaaaaaagcactagaaacataccaagagctgattaacaagaatttttttgatgataaaatcatgcagggaaaaagaagatgccaagactttattaatcctccccctgttaaaaaatccatgcccgttaagaagaagacaacgacaacctcgcctgcaacaaaaaaacagaacttaaccgcttcttcttcaaattctccaatttctgttgatagcacttcagaaataaaaaaacgggagctagaaaacgctaaactggcgctatatgataaagtatttgagaaaattagctcctggaaggatggcaaagacgatgacattcgtcatctgttagcaaatttatccagcttactaacatggtgcaattggaaggatgtctctatgcaagatttggttatgcctaagagggtcaaagttacatacatgaaagctgtagccaagacacatcctgataagataccagagtccttgtccctggaaaataagatgattgcagagaatattttcagtactttaagtattgcttgggataagttcaaactgcagaatgacattaactga

SEQ ID NO: 76073 - DNA, 1146 bp, Saccharomyces pastorianus
atgaaaagcgattcagttgaaatcactaccatctgcccagatgttgaaaattctcagtttgttgtgcaaagcaactgtccagagactattccagagattctaaagtctcaaaatgccgctgtgaatggcagcggcatcgcttgccaacaacgtagcttaccaagaatcaaaatcttgggtaccggtggtactattgcatcgaaagctatagactcctctcaaactgccggctatcatgttgacctgaccatccaagatctattggatgccattccagatatatccaaggtctgtgacattgaatatgagcaactatgcaacgtggattctaaagacataaacgaggatattctttataaaatttataagggcgtctcagaatcgttgcaggcttttgacggtatagttattacccatgggactgatacgctatctgaaactgcattctttattgaaagtactattgatgctggcgacgttcctattgtttttgttggttcgatgcgtccttcaaccagcgtttctgctgatggccctatgaacctttaccaagcaatttgcattgcttcaaatccaaaatctagaggaagaggtgttcttgtttccttgaatgaccaaatttcctctggttactacattactaagacgaatgcaaacagtttggattcttttaatgttagacaaggctatttaggaaattttgtcaacaatgaaattcactactattatcctcctgtgaaaccgcaaggttgccacaaattcaaactgagagtggacggtaagcattttaaattaccagaggtttgcattttatatgctcaccaagcctttccgccagctatagtcaacttagtggcagataagtacgatggtattgttcttgctaccatgggtgctggttcattgccggaggaggtcaatgaaacctgcatgaaattgagtttgccgatcgtatattccaagagatcgatggatggtatggtgcctattgccaacgtaccaaagaaaggttcaaaggaggataatctcatcgcctctggttatctaagccctgaaaagagcagaatcttgttacaattgtgtttggcaggtaactacacgttggaagaaattaaacatgttttcactggcgtctatggtgggtga

SEQ ID NO: 76074 - DNA, 1104 bp, Saccharomyces pastorianus
atgttacgaagatctattcataccactaaaatcctccaaaaacctaatgctacttcgcatatttggtcggactttaccacaaggcctagttcactttctatccaatcttcaaaagtgaaaaattaccttttccagaagaaagcttctctagacccaccatctatcagcagaagaagtaaccgtatcaaatattcacctccagaacacattgatgagattttcaggatgagttatgattttcttgagcaaagatccagtaagttttatgagttggccaataagactaaaaatcccttgaagaaggatgcacttctcataaaagcagagatcaataatcctgaggtacaatacaattttcagtttaataacaagttgaacaatgttaaggatataatagattatgatgtgccagtatacagacatttggggaaacaacattgggaatcgtacggccagatgttattgatgcaaaggttagaaacgttggctgccattcctgatactcttccaactctggttccacgggcagaagtgaatatcaaatttcccttctctactggtgtaaataagtggatcgaacctggtgaatttctatcgtccaatgtcacatccatgcgtcccattttcaaaattcaagaatatgaacttgtgaacgttaaaaaacaattgtatacggtactgatagtcaatcctgatgttccagatttgagtaatgactcatttaaaacggctttgtgttacggattggtgaatattaatttgacttataatgacaatttaatagatccaagaaagttccacagttctaatattatcgctgactacttacctccggtacctgaaaagaatgctggaaaacagagattcgttgtttgggtattcagacaacccttaatcgaggataagcaaggtcctaacatgttagagattgaccgaaaggaactaagtagagatgattttgatatcaggcaatttacgaagaaatacaatctaaccgctattggggcacatatctggagaagcgaatgggatgccaaagtcgccgccgtcagagaaaaatatggcctaccacctggaagggtttttagcagagttaggaggtga

SEQ ID NO: 76075 - DNA, 291 bp, Saccharomyces pastorianus
atgtcgacagttaatgttttgagatactctgcgttgggtttggggctattttttggttttagaaatgatatgattttgaagtgtaatgctaagaagaaagaggagcaggcacagtacgaggagaaattgaagctggtagaggaggcaaagaaggaatacgccaagctacaccctgtagtaactcctaaagatgtgcctgcgaacgcctcatttaatttggaagatcctaatatagattttgaaagagttattcttaacgccgttgaatccctgaaggaagcttcaacataa

SEQ ID NO: 76076 - DNA, 327 bp, Saccharomyces pastorianus
atgcttggttatggtggactaacgtacacattgcatgacagcaagccttgtttgcttatttttgcctatcttgctctgaaatggcgcattatcatcggaagaaaggatcacagtcatcagaggaaatgtaggctaacggtcttcagcccattcattttcacgcctaatggcagcctcctcctctggagtgaagtcgttgacgatattaaacgttcttctaatttcctcgggagaccttcccctgatcatttcagcaaccaccttgcagccagcgtcaagcaagggcttgatgttgaggtagtttgccgccagaataatttcgtatag

SEQ ID NO: 76077 - DNA, 585 bp, Saccharomyces pastorianus
atggtgacttctaatgttgtcctagtgagtggtgagggtgaacgattcaccgtagacaagaaaatcgcggagagatccctgctattgaaaaactatctgaacgatatgcatgacagcaacctacaaaacaactcagattcagaatcagattcagattcggaaacgaaccacaaaagcaaagacaacaataacggtgacgacgacgatgaggatgacgacgagattgtgatgcccgtgcccaatgttcggtcttccgttttgcagaaggttatcgaatgggccgagcaccacagagactctaacttccctgacgaagatgacgacgattccagaaagagtgctcccgtggactcatgggacagagaattcctgaaagtggaccaagagatgctatacgaaattattctggcggcaaactacctcaacatcaagcccttgcttgacgctggctgcaaggtggttgctgaaatgatcaggggaaggtctcccgaggaaattagaagaacgtttaatatcgtcaacgacttcactccagaggaggaggctgccattaggcgtgaaaatgaatgggctgaagaccgttag

SEQ ID NO: 76078 - DNA, 4545 bp, Saccharomyces pastorianus
atgaccacatctcgtaaatcgcatgcgaaagacaaaaaggctggtggtgaacaggatctggcggatttgaagtttaggtatgatcttctgacgaatgaactgttccatttaagagagtttgtttcattggtagattatgatccaacccattttaatgattctgaaagttttcagaagtttctcagggaaacacacttgtcgttagaggagagaggagaaaaattcactgatgacgtagccaagaaaggcacgaatggtgatcttactcgcagaaggcgaaacctcaggacatcgacagttgttagttcagaaacgactaatgagaaaaagggtgatatagaactgaagttagaaagcatagcaccattagtacgaaataaatgtgaggagctaaaatacaaactaagtgatcattcaaataggaaatctatagtaccgcaaaaaagaccaatacaacatttgaagaagagagaagcagcgaagtccttgaagttcaaaagtgaaagaaaggaaaatccactgccattgcatgaacatatagctgaagagagatatgatcacatcgcaaaagttgaagaaccctctgaagccttcactataaagtgtccttctgatgatagctcctttgaaaatactagtgaacattatagtgataatttttatttcaccacatcatccgaagaggaagatataaagaaaaaaagaggtagaaagaaaaagaagcctagaataaaactggtagtccatcctccaaagcaaaccataacgaacccgttgcatgtagtcaagccgggatacgaaagcttgcacgaatacatcgcttcctttaagtcattagaagacgatttaacgctggaagaatataataaatacatcgacgaacaaagacggcttttatcgagactcaaaaaaggtattgaaaatggcgcattgaagtatgacaaagaaacggactcactacaacctataacatccaaggaaatcaagactatcataacatataaaccagacccgatttcatatttctataaacaacaagatctgcaaatccataccgatcacttaattaaccaaggtattcatatgagtaagctgtttagaagttcaacaaaggcaagaatagcaagagccaaaaaggtttctcaaatgatagaacaacattttaaacacgtagccggagcagaagaaagaaaggcaaaggaggaggagaggcacaaaaagtcgctagccaggttcgcagttcaagctgttaaaaaaagatggaatatggctgagaaggcttataggattttgagaaaagatgaagaagaacagttaaaaaggattgaaggtaagcaacacctttctaaaatgttggagaaaagtacgcaattgttggaagctcagctaaaccaagtaaatgacgatgggagaagcagtaccccgtcttctgactcaaacgatgtattgagtgaaagtgacgatgatatggatgacgaattatcaacatcttccgatgaagacgaagaggtcgatgctgatgtggggctagaaaatagtccagcatcgacggaagctactccaacagacgaatcattaaatctgatacaattgaaagaaaaatacgagcattttaatggttcatcgacagtatatgactcaagaaataaagatgagaagtttccgacattggataaacatgaaagttcaagtagtgaaagttctgtaatgactggagaggagtcctccatatattcatcctctgaaaatgaaagtcaaaacgaaaatgatcgagaatcggacgacaagactccatctgtgggtttaagtgcattatttggtaaaggtgaagaatcggatggggatttagaccttgacgatagtgaagattttacggttaatagctcatctgtagaaggtgaagaacttgaaaaagaccaagttgacaattcagctgctacatttgaaagagcaggtgattttgttcacactcaaaatgaaaatagggacgatataaaagatgtcgaggaagatgctgaaacaaaagtacaagaagaacagttatcagtggtggatgtacctgtgccatctttattaagaggaaacttaagaacgtaccagaaacaaggtttgaattggttagcctctctttataacaatcacacaaatggtatcctggcagacgagatggggttaggtaaaactattcagacaatttctctgctagcatatttagcttgtgaaaaggaaaactgggggccacatcttattgttgttcctacatcagttctgttgaactgggagatggaattcaaaaggttcgcgcctgggtttaaggttttaacatattatggttctccccagcaacgtaaagaaaaaaggaaaggttggaataagcctgatgctttccatgtttgtattgtttcttaccaacttgtagttcaagatcaacattcctttaagagaaagagatggcaatatatggtgctggatgaagcacacaatatcaaaaacttcagatctacaagatggcaggctctattgaatttcaacacacaaagaaggcttctgttgactggtacacctttacagaataaccttgctgagctgtggtcattattatatttcttaatgccccagactgttattgacgggaaaaaggtttctggatttgctgatcttgatgcatttcaacaatggtttggacgccctgtcgataaaattattgaaacgggtcagaattttggacaggacaaggaaacgaagaagacagttgccaagttgcatcaagttttacgtccatacctcttaagaaggttaaaggccgatgttgagaaacaaatgccagcgaagtatgagcatattgtttattgtaagctatctaaaagacaaaggttcttatatgatgattttatgtctagagctcaaacgaaagcaacactagccagtggaaattttatgtcaattgtcaactgtttgatgcaattgagaaaggtgtgtaaccatcccaatttatttgaagtgaggccaatattaacatcatttgtccttgaacattgtgtagcttccgactacacggatgtagaaaggactgtgcttaaattgttcaaaaaaaacaatcaagttaaccgggttgacttggatttcttgaacttggtgtttacgcttaatgacaaagatttaacttcttatcatgccgaggaaatctcaaaactgacgtgtgtaaaaaacttcgttgaagaagtcaataaattgagggaaaccaataaacagcttcaggaggagtttggagaggcgtcttttttaaattttcaaaatgcaaatcaatatttcaagtattctaataagcagaaacttgaagggacagttgacatgctaaactttctaaagatggtaaataaacttagatgcgacagaagacccatattcggaaagaaccttattgacctattaacgaaagatagaagggttaaatatgataaatcaagcattattgataatgaactaataaaacccttgcaaaccagggtattggataatagaaagatcatagatacctttgcagtgttaaccccaagtgccgtctcactagatatgagaaagttggcatttggattaaatgatgacagttcggtaggcgaaaacacaaggctaaaggtaatgcagaactgttttgaagtatccaacccattacaccaactgcaaaccaaattaacaatcgcattcccggacaaatcgctgcttcaatacgattgtggtaaattgcagaagttagcaattttattacagcagctgaaggacaatggacatagggcacttatcttcacacaaatgacaaaagttttggacgttctggaacagtttttaaactatcatggttatttgtatatgagactagatggtgccacaaagatcgaagaccgtcaaatcctaacagagagattcaacactgactcaagaataacggtatttatcctatcaagtagatcaggagggctaggtatcaatctgactggggcagatacagttattttttacgattcagattggaatccagccatggacaaacagtgtcaagatagatgtcacagaattggacagactcgagatgtgcatatttacagatttgtcagcgaacataccatagaaagcaatatcttaaaaaaagccaaccaaaaaagacaattggataatgttgttattcaagagggtgacttcacaacagattatttcagcaaactttcggtgagagatctattgggatccgaattgcccgaaaatgcttcaggtggagataaaccactaatagcagatgcagatgtggcagccaaagatcacagacaactggaaagacttcttgcgcaagcggaagatgaggatgatgttaaagctgcaaacttagccatgagagaagtcgaaattgacaatgacgatttcgacgaaagcacagaaaaaaaagcagctaatgaagaggaagaaaatcatgctgaacttgatgagtatgagggcactgcccatgttgacgagtacatgatcaggtttattgccaacggttattattattga

SEQ ID NO: 76079 - DNA, 945 bp, Saccharomyces pastorianus
atggaacaactgtgtaagaggtacgtgcatacaccggcggcttttatacaaaacattgttgctaacactaaaagaacaacgctagccacgcaattatctgttgaaaaagctaaaaaaaaagttcccaagacagctcttaaaaagaaacttaatagtaggccaaaagaaaggcttccgaattggctaaaactaaacgatgtttttaacatacattacgaaaagccatctaactctgatataaataaggttaacagattcttcaacaaggctaaagtggaatttgaatggtgtgcagctagttttgatgacataccagaaaatcccttcctgaataagaaatctcataaggacatattgaaagatcatggggaatgtggaactacattgattgatactttgccagaagtcatctttctcggaggaactaatgtggggaagtcctctatcttgaacaacataaccacctcgcatgtaagcagagatttaggaagtttggcaagagtgtctaaaacaacaggattcacaaaaactctcaactgttataatgtgggaaatagactcagaatgatcgattcgcctggttatggctttaatagtagtaaagagcaaggaaaagtcactttgcagtacctcctggagagaaaacaacttgtcagatgctttctcttactcgctggagataaggagataaataacacagataatatgatcattcaatacattcatgaacacggagttccttttgaagttgtttttacgaaaatggacaaggttaaagatttaaataagtttaagaagaaggttatgagttcagggttaatggacttaccaactctacccagacttgtattgactaactcgcttacgtccagtacatctcctaaacggttcggtatagatcttctaagatatgtaatatttcaaagctgtggtttgattttatga

SEQ ID NO: 76080 - DNA, 570 bp, Saccharomyces pastorianus
atgggtaaagctaagaaaacaagaaagtttggcctcgtaaaaagaactttgaacaccaagaaagaccaaagattgaagaaaaaccaggaaaatatcaaaactaaagaagaccctgagctaaccaggaatataccacaagtatcaagtgcacttttctttcaatacaatcaagctataaagccaccttatcaagtactgatagataccaattttataaatttttctatccagaaaaaagtcgatattgttagaggaatgatggactgtctactcgcaaaatgtaacccgttaatcacagattgtgtgatggcagagttagaaaaattgggccccaagtaccgtatcgccttgaaactggctcgagatcctagaataaagagactaagctgttcgcacaagggtacgtacgcggatgactgtttagtgcatcgagtcttacaacataagtgttacatcgtagctacaaacgatgccggcctgaaacaaagaattagaaaaatccctggaattcctttgatgagcgtaggcggtcacgcatacgtcattgaaaaattgccagatgtcttttaa

SEQ ID NO: 76081 - DNA, 1791 bp, Saccharomyces pastorianus
atgacatgcctaattttatggtatctgtggctcatatcaacttttcagttagagtttgcaacggctagtactgcaaatacaacaactacagcaaagtctggaacctcttcgtcaacggaggatccgtttcctgtactagccgtgggtaaagatggtagaggaaactactatgttaatagcacatttggcactcccggtcaacgccaacgtttgctagtggatattatccaaccgtacataaatctggtttccggaacaagcgaaagtcataacgaatactccagtgtatatcataagcatcccagctacctcatgaatgactctacatcatctgttcttgtttctcctggccaaatatatgagatttctttcattgatggtagagctgttaactgtactttggtgacagacgatatgaattttacaaatgtttcctcagaaaattcctcgaccgctttgataaccgatttaatggtaactcgagataacgtacaatttgactcgggaagcctatcgatttcaaacgtttccttctttgatattcagtcctcgaattttaagacttcaggcttgttaggtttaagcgggaaggtcacaaacccaggcaatgctatcgatagctcacaatacacagaacagtcttattttctatccttattgaaagatgcagatatcattgaaagttcgtcatattcactgtggttggctggagacacttccacgtacaaaacatatagagatccaatatctaattgtgggaagctacttcttggaggggtggatccttcgctgtttaccggtacactgggaaaatttgacttaattccttacgttgacccagtgagtaatgctgttagtgttgggtacccaattgtgccattaggccctatttatattgtgtctaacagcggacaaagtttgaatatgacttcgaaggactttctgagcccagccttacttgattcaacttcttcggtcagttacctgccaactagtaccattattcagattgccgttcaaattgcggccacttatgtggaatcactagataggtggctagtccaatgttctatagcagatatgggtgtctccttgggtttcaggcttcgagaattgacaattgaaatacccctacgtgatttattatcatctacttacgatacatccactaattcttcaatgtttttcagttctggacaggaagcttgttttctaacactatacgctaatacaaatactggagtaaacatactcggagaagccttcatgaaaaatatatatatggcaatggacttagaggataacactatagccattgcacaggcaaagaaggttgaagatgacgcagttactgaagagacaaatgaaactaccgcgtccactatcatcaagaagatcagatctggttacattccttacgcaaaagtgatgaatagtagtaatacaagaaacttgactctttatccatcctataggtcaggctatatgttcactgtcccaggtcaactgacagcagcatactcaaacggtgtgattacaggtgcgggccggtcattctatgatacttcaagagcaagcacaagtgctagaccatccagtagtcaattcgacagcttttctgtgtcagcctcagaagagtggtcaaattcaactaatagaaccagcagtgcttcgggagcaggcgttcgattgagcagtccttatacatttaacaaagatccagctggacatgtaactcgtatagcttccttgctactactttcgatattctcgatacttattgttctttga

SEQ ID NO: 76082 - DNA, 1143 bp, Saccharomyces pastorianus
atgtccgaggcgactttgttatcttacactaagaaattattggcttctccgccgcaattgagtagcacagacctacacgatgcgttgctggttatattaagtcttttgcaaaaatgtgatacaaatagcgatgagagtctttccatctataccaaagtttcgagttttctcacggctttgagagttactaaacttgatcataaggctgaatacattgcggaagctgcaaaggctgtgctcagacattccgaccttgttgatctacctttacccaagaaggacgaattacacccggaagatggaccagtaatcttagatattgtaggtactggtggtgacggacagaatacttttaatgtttccacgtctgctgctatcgttgcctccggaattcagggcctaaaaatttgtaagcacggtggtaaagcttctacatccaatagtggagctggtgacctaattggaactttaggctgtgatatgttcaaggttaattcatcgacagtgcccaaactttggccggataatacgttcatgtttctacttgctcctttttttcatcatggaatgggccacgtttctaagatacgcaaatttcttggaattccgactgttttcaacgtactgggaccacttctacatccagttagccacgtcaacaagagaatattgggcgtttactcaaaggaacttgcgcctgaatatgccaaggcagccgctttggtatatccaggaagcgaaacctttatagtttggggacatgttgggttagacgaagtatcacctataggcaaaactactgtctggcatattgacccgacatcgtccgaacttaaattgaagaccttccaattagaaccttctatgtttggtttagaagaacacgagttgtcgaagtgtgcctcatacggccctaaagagaatgcgagaattctaaaagaagaagtcttgtccggcaagtaccaccttggcgacaataatcctatttatgactacatcttgatgaacaccgccgtgttatattgtttaagccaaggtcaccagaactggaaggaagggatcattaaggcagaagaaagcatacattctggtaatgcattacgttctttagaacactttatagatagtgtgagctccttgtag

SEQ ID NO: 76083 - DNA, 144 bp, Saccharomyces pastorianus
atgaacgtattatccggccaaagtttgggcactgtcgatgaattaaccttgaacatatcacagcctaaagttccaattaggtcaccagctccactattggatgtagaagctttaccaccgtgcttacaaatttttaggccctga

SEQ ID NO: 76084 - DNA, 303 bp, Saccharomyces pastorianus
atgttagccttaatttctggaaagctgtcatcgaattgtgaagcttcactaaatagccttgtggagtcaattgtatcatcaatgcttcttctctgtcttttcttaacagggccttcgttctcatcaccattattggcatttggaaccttagtaggcgatacaacttgtgtttgcgtggagtttcgcttggatttgataaatcctacaggcgtaaattccatgttcttcaagctcccatttgggagatgtgacgcttcgtccatgagtgtttatcagccctttttcgctttgtgtggactgtaa

SEQ ID NO: 76085 - DNA, 369 bp, Saccharomyces pastorianus
atgcaagacaactcaagtcattccagagagtcggcttcggctggtgacgatcctcttggaattgataagttgacagtcgactacgattacttactttataaaataagagactatgtacagagtatacaattagatactacggagctatgtaaaaaacaaaatgaagtgatggtgaatggtattattgaaaacaccatagataaaaatattgcgaagttcaaagaactccttgaaaaatgcgatacgttggaaaatcactatgaaatgttaaaccaactggcgatgataacagatactttcaaggaaagaatcgcagaggccgtaaataattacaatagcttaaaaaagggcgccagtaaatctaagtaa

SEQ ID NO: 76086 - DNA, 1674 bp, Saccharomyces pastorianus
atgccacaaagaattgagcttacctccgaaccagtcagaaaaccgcggtctactgagagctcactactcagaaagatacaaagagcgtgtagatccacattgcctgaaccagatttgggcttgaacttagatgtagccgactatatcaactcaaagcaaggagcaacccctagagaggctgtgttagcaattgaaaaattggtcaataatggggacacgcaagcagctgtttttgcactttcactactagacgtgctggtaaaaaattgtggttactctatacatttgcaaatctccaggaaggaattcttaaatgatctagtgaaaagatttccagagcaaccaccattgagatattccaaggtgcaacaaatgattcttgaagccatcgaggaatggtaccaaaccatctgcaaacatgccagctacaaagatgatcttcaatatatcaacgacatgcataaattactgaaatacaagggttatactttcccaaaagttgggagtgaaaacttggcggtgttgagaccgaatgaccaactgaggacacctagtgagctacaggaagaacaggaaagagctcaagctgcaaaactagaagagctgctaagaagcggcaaacccgatgatttgaaagaagctaataaactgatgaaaattatggcgggatttaaggatgacactaaagtagcagtcaaacaagcaattaacaatgaactaaataaactcaaaagaaaagctgatttattcaacgaaatgttgacttcagccgatgagcctgatcttgaaaatgaaactattcaagaattgtatggcgacttaaaatcagcgcagccgaaattcaaaaagcttattgaggaagaacgcgatgacgatgcgcttgttagtaatctatcaaaatttaacgatctagtaatccaattgttaaaaaggtacaagtcaataaaaggtatgaaggaagaagaactaaatgtccccgatacgaatgaaccggcaaaagagcttaatttgatagattttgatgacgatacaacagcaaacactccatctgtgacatctccaagcaaacctttgcaaccttttgacgatcttttaggggattttaataaggtaagtttgtcatccccaaagtctcctcaagaaaacgacactgttgttgatatacttggtgacggtcactcaaagtcatctggtatagatttattagattttgattcgcaacctggagaaagtaaaaccgctctgtccgcatattctaactcgattgttctacctaatggtttactaaatagttcaagtaactccaaggaaatcacagctcaatcgcaaagacatatacttaaccaatcggatcacttacgcattgattacgaattaactcgtgagtcgatgacaaaactacgattagttatcttctattcaaacataagcagtgatccaataactaattttgcacttttagtggcatcacctaaaggcacgacattgtctctgcaaccgcaatcgggcaatatgctccaaagtaactccagagatggtatcaaacagattgcttccatagagggtatatctgttaatttaggtaagcccataaaattgaaatggaaggctaattactgcaccaagggtgattcgaaggaagaatcgggcacgaccactttgcccacaatataa

SEQ ID NO: 76087 - DNA, 852 bp, Saccharomyces pastorianus
atggttcaagctatcaaattaaatgatttaaaaaataggaagagaaaaaatgtggaggaagaaaatggcagtgacgagtctgaaattgacattagtagcaccgattcagaaaatgaagaagagcaaaatggagaagaagagatcgtaaatattgacttcgattttttcggtggtaacccagaagttgatttccatgctttaaagaatttactgcgtcagttatttggtcctcaagaaagtaccaggattcaactaagcagcttggcagatttgatcctaggttccccaaccaccacaattaaaactgacggcaaagaatctgatccatactgttttctttcattcgttgatttcaaagctaatcatctaagtgattatgtcaaatatttacaaaaagtggacatgagactttccactttcttcaaaactatgattgatagtggtaataaaaattgtgctttggttctcagtgaaaggctgattaatatgccaccggaagtcgttccacctttatacaagattacgttggaggatgttgccacggcacttggcgatgacaaacattatgacttctatatcatcgtcaccaggaagtatgaagtaaattttgacactgacgatgataccgattctggtaagaggaataaaaacaaagacgaaagatccaaaaaaagggtgaaggccgacgaagtagactactttcatgaggaggaccgattttttgaaaaatatgccaagattcacttcgaatcagaagctaaaaagggtgttatcagctcatacatgattcttgatcacgaaggccttgtcaaaagtatcgatgaattggaaacagaaatttccacctggtaa

SEQ ID NO: 76088 - DNA, 1371 bp, Saccharomyces pastorianus
atgaccggtgattccagaagcatcagcgaaccctcaattaatctagatccagataatacaagtttttctgatgaaaacagcgatgacttctttatggacaattcctatgatatagatgaaatcgatcatagcgatgaaagtaataggcaaagtgtcatagttgactctaaagtcacggtaccgccatcaaagcattcaactctaacattatctgatagtgaagatagcgacgcaaaggaacaacatcagtccctgagcagatcatctagtaaaaatgtaaatatagaagatattacggagcccaagccagacaaaccatcgggtcgaactagaaaaagatctgtgatgaaagagtctgtagttgaaataaactcatctgaatctgacttagacggagacaaaaatcttcccagatctaggtcaaggtccaggtcaagcataagatcaatatctccagcgggaaaatacaagcgacagaaaagttcattactgtatacctatgatgaaaacgatgactttttcaaggaacttgctaaagaagccaaaaaaagcaccactatttctaaagaatcgacacccgaccagcggaagcgagtttataacatcaaatttctctctaagctagaaggaactataaataaagcggtccaagtgaaggtcctcggaaaatacgaattttcaaaaatacttcctgctgctttggacggattgatgaagtcctataaaattccgaaggtaatgaaagatatatacaaggtagagaatgttactctttattggaacaatgcaaaattactcacttttatgacttgtaattcgctacatatcccacaggattttgaaaatgaagtctctgatatcgatgttactatcgtatccaaagaatacgaaaagaactttgaagcgacactggaatcaaagttaaaggaagaagaagctgctttactcataaaagaacgtcaggagatggaaaggaagttagagaaaaagagaaatgaacaagaagagtccgaatatcgcgagtttgaatccgaattaaaaaacgtagaagaaacacaagaaataaaagaaaatgatacagttatgaatacaaaacttctgcaagagggtggctctttgtcaggaaatagtagtagcatggaagaagttatgagaatcgctctcatgggtcaagataacaaaaaaatctatgtccatgttaggcgttcaacaccattttctaaaattgccgaatattacagaatccagaaacagttaccacaaaagacgagggttaaattactttttgatcatgatgaattggacatgaatgagtgtatagccgatcaggatatggaagatgaagacatggttgatgtcattattgattga

SEQ ID NO: 76089 - DNA, 270 bp, Saccharomyces pastorianus
atgagtacggacgttgctgctgcacaagcccaaagtaaaatagatttaacaaaaaaaaagaatgaggaaataaataagaagtctctagaggaagacgatgaatttgaagatttccccattgacacatgggccaatggtgaaacaataaaaagcaatgctgtaacgcaaacaaacatatgggaagaaaactgggatgatgttgaagttgacgacgatttcaccaatgaattgaaggccgaattggatagatacaaacgggaaaatcagtga

SEQ ID NO: 76090 - DNA, 939 bp, Saccharomyces pastorianus
atgcctgctacgttaaagaattcttctgctacattaaaactaaatactggtgcctccattccagtgttgggtttcggcacttggcgttccgttgacaatagcggttaccattctgtaattgcagctttgaaagctggatacagacacattgatgctgcggctatctatttgaatgaagaagaagttggcagggctattaaagattccggagtccctcgtgaggaaatttttattactactaagctttggggtacggaacaacgtgatccggaagctgctctaaacaagtctttgaaaagactaggcttggattatgttgacctatatctgatgcattggccagtgcctttgaaaaccgacagagttactgatggtaacgttctgtgcattccaacattagaagatggcactgttgacatcgatactaaggaatggaattttatcaagacgtgggagttgatgcaagagttgccaaagacgggcaaaactaaagccgttggtgtctctaatttttctattaacaacattaaagaattattagaatctccaaataacaaggtggtaccagctactaatcaaattgaaattcatccattgctaccacaagacgaattgattgccttttgtaaagaaaagggtatcgttgttgaagcctactcaccatttgggagtgctaatgctcctttactaaaagagcaagcaattattgatatggctaaaaagcacggtgttgagccagcacagcttattatcagttggagtattcaaagaggctacgttgttctggccaaatcggttaatcctgaaagaattgtatccaattttaagattttcactctgcctgaggatgatttcaagactattagtaacctatccaaagtgcatggtacaaagagagtcgttgatatgaagtggggatccttcccaattttccaatga

SEQ ID NO: 76091 - DNA, 1329 bp, Saccharomyces pastorianus
atgtcaactgaacaagatgctgttcttggattggccaaagatttagaaggtataaatttgcttactgtgcccaatctcgagagaggacaccaaagtaaattatgcaaagagaaaactacttctgattcatcttcgtcaaggaagccttcacaacagagagacaattatagaaagagacgtccgaaacttatatgtatcccatatacgtcttttctgcatactggtatgcacaattttttgacgaaaccaccaagagatatatttcatgaaagtaaagaagtagctctgtttaccaatggccgggcttatacaatcctacgcaaagaccttataccaaatttgaaagaaagtattgctgaattgtatgaaagctcgcttcttgaggcaaaaaagcggaaagtcccgtatttaggccatgacttatttgctaatattgatgagttcgttcccatgacaatatccgaattagatagtgtatcaccgtgtttttcatacattgagaactggatactagataatcctggtaaggattttaagatcggcaagaaatttactgttgtaaccacaagacatcatatcgtagatttgactatgcatctctttaacagacgaaatagacaaacgtcactaattgtaacttatatgggggcgggccttctttcattctgtagaaatgcaaaaaacgattctcaaatgtccaaagagggcatttattcaaatgatccaaatatgaagaaaaattgctattcaggatttgaatttgaaaattgggtaaccgaaaattccaaagtcgctgatttaactggctctaaatgtcctattttacttcttgtagagagtaaactttcggaagaaaagggtcttttaattcgctgcgaaatggatgcattcaatcctgtttcggagacaaacacagaactaaagtgttttgccccattatcaatgcacaattccaatcataggagaaaacttctgaaaacgtgggtacagacgggtttattaccgaactcagatatcatgataggtttgagggacagtcatagcggtcaattactagacattcaatggtactcaagggacttattatgtaagaaattcaatcacccaggtctacctacaaataaaaaggaacttaactataatgcccaaattgcggtagaatggtgtcattattgtattgaagcaatttgtaagctggtggaggcaaatatctctgactatagcagtacaaaaccagaatcatttgaaatcggtatagatactaacaacgccatcgtcatcactgaacttaagactactccaagaaacgtagaattatttggaatgtag

SEQ ID NO: 76092 - DNA, 1536 bp, Saccharomyces pastorianus
atggtaggacactcagctcagcacagatcaaaaagcagcttagtgtctcacctactaatactacttatctttataacgattattattgaaatgtgtctatataataaaatttttaagaaccaaaggtcggatgatattagagacaactttaacaatggcggacatcgagttcccagtaatgtccaaaatcatggaacccatataagagacgaagcctttatatcaggggtctattattccaattggtccccatacaaaccgaggtttcatttccctcacgacataaacttgaagcaagtgtctcacatttactatgcatttttcaaaataaactctagaactggtggtatagaaaacacggatagttggtctgatctagaaatgaatttgtataaatcgctggcaattaaaaattcagaactaattaaagaaagctcgaacaatagtgtccaaaacattctacccttaggttgcattggtgaactattttatttgaagaatacctgttctgataagaaatttaaagttatcatgtcaattgggggctggtctgatagtgaaaatttcaaaatcataattaaagatgataaactcttacaaaattttgttgattcgtcggtggaaacaatgttcagattaggatttgatggcattgatctagactgggagttccctggtaacaatgaatcagaacctcgcggatatctgaaactggtcagaatgctgcgattaaaactaaacagcctcgaatcccaaatatttggggaacgtactgaagatcattttcaattatctattgcggcacctgcattcaaggataaattattttacttgccaatcacagaaattgatcaatatgttgactactggaatatgatgacgtacgattattatggctcgtggtcagaaacaacaggatatcacagcaatctattcagtgagacggaattgaatggaaactttgccatgcattatatgatcgatagatttggggtcaattctagaaaattagtactgggaatggccgcctacggaagaagtttccatatcaaagataacaaattcgaaccattcaatcaaaatactgtattaattaacaaaattttcaaaggagtgggcaagcccactaaagaaatagataaagctgatggcaaggagggcatctggccttacaaaaatttaccaaagattggtacaatagaacaatacgatccaaaatatgtttcagcatattgctttgatgaaaaaaattcaatatttatcagttatgataacactaaatcagtcaaaactaaggctgaatatgtgacacataacaatttaggcggaggcttttggtgggagtcatgtggtgaagcttatgcaaatgagtcaaggtcgttgataaacgcatttaatgaaggcttgcactttaatgtgtcatcaaaaccatcaatatttcaagatgtgagagttaaaaaatattacttgaataaatatggcgatggcggatttttatctccatatttaaagcatttggattcaagaaagcaatga

SEQ ID NO: 76093 - DNA, 105 bp, Saccharomyces pastorianus
atgggttccatgattttggacattactgggaactcgatgtccgccattgttaaagttgtctctaatatcatccgacctttggttcttaaaaattttattatatag

SEQ ID NO: 76094 - DNA, 1038 bp, Saccharomyces pastorianus
atgtctactttacaacgtcgtagagtcaatagggcggattctggagatacttcctccattcattcttctgctaacaataccaaaggagacaaaatcgcaaatattgctgttgacggggatgatgacaatggaacaaacaaaaagattgcatatgacccagaagaatcgaaattgagagacaacatcaatatccctacgttaacgttgatggaagaagtcttattgatgggcttaagagatagagaaggatatttgtcgttttggaatgatagtatttcatatgctttgcgtggttgtataattatagaattagcgttaagagataaaatcagaatcttagatgattccgccaggaaaaggttcgatctttccgaaaggttgattgaagttattgacagttccaaaactggggaagttttactggatgaaactttgcaattgatgaaaaacgacgaacctttgtcaatttctaactggattgatcttttaagtggtgaaacatggaaccttttaaagatcaactatcaattgaaacaagtaagggaaagattggcaaaaggtttggtcgataaaggtgtattgagaacagaaatgaaaaatttctttttgtttgacatggcgacacaccccattgcagacgccagctgcaaagaagccattaagcgcagagtactttctgtactcgtatcgaggaacatggaattaagttacaatgaatattttccggagacaacatctttcaaaatcattagaactttagctttaatatgtggatcatatggggcaaacgtattggagaatgtcctgactacgttggaatatgagaagagagataaggcaattagtagagctgaagaaataatggcacaattttcgcaatacccatttgatttagaaaaggaaactgagttaggtgtctccgttaatttaaacaaggaagttaaagaagagatagaaaacaatcctggtcatgatttacaattggaagttattgctggtgtatttgaagtcttttcaagaatggatatgctattatga

SEQ ID NO: 76095 - DNA, 573 bp, Saccharomyces pastorianus
atgggagccaagacgtcaaagctttccaaagatgacctgacatgtttgaaacaatccacctattttgatagaagagaaatccagcaatggcataaaggatttttgagggattgccctagtggccaactagctagggaagattttgttaagatatacaaacagttttttccatttggttctcctgaagattttgctaatcacctttttacagtttttgataaagacaacaatggattcatacattttgaagagtttatcacagttttgagtacaacgtccagaggaactttggaggaaaaactgagctgggctttcgaactttatgatttgaaccatgatggatatattacatttgatgaaatgctaaccattgtggcgagtgtttataaaatgatggggtctatggttacacttaatgaggatgaggcaacgcccgaaatgagggtaaagaagatcttcaagttgatggataagaacgaagatggttacattacgctggacgaattcagagaaggttctaaagtcgatccctctattattggtaccttaaacctttacgatggcttaatatga

SEQ ID NO: 76096 - DNA, 921 bp, Saccharomyces pastorianus
atgaatcaaatctggtctacaggtcccccaaatttttacttcaactctgaatggaaagaaaataagagaaatgacaggacaattgaagactctttaagagaactagatgggttgatccattccttggagagaactcatattgaagtacaaacaaacccaaagctaaagaacgatgtcacagctttaaatgatattaacaagaaagaaaataaagaagagatcactcatgaaaactatacacaccagattaatagtattccattgacaagctcaaatttaaatcggcatttctccttttctagagactacaaccaatctgataatagcaataataattattacagggaatatttatccaaaccaaggtatttgcagcagtcaactaaagaacaaactttcaatgaaattaataaaagaaaaagttctgcaattattcccccttggttaaatattccagaaaactcaagattttttgtaataaagtcctcgtctttgaagcatgtcaaaaggtcgttttacaacggaatttggtcgtctactcatttcggcaacaaaaggctatctgaggcatataaaaagcttaattcgggagccaaagtgtttttatttttttcaatcaacacatcaggaagattctgtggcgttgcagaaatggtatcggatttgaaaatggatttggacaccagtatatgggaagatgaacaaaaatatggcaaagcctttaaagtaagatgggtgatcatgcgtgatataaataacagatcgttaaaaaggtttttgataccatccaatgaaatgaaaccgataacacattccagagatactcaagaaattccatattcgattggaatttcaataattaatctatttaaaactcaagattctgatattttctccttcttggatgagacgtatgaatag

SEQ ID NO: 76097 - DNA, 1482 bp, Saccharomyces pastorianus
atgagctttgttcaaataaggcacatttcttcacaaataaaccgtaagactgtatccattgttggatcggggccttccggcttttatacagcgtaccatttactcaagaagtcaccgattccattaaatgttactatatgggaaaagttacctgttccttttggtttaagtagatatggtgtggcacctgatcatccagaagtcaaaaattgtgaagaaacgtttaccacatgtgcagaagagttttcttcccctacaaaccaaaagcataaattttcctttgttggtggtataaccattggaaaagaaatattgttgaaggaattgctggataatcaagatgctgttattttaagttatggttgtacaggggacagaaagctgaatatccctggcgaactcggaacaaaaggggtgtttagcagtagagaatttgtcaattggtacaatggtcatcctgatttcgcaaaggataagcgatttaccgattttgattggagcaaagtttcgaaagttggtattataggaaacggtaacgttgctcttgatattacgcgtgtacttatttctaatcaaattgatgaaatatgggaaaatacggacatctcatctcttgcactaaatttgctaagaagggcacctgtaaaggacgttaagctaattgcacgaagggatttcgttcattccaaattcaccaacaaagaattaagagaactatgggagttagaaaagtatggcatacgtggccgtattgatcctaaatttttccagaaagaaatgtttgacccatctaagtacgatcgtgcattcaatagacgagtagagatgtgtagtgagtatctcaagccatttaatgaacgttcgaagaaaaactataaaaaggctcctcctccaagcagcggatatgacaaattctgggagttagattatttgaagactcccttgaaaattaataaagacgattttggtgcaatcaactctttgagtttatgtaacaatcaattaaatgaagataacagtttgcaacccttgaaggacgtcaataatattatgacatataaagtggatttgctgattacttcgttgggatatgcaggcgttcccatgcctgaattctctaagttgtctattggatttgacaaagaccatatagctaataaacagggtcgtgttttaacttccagcggagaaatattcccacatttatatgcatctggttggatccgtaagggcagccagggtgttattgcctcgacaatgcaagatgcttttgaagttggagacagagtaatacaagacttggtggtcagcggagcgctatccttagagaattctatcgacctctctaatatcaagcacaccacatggaaggattgggaaagaatcaacaagaacgaattgcttcggggcaaaaaggaacacaaaactcggtcaaagtttttaacttttgaagagttgtggaacggtgtagaaggcatataa

SEQ ID NO: 76098 - DNA, 306 bp, Saccharomyces pastorianus
atgatttttaaacgtgcagtatctacattgattcctccaaaagttgtgtcttccaagaatataggttcggcaccaaatgccaagcgcattgctaatgttgttcacttttataagtctttgcctcaaggaccagcaccagccatcaaggctaacactagattggccagatacaaagccaagtactttgatggggataatgctagtggtaaaccattgtggcattttgctctaggtataattgcctttggctattccatggaatattattttcatttgagacatcataaaggtgcggaagagcattga

SEQ ID NO: 76099 - DNA, 3030 bp, Saccharomyces pastorianus
atgtcagctgaccctattaatgaccaatcgtctttatgtgtgaggtgcaataaatcaatcgcgtctagccaggtatacgaattagaaagcaaaaaatggcatgaccagtgctttacatgctacaaatgtgacaaaaaattgaacgcagattcagactttttggttctggatataggtacattaatttgttacgactgctcagataaatgtacaaattgtggcgataaaatagacgacacagcaattatactgccttcctcaaatgaggcctattgttccaattgtttcagatgctgtcggtgcagcaaccgtataaagaacttaaagtatgcaaagacaaaacgaggactatgttgtatggattgtcacgagaaattgttgagaaaaaaacaactattactggaaaatcaaacaaaaaattcatcgaaagaagattttcccataaaacttcctgaaagatcagtcaaaaggcccttgtcacccaccagaataaatggtaagtcagatgtcagtacaaacaacaccgcaataagtaagaaccttgtaagctcgaatgaggatcaacagctcactccacaagttttagtatcacaagaaagagatgaatcatcgttgaatgacaataatgataatgataacagcaaggacagggaggaaacatcttctcacgcaaggacggtttctattgacgacattctgaactctactttggaacacgatagtaatagcattgaagagcagagtttggtggataatgaggactacatcaacaaaatgggtgaagaggtaacctataggctattaaaaccacaaagagcaaatcgagattccatagtggtaaaggatccgaggatcccaaattcgaactcgaacgcgaatagattcttttcaatttatgataaagaagagacagacaaagatgatacagacaacaaagagaatgaaatcatcatcaacacacccagaaatagcactgataaaattacaagtcctttgaacagccctatggctgtacaaatgaacgaagaggtcgaacctccgcatggactggcattaactttatcagaagctacgaaagaaaataacaaaccatctcaaggtattcaaacgtcaacttccaaatctatgaatcatgtctccccgattacaagaaccgataccgtagaaatgaaaacatcaacctcttcatcgacattacgtttgtctgataatggaagtttcagcaggcctcaaacagcagataacttattgccgcataaaaaagtagcgccctctccaaacaaaaaactttcaagatcgttttctttgaagtccaaaaattttgttcacaacctgaaaagtaaaacttcggaaatgctggacccaaagcatccccatcacagcacttctatacaggaatcagacactcattctggctggggtgtttcctctactcatacaaatataagaaaatcaaaagcaaaaaaaaatcctgtatcaagaggccaaagtgacagcacaatatacaatactctaccacaacatgaaaattttacagtaccggagtttaatcacaaaaaagcgcaaagcagccttggcagtatatccaaaaagcaaaattctaatgatatagccactaatagacgcataaatggttcatttacaagttcaagctcggggcatcatatagcaatgttccgtacgccgcctttggaatcagggtcattatttaagaggccatctctgtcatctgagtccgcacaccacatatcttctagcttacagacgtctagatctactaatgcattgttggaagacgattccacgaaagtggatgctactgatgaaggcgctacaagcttggaaaaggatttttactttactgagttgactttaaggaagttaaaattagatgtgagggaactagaaggtacgaagaaaaaattattacaagatgttgaaaatctaagattagcgaaagagaggttgttaaatgatgttgacaatttaacaagagaaaaggataagcaatctgcatcttcccgggagtccttagaacaaaaagaaaacattgcaacatcaatcactgtaaagtcaccaagttcaaattccgacagaaaagggagcatatctaatgccagtcctaaaccacgcttctggaaaatattttcaagtgctaaggatcaccaggtaggcgatctagaatcacagcaacgttcgccaaattcatcttcaggcggaacaacaaatatagcacagaaagaaatatcatcaccgaaattaattcgagcacacgatgagtttccttctccaggcaaagtaccactgtcgccaagtccaaagagattagattatacgcctgatggttcccatttatatggatcttcgctacaagctcgatgtgtgtatgaaaaaagtactgttccaataattatcaggtgctgcattgatcgcattgaaaaagatgatataggcctgaacatggaaggcttatacagaaagtcgggctcacagactttggttgaggagatcgaaaatgaattcgctcagaataattcgttgcatagtgatacattaagtcccaaactgaatgctttactgaatcaagatattcatgcagtggctagcgtattaaaacgatatttgagaaaactaccagatccagttttatcattttccatatacgatgccttgatagatctagttagaaataaccaactaattgagaggctaccattaaacaacgacaagtttttggattcaccacaaaaagtgactatttatgaaatggtgctcaaaagcctacttgaaattttcaaaattttacccgtagagcatcaggaagtattgaaagtattggcagcacatatcggcaaagttcgaaggtgcagtgaaagaaatttaatgaacttacataacttgtcgttggtctttgcaccgagtcttatccacgattttgacggcgagaaagatattgtggacatgaaggagaggaattatatcgtggaatttatacttggaaactatagagacatatttaagcaagcataa

SEQ ID NO: 76100 - DNA, 240 bp, Saccharomyces pastorianus
atgcctaagagattaagtgggttacaaaaagaagtcttacacctgtatagggcttccatacgaacggctcatacaaaaccaaaggaaaaccaagttaattttgtgaattatattcatgaagaatttgggaagtatagaaatttgccaagaaaagacttcaccaccattgaacacttgttacgggtcggaaacaaaaaaattgccaccttttcacaccctgaactgacgaatatacattga

SEQ ID NO: 76101 - DNA, 1908 bp, Saccharomyces pastorianus
atggcacctgttacaattgaaaagttcgtaaatcaagaagaacgacaccttgtttccaaccgatcagcaacaattccgtttggtgaatacatatttaaaagattgttgtccatcgatacgaaatcagttttcggtgttcctggtgacttcaacttatctctattagaatatctctattcacctagtgttgaatcagctggcctaagatgggtcggcacgtgtaatgaactgaacgccgcttatgcggccgacggatattcccgttactctaataagattggctgtttaataaccacgtatggcgttggtgaattaagcgccttgaacggtatagccggttcgttcgctgaaaacgtcaaagttttgcacattgttggtgtggccaagtccatagattcgcgttcaagtaactttagtgatcggaacctacatcatttggtcccacagctacatgattcaaattttaaagggccaaatcataaagtatatcatgatatggtaaaagatagagtcgcttgctcggtagcctacttggaggatattgaaactgcatgtgaccaagtcgataatgttatccgcgatatttacaagtattctaaacctggttatatttttgttcctgcagattttgcggatatgtctgttacatgtgataatttggttaatgttccacgtatatctcaacaagattgtatagtatacccttctgaaaaccaattgtctgacataatcaacaagattactagttggatatattccagtaaaacacctgcgatccttggagacgtactgactgataggtatggtgtgagtaactttttgaacaagcttatctgcaaaactgggatttggaatttttccactgttatgggaaaatctgtaattgatgagtcaaacccaacttatatgggtcaatataatggtaaagaaggtttaaatcaagtctatgaacattttgaactgtgcgacttggtcttgcattttggagtcgacatcaatgaaattaataatgggcattatacttttacttataaaccaaatgctaaaatcattcaatttcatccgaattatattcgccttgtggacactaggcagggcaatgagcaaatgttcaaaggaatcaattttgcccctattttaaaagaactatacaaacgcattgacgtttctaaactttctttgcaatatgattcaaatgtaactcaatatacgaacgaaacaatgcggttagaagatcctaccaatggacaatcaagcattattacacaagttcacttacaaaagacgatgcctaaatttttgaaccctggtgatgttgtcgtttgtgaaacaggctcttttcaattctctgttcgtgatttcgcatttccttcgcagttaaaatatatatcgcaaggatttttcctttccattggcatggcccttcctgccgccctgggtgttggaattgccatgcaagaccactcaaacgctcacatcaatggtggcaacgtaaaagaggactataagccaagactaattttgtttgaaggtgacggtgcagcacagatgacaatccaagaactgagcaccattctgaagtgcaatattccactagaagttatcatttcgaacaataacggctacactattgaaagagccatcatgggccccaccaggtcgtataacgacgttatgtcttggaaatggaccaaactatttgaagcattcggagacttcgacggaaagtatactaatagcactctcattcaatgtccctctaaattagcactgaaattggaggagcttaagaattcaaacaaaagaagcgggatagaacttttagaagtcaaattaggcgaattggatttccccgaacagctaaagtgcatggttgaagcagcggcacttaaaagaaataaaaaatag

SEQ ID NO: 76102 - DNA, 333 bp, Saccharomyces pastorianus
atgaaatacttagctgcttacttattattggttcaaggtggtaacgctgccccatccgccgctgacatcaaggccgtcgtcgaatctgtcggtgctgaagtcgatgaagccagaatcaacgaattgttgtcctctttggaaggtaagggctctttggaagaaatcatcgctgaaggtcaaaagaagttcgctactgttccaactggtggtgcttcttctgctgctgccggtgctgccggtgctgctgccggtggtgatgctgctgaagaagaaaaggaagaagaagctaaggaagaatctgatgatgacatgggttttggtttattcgattaa

SEQ ID NO: 76103 - DNA, 759 bp, Saccharomyces pastorianus
atgtgcacagaaactaaagcaacaatagattgtaggaataagatgacagacacatataatagcatatccaattttatagaaaatgaattgaccgcactgctgtcgagtgatgactacctcatggatgacctagcaggcgaattaccaaatgaagtgtgcagattactgaaggctcaagtaattgaaaagagaaaggatgccatgagcaggggaaaacaagacttactgagcaaagagatatacgataacgagtctgaattgagggccagtcaatcgcagcagataatggaacttgttggagacataccaaagtactctcttggaagtgaactaagaaatagagttgagggtgaacctcagagtacatcgatagagagattaattgaagatgtgttgaaactgccgcagatggaagtagcagacgaagaggaagttgaagtggaaaatgatctcaaagttctaagcgaatatagtaatctaaggaaagatttgatactgaaatgtcaggctctccaaataggcgaaagtaaattatcagatattttgagccaaacaaattctataaattctttaacaacttccatcaaagaagcttctgaagatgatgatatcagcgagtacttcgccacttacaatgggaaactagtagttgcgttggaagaaatgaagctattattggaagaggccgtgaaaacatttggcaattctccggaaaagagagaaaaaattaaaaaaatcctaagcgagttaaagaagtaa

SEQ ID NO: 76104 - DNA, 828 bp, Saccharomyces pastorianus
atgacatcgtctgcttcttctccacaggatttggaaaagggtgtgaacactctagaaaatattgagacgctcccccagcagggttcgattgcaggcgtttcgcagggcttccctaatattcaagagatatactccgacagagacttcattactctaggatcctccacctacaggcgcagagatttgctcaatgcactagacagaggggatggggaggaaggaaactgtgcaaagtatactccgcaccagttcgctaatccggttcctttgggtctcgcatcgttttctctgtcatgtctagttctgtcgctaattaatgcgaacgttcgcggcgtcactgatggtaaatgggcgctaagtttgtttatgttttttggtggtgccattgaattgtttgccgggttattgtgttttgtcattggggacacatacgccatgactgtgttcagttctttcggcgggttctggatctgctacggttatgggctaacagatactgataatttggtcagcggctataccgatcccacaatgttgaacaatgtcattgggttcttccttgcgggctggaccgttttcaccttcttgatgttgatgtgtacattgaagagcacgtggggtttgttcttactattgacgtttttggatcttaccttcctactactgtgtatcggcaccttcattgacaacaacaatctcaaaatggccggtggctattttggaattttgagtagttgctgcggttggtattcgctatactgttctgtggtgagtccttcaaattcttatttagccttcagggcgcacacaatgccaaatgctccttaa

SEQ ID NO: 76105 - DNA, 2529 bp, Saccharomyces pastorianus
atggttgctttcactgttgaccaaatgcgttctttaatggacaaagttaccaatgtgcgtaacatgtccgttattgctcacgtcgatcatggtaagtccactttgaccgattccttggtccaaagagccggtattatttccgctgctaaggctggtgaagctcgtttcaccgataccagaaaggatgaacaagaaagaggtatcactatcaagtctaccgctatttctctatactctgaaatgtctgacgaagatgtcaaggaaatcaagcaaaagacggacggtaactccttcttgatcaacttgatcgactctccaggtcacgttgacttctcctctgaagttactgccgctttacgtgtcactgacggtgctttggttgtcgtcgacaccattgaaggtgtctgtgtccaaaccgaaactgttttgagacaagctttgggtgagagaatcaagcctgttgttgttatcaacaaggtcgacagagctttgttggaattgcaagtttctaaggaagatttataccaaacctttgccagaactgttgaatccgttaacgtcatcgtttccacctacgccgatgaagttttgggtgatgtccaagtttacccagccagaggtaccgttgccttcggttccggtttgcacggttgggctttcactatccgtcaattcgccaccagatatgctaagaaattcggtgtcgacaaggccaagatgatggacagattatggggtgactctttcttcaacccaaagaccaagaagtggaccaacaaggacactgatgctgaaggtaagccattggaaagagctttcaacatgttcatcttggacccaatcttcagattattcactgctatcatgaacttcaagaaagatgaaattccagttttgctagaaaagttggaaattgtcttgaagggtgacgaaaaggacttggaaggtaaggccttgttgaaggttgttatgagaaagttcttgccagctgccgatgccttattggaaatgattgtcttgcacttgccatctccagtcactgctcaagcctacagagctgaacaattatacgaaggtccagctgacgatgccaactgtattgctatcaagaactgtgatccaaaggctgatttgatgttgtacgtctccaagatggtgccaacctctgataagggtagattctacgccttcggtagagtttttgccggtactgttaagtccggtcaaaaggtcagaatccaaggtccaaactacgttccaggtaagaaggacgatttgttcatcaaggccattcaaagagttgttttgatgatgggtagatttgtcgaaccaatcgatgactgtccagccggtaacattatcggtttagtcggtatcgatcagttcttgttgaagactggtactttgaccaccagtgaaactgctcacaacatgaaggtcatgaaattctctgtctctccagttgtgcaagtcgctgtcgaagtcaagaacgctaacgacttaccaaaattggtcgaaggtttgaagagattgtccaagtctgatccatgtgtcttgacctatatgtctgaatccggtgaacatatcgttgctggtaccggtgaattgcatttggaaatttgtttgcaagatttggaacacgaccacgctggtgttccattgaagatctccccaccagttgtcgcttacagagaaactgttgaaagtgaatcttctcaaactgctttgtccaagtctccaaacaagcataacagaatctacttgaaggctgaaccaattgacgaagaagtctctttggctattgaaaacggtatcatcaacccaagagatgatttcaaggccagagctagaatcatggccgacgactacggttgggatgtcaccgatgccagaaagatctggtgtttcggtccagacggtaacggtccaaacttggttattgaccaaactaaggctgtccaatacttgcacgaaatcaaggattccgttgttgctgctttccaatgggctaccaaggaaggtccaattttcggtgaagaaatgagatctgtcagagttaacattttggatgttactttacatgccgatgctatccacagaggtggtggtcaaatcatcccaaccatgagaagagctacttacgctggtttcttgttggctgatccaaagatccaagaaccagttttcttggtcgaaattcaatgtccagaacaagccgtcggtggtatctactccgtcttaaacaagaagagaggtcaagtcgtttctgaagaacaaagaccaggtactccattgtttaccgtcaaggcctacttgccagttaacgaatctttcggtttcactggtgaattgagacaagctactggtggtcaagctttcccacaaatggttttcgaccattggtccactttaggttctgacccattggacccaacctctaaggctggtgaaattgttcttgctgctcgtaagagacacggtatgaaggaagaagttccaggctggcaagaatattacgacaaattgtaa

SEQ ID NO: 76106 - DNA, 1449 bp, Saccharomyces pastorianus
atgagttttaaagggtttaccaaggctgttagtagggctcctcagtccttccgtcaaaagttcaagatgggtgagcagacagaggatcctgtttacgaggatgcagaacgtcgttttcaagaattggagcaggagacaaaaaaattaagtgaggaatcgaagagatactcgactgcggtgaatggaatgctgacacaccaaattggatttgccaaatccatggaggaaattttcaaacctatcagtggtaaaatgagtgaccctaacgctaccataccagaggacaacccacaaggtattgaagcaagtgaacagtatagggcaattgtcgcagaattacaggaaacattgaaaccggatctggctttggtggaagaaaaaattgttacgccatgccaggaactgttgaagattattacttatattcgtaaaatggccaccaagagaaatcacaaaaaattagacttagatagacatctaaacacttataacaagcatgaaaagaagaaggaaccaaccgccaaagacgaagaaagattgtataaagcacaagctcaagtggaagtggctcaacaagaatatgattactataacgacttgctaaagactcaattaccaatactgttcagtttggaagctgaatttgtgaaaccattatttgtctcattttatttcatgcaattgaacattttttacactttgtataatagacttcaagacatgaagattccatattttgatttgaacagtgacattgtagagtcgtacattgccaagaaaggcaatgtggaagaacaaacggacgccttgactattacacactttaaactcggttactctaaggcaaaattggagatgaccagaaggaagtatggtgtagcaaccgccgaaggctcacccgtcagtggcgcatcaagcggtgtcggatatggtgctgggtatgatccagcaactgccacttctccaacccctacaggatacggttatggtgccgcagcaccaagttacgccgctcaacctgctgcccagtatggtactgctgccgccgttggtactgctgctgctgttggtactgctgctggtgctgctgctggcgctgttccgggtacttatccacagtatgctgctgcgcaatctccaccgctcactgggctaggcttccaacaatcaccacagcagcaacagggaccaccaccggcctactctaatcctctaacatcacctgttgcgggcacaccagccgcggccgtagcggcagctcctggcgttgaaactgttaccgcattgtatgactaccaagctcaagctgctggtgatttgtctttccctgccggcgcagttatagaaattgtccagcgtactccggacgtgaacgaatggtggacaggaagatacaatggccagcaaggtgtgtttcctgggaactacgtgcaactcaacaagaactag

SEQ ID NO: 76107 - DNA, 1911 bp, Saccharomyces pastorianus
atgccaagggaaacaagtttggtaacaatcatcggtgaagatagttacaagaaattacggtcctcaagatgtcttctggtcggtgctgggggcatagggtctgaattgttaaaggatataatcttgatggaatttggtgaaatacatattgtcgatttggacaccattgacctttcgaacttaaacaggcaatttctttttagacaaaaagatattaaacaaccgaagtctaccacagccgtaaaagcagtacagcatttcaataactctaagttagtgccttaccaaggaaatgttatggacatttctaccttcccactgcattggtttgagcaatttgacattatcttcaatgctcttgataacttggccgcaagacggtatgtcaataaaatatcacagtttctatcactgcccttaatagaatctggaacagctggatttgatggatacatgcagcctattatccccgggaaaactgagtgttttgaatgtacaaagaaggaaacaccaaagacttttcctgtgtgtactatcaggtccactccttctcagccaattcattgcattgtttgggcgaaaaactttctatttaaccagctatttgcgtcagagacctctggaaatgaagatgataacaaccaggattggggtacagatgatgctgaagaaattaagcgcattaaacaagaaactaatgaattgtatgaattgcaaaaaattatcatatcaagagatgcatcccgtattccagagattcttaataaattattcattcaggatataaataaactgctagccattgaaaatttatggaaaacgagaacaaagccagtaccattatcagactctcaaataaatactcctactaaaacagctcagtctgcctctaattctgttggcacaatacaggagcaaattagtaatttcattaatattacacaaaaattaatggatcgctatcccaaagagcaaaatcatattgaatttgataaagatgatgctgatactttggaattcgtcgcaactgctgcgaacataaggtcacacatattcaatattccaatgaagtccgtatttgacatcaagcaaattgctggtaacattatcccggctatcgcaacaacgaatgctatcgttgccggtgcatcgtcattgatttccctgcgcgttttaaatctcttgaaatatgccccaactactaagtacactgacttgaatatggctttcacagcaaaggcaagcaatctatcccaaaatcgttatttatcaaatccgaaactagcccctccaaataaaaattgcccagtttgctctaaagtttgtagaggtgttattaagttatccagcgattgtttgaacaaaatgaaactaagtgatcttgtagtttcaatacgcgagaagtactcatatccacaggatatttcgcttctggacgcaagtaatcaaaggttactatttgattacgatttcgaggatttgaacgatcgtactttatcggaaattaatcttggaaatggttctataatattattctccgacgaagaaggtgacacaatgatccgcaaagccatagaattatttcttgatgttgatgatgaactcccatgtaatacttgcagcttaccggacgttgaagtcccattaataaaggccaacaatagtccgtcaaaaaatgaagaagaagaaaaaaatgaaaagggtgcagatgtagtcgcaactacgaacagtcatggggaagagggtatcgtgatattaggcgacgatgaaggtgagatcatcatcgatgctgaaccgatcaatggttcaaagaagaggccagttgatactgagatttctgaggcgcccagtaacaaaaggacaaagttagttaatgaaccaactaattctgatattgttgaattagactaa

SEQ ID NO: 76108 - DNA, 699 bp, Saccharomyces pastorianus
atgtccttcgagaacaaactgccaactccattagaaaacaacgatgctaagggccatatggtctgtaccctgaacaagactacggatgccagaagagcagcagagactttgtctattgcttttagtaactcgccagcgtttcattttatcagcaagaaaatcttaaatattcctctagctgagaaggtgcctacaaggacaataaccaccgatatcatatcgccattcctggattcaccttatggtgagatctccgaagttaatactttcgatgctgttgcagtgtggagtcttccacctcacgttccgaaggcaaggagtaatgatgcaaagttcaacaaggactttattgacgatttaaatgctcgcgtaaagcaagtcattccaaatggcatcaattactactatcttttctgtattggtaagaacttaaatgagaaaggaatcagaggttctgtaaggactatttttgaagagtacaaaaggagagcagacgaagaaaattgcgccattgtccttgaagctattgccgagcatgctaaatctgtgtacgaatattttggatttagaaattacatgacgttcaaatacggtgagtgtgaggtcgactctaacggcaattgcgatccgaatggtgaagggttcacagcctatttaatgatatatcataaggacggtaataaagtcttaaaagagtag

SEQ ID NO: 76109 - DNA, 1014 bp, Saccharomyces pastorianus
atgatggacaagcataagtatcgtgtggagattcaacagatgatgtttgtctctggtgaaattaacgacccacccgtagaaaccacatcactgatagaagatatagtgaggggtcaagtgatagaaattcttttacagtcaaacaaaacggcgcatcttaggggaagtaggagcattctccctgaagacgtcattttcttgatcagacacgacaaggccaaagtcaatcgtttgagaacatatctgtcatggaaggatttgcgtaaaaacgccaaggaccaagatgctagtgccggtgtagcgagtggcactggaaatcctggggcaggtggtgaagatgatttgaaaaaagcaggtggtggcgagaaagacgaaaaagatggtggaaacatgatgaaggtcaagaaatcccaaattaagctgccatgggaattgcagtttatgttcaatgaacatcctttagaaaataatgacgacaatgatgatatggatgaggatgaacgagaagctaatatagtcactttgaaaaggctgaaaatggctgacgatagaacacgaaacatgactaaagaggagtacgtgcattggtccgattgtcgacaggcaagttttacatttaggaagaataaaaggttcaaggactggtctggaatttcgcaattaactgaggggaaaccccatgatgatgtgattgatatactggggtttctaacttttgagattgtctgttctttgacggaaacagctctgaaaatcaaacaaagagaacaggtattacagactcaaaaggacaaatcccagcaatctagccaagataatactaactttgaatttgcatcatccacattacatagaaagaaaagattatttgatggacctgaaaatgttataaacccgctcaaaccaaggcatatagaggaagcctggagagtactacaaacaattgacatgaggcatagggctttgaccaactttaaaggtggtagactcagttctaaaccaattatcatgtaa

SEQ ID NO: 76110 - DNA, 1371 bp, Saccharomyces pastorianus
atgttgagatactatggggcgacaagaaacttacccttagtattcagcattaacaaattaatgttgagggcgtcatctttcaccaggccatttcattatagttcatattctctacagaacggtgatactcctgataaaggcagcactaataaaaatgaaatacggacacctaataacgctgtttggaaagaaaatatagaacttcaatggcagcacttgaaaaagaaattaaatgaattgtattctaggtttaacttccaccgagatcaattatcctttcaagttaacaaggccaaaaaatcaattcaagaggcaaacaggaagttgtctgagcaagagaatgaaatcaacgattcccgtttaaactataataaggatgaattgaccagtgcgaaaattgaaggattgccctccgaaagggaacaacatagaaaaaaatggtctagaaagttagagttttattttgactcattacaggagacgttatttactgccacacgtgctttaaatgatgtgaccggttattctggaattcaaaagctcaaatctagcatcagtctaatggaaaaaaaattagaagctacaaagaaagaacacaaactgtttaaggcacagtacgctaacgccattgatgaacgtgctcaatcccaaagagaagttaacgaattattgcaaaggcaaagcgcgtggtcttcgagcgatttagagagatttacgcagctatacaaaaatgacgccttgaatgctagacaggagcaagaactaaaaaacaaggttaaagaaattgaaagcaaagaagaacaactaaatgacgacttgtatagagcaattttgaccaggtaccatgaggaacaaatatggtcagacaaaatccgaagaacatccacctggggtacattcatcttaatgggtatgaatatattcttgtttattgtcctacaattactattagaaccttggaaacggaaaaggttagtaggatcgtttgaagacaaagtcaaaagcgctctcaacgaatatgccaaggagcagaatatgaagatggataaattgttacctggaaaatcatcggaagtaacagaccaaggcaacacagaaaactcgatcgttgaagagcacatagaacagagaggtgaatgtaaaattaatatggcggaaatcgacaggcctgaagttgcaacggctgagaccactacaacaggaatgaaatccttcagagatatttgggaacgaataaaggcactttttgtcacactaaaaagcatacaatataggaaacttgacgctcccctagtctttgacaccttagagttctacttatactcaatttctttagtgagtatgacaatcttggtatccgggctgatatga

SEQ ID NO: 76111 - DNA, 1287 bp, Saccharomyces pastorianus
atggaggaactaggtattgtgacacctgtcgaaaaggcagtcgaagaaaaaccagccgtcaaatcatacgcatcattgttggctcaactcaatggtacagtcaacaataacagtgccctgtctaatgtgaattctgatatatatttcaaattgaagaaattagaaaaagagtatgaactgctgactttgcaagaagactatattaaggacgaacaacgccatttgaaacgtgaattgaagagagctcaagaagaagtaaagagaatccagtcggttccattagttatcgggcaattcttagaacctattgatcagaacacaggtattgtttctagtaccacaggtatgagttatgtcgttagaatattatcaaccctagaccgtgaactattaaagccatctatgtctgtagctttacatcgtcattcaaatgctttagttgacatcctaccacctgattccgactctagcatatccgtaatgggcgaaaacgaaaaacctgacgtcacttatgcagatgttggtgggttagatatgcaaaagcaagaaatcagggaagccgtagagctgccattagttcaggctgatctatacgagcaaatcggtattgaccctcctaggggtgttctattatatggtccaccaggtaccggtaagacgatgcttgttaaagccgtcgccaatagtacaaaagctgcattcataagagttaacggctccgaatttgttcacaaatatcttggtgaaggtccaagaatggttcgtgacgtctttagactcgccagggaaaatgctccatccattatattcatagatgaggtagattccattgccacaaagcgttttgatgctcaaacgggttccgatcgtgaagtacagcgtatcctgattgagttgttgacacaaatggatggtttcgatcaatccaccaacgttaaagtcatcatggctacaaacagggcagacacattggacccagctttgctgagaccaggcagattagatagaaagattgagtttccctcacttcgtgataggcgtgaacgtcgtttgattttcggtaccattgccagtaagatgtcccttgccccagaagcggacttagactcgcttattattcgtaacgactctctatcaggtgctgttattgcagcgatcatgcaggaagctggtttaagagcagtgaggaaaaacagatatgtcatcttacaaagcgatctggaagaagcttacgccactcaagtcaagacagataataccgtcgataaattcgacttctacaaatga

SEQ ID NO: 76112 - DNA, 1932 bp, Saccharomyces pastorianus
atggattctcctgttctacagtccgcttatgacccatcaggtcagtatttgtgttatgtcactgtagctttggacaagcaacgcgttggtgtacagcccactcaaagggccacttcctccggagttgatacagtgtggaatgagaattttctgtatttagaggactcgaaattgaaggtgacgtgcttaaaatgggtaaacctggcttcttccgacacagtggctattatattgggtatgaataacggtgaaatttggctatattccgtgttggccaacgaagtcacctataaattcactacggggaattcatacgaaatcaaagacatagacttgatgggtaatcaactgtggtgtatcgactccagcgacgcattctatcagttcgatctgttacaattcaaactgttacaacattttagaataaacaactgcgttcaattgaataaactaaccattgttccagcaggcgattctgtcgcacaacttttggttgcatcccattccatttctttaattgacatcgaagagaaaaaagtcgtaatgacatttcccggtcatgtatctccagtgtccacattgcaagttataactaatgaatttttcatatcaggcgcagagggtgatagattcttgaacgtatatgatattcattccggtatgaccaaatgcgtccttgtggccgaatcagatatcaaggagttatctcattcaggccaagccgattctatcgcagtcactaccgaggatggtagcttggaaatttttgttgatccattggtatcgagttcaacaaagaaaagaggcaacaagtccaaaaaatccagcaaaaagattcaaatcgccagtaaagacggcaggaaagttccaatttataacgcatttattaataaagaccttttgaacgtatcgtggttacaaaatgctactatgccttacttcaagaacttgcagtggagagaaatccctaatgaatataccgtcgaaatttccctaaattggaataataaaaataagtccgccgatcgcgatctacacggtaaagatcttgcctcagccaccaactacgtggaaggtaatgcaagagtcacctctggagataacttcaagcatgttgatgacgctataaagagctgggaaagagaattgacttctttggaacaagaacaggccaagaccccacaggccaatgaactattaacagaaacatttggtgataagctagaatcaagcaccgtcgcaaggattagtgggaaaaaaacaaatttaaaaggttccaatctcaagactgctacgacaaccgggacggtaacagtaattctgtcgcaagcactacaatcaaatgatcattcactgttggaaacagtgctcaataatcgtgacgagagggtcattagggatactatcttccgtctgaaaccagcactggctgtcattctcttagaaaggttggcagagaggattgcaagacaaacccaccgtcaaggcccattgaatgtttgggtaaaatggtgtttaatcatacacggtggctatttggtttctattccaaatttgatgtctactctatcgtcgttacattccaccttgaaaaggcgttccgacttattaccaaggctactagcactggatgcaaggttagactgtactataaataaattcaaaactttgaactatgaagcaggcgacatccactcatccgaaccagttgtcgaagaggacgaagacgacgttgaatataacgaagaactcgatgatgccggccttatagaggacggtgaagaatcttatggcagtgaagaagaagaagaaggtgatagtgacaacgaagaggaacagaagcatacctcatctaagcaagatggccgtttagaaacggagcagagcgacggcgaggaggaagtcggatatagtgacgttgagatggaatag

SEQ ID NO: 76113 - DNA, 666 bp, Saccharomyces pastorianus
atgtcggcaaacgataagcaatacatctcgtacaacaacgtacatcaactatgtcaagtatccgctgagagaattaagaatttcaagccggacttaatcattgccattggtggtggtggtttcattcctgctaggatcctacgtacgttcctaaaggagcccggcgtgccaaccatcagaatttttgctatcattttgtctttgtacgaagatttgaacagtgtaggctcagaagttgaggaagttggtgttaaggttagcagaacacaatggattgattacgagcaatgtgaattagatctagtcggcaagaacgttcttatcgttgacgaagtcgatgacacccgtaccacacttcattacgctttgagtgaattggaaaaggatgcagctgaacaggcaaaggctaaaggtatcgatactgaaaagtctccagagatgaaaacaaacttcgggatttttgttctacacgataagcaaaaaccaaagaaagcagatctgcctgccgaaatgttgaatgacaagaaccgttattttgcagctaaaactgttccagacaagtggtatgcatatccatgggaatctactgacattgttttccatactagaatggctattgaacagggcaatgacatcttcattcctgagcaggaacacaagcaatga

SEQ ID NO: 76114 - DNA, 1137 bp, Saccharomyces pastorianus
atggaatctgctgatttttttacctcacgaaacttattaaaacagataatttccctcatctgcaaggttgggggagggttggacagcaataaccagcgactgtttgcagaaaagatgactgttagtaaaatacccatatggctagattgtgatcctggtcatgatgatgccatagccattttattaggctgtttccatccagctttcaatcttctaggaatcagcacgtgttttggtaacgcaccgccagagaatactgactacaacgcccgttctcttttgactgcgatgggcaaagcacaagcgattccagtttataaaggcgcacagagaccttggaaaagggaacctcattatgctcctgacattcatggtatatcaggtttagacggcacttctttgctacctaagccaacatttgaggcaagaactgataaaacgtatattgaggccattgaagaagcgattctagctaacaatggagagatatcctttgtgtctactggtgcacttaccacattagcaacagtttttaggtgtaaaccatacctaaaaaaatctgtcaaatatattagcattatggggggtggactccatggtctaggaaactgtaacccaaatctttctgctgaattcaacgtttggattgatcctgacgcagcgaattacatattccgtgatcccgatgtaaaggacaaatgtatagtagttcctctaaatttaactcacaaggccatagctacttacaaggtaaacgaaatgatatacaacgaaaagaataacagcaagttacgagaattgtttttcgaactttttcaattttttgctcatacctacaaggatatgcaaggatttgaatcgggtccacctatacatgatccggtagctttgatgccgcttttggaattttatgggtgggatccatcgtctgtggttggatttcgctacaagagaatggacatatcctgcattgatgatgttttcaacgaaaattcagggaaaattatcattgaaaaagaatatccaaatggcagtgatgttggtacaatagttggtctcgatttgaatatccagtacttttgggatcagatttttgaagcattaaatagagcagacaaaatgtcaacgattggataa

SEQ ID NO: 76115 - DNA, 564 bp, Saccharomyces pastorianus
atgttttatatttattccattatattctcgttaaattttaactttaaattaagagggcaaagaggcccagcgggagttaatttttcttcccattcagggtcaagactccatcgaaactgtttcaacatttcagccaaagaaattctcatttctgttagggctagttttccccctaggcatgctcttcggcctccatggaacccagtcacagcacatctgtttttcgccattctccagtttttccttatggtttcgatatctgaaccccatctttctggtttaaaatcatctgctgttgtgccccaagttttgggatcgtgtgaggttccaaagttgttgtacccgacatatacgcccttgggtataacaatttccgcccccaacttgcacgttttggtagtacatctattaataattgtgctcaaaggaggatacattcttactacttcgaagagaaaagcatttaataagggtaaatctgctaagccttttggatcagtgatgccgtttacttccttcctgagtctctcttgccattcatttgaatatttggctagaaggtag

SEQ ID NO: 76116 - DNA, 1470 bp, Saccharomyces pastorianus
atggagttgttaaagcttctttgtttgattttatttcttactctttcctatgtcgcctttgcaatcattgtcccacctctaaactttcccaaaaatatacccaccatcccattttatgtagtatttttaccagtaatatttcccattgatcaaacggagctatacgatctttatattagggaatcaatggaaaaatacggtgctgtaaaatttttctttggttcacggtggaatattctcgtttctcgttctgagtatctagcacaaatattcaaagatgaagatacttttgcgaagagcggtaatcaaaagaaaatcccatacagtgctcttgccacttacacaggggacaatgtcattagcgcgcatggtgcagtttggagaaactacagaaatgctgtgacaaacgggctccaacattttgacgatgcacctatattcaaaaatgcaaaaattttatgcactttgataaaaaacagactccaagaaggacaaacttcgatccctatgggacctttatcccagagaatggcattggataacatttcacaggttgcccttggatttgattttggtgctctaacacatgaaaaaaatgctttccacgagcatttgattcgtattaaaaagcaaatatttcatccattctttttaacttttccattccttgatgttcttcctattccttcaagaaaaaaagccttcaaggatgttgttagttttagagaacttctcgttaaaagagttcaagatgaattagtcaataattacaaatttgaacaaactacttttgctgccagtgatctaattcgtgctcacaataacgaaataatcgactacaaacagttgaccgataatatcgtcattatccttgtcgctggccatgaaaacccgcagttgctatttaatagttcactctaccttctagccaaatattcaaatgaatggcaagagagactcaggaaggaagtaaacggcatcactgatccaaaaggcttagcagatttacccttattaaatgcttttctcttcgaagtagtaagaatgtatcctcctttgagcacaattattaatagatgtactaccaaaacgtgcaagttgggggcggaaattgttatacccaagggcgtatatgtcgggtacaacaactttggaacctcacacgatcccaaaacttggggcacaacagcagatgattttaaaccagaaagatggggttcagatatcgaaaccataaggaaaaactggagaatggcgaaaaacagatgtgctgtgactgggttccatggaggccgaagagcatgcctagggggaaaactagccctaacagaaatgagaatttctttggctgaaatgttgaaacagtttcgatggagtcttgaccctgaatgggaagaaaaattaactcccgctgggcctctttgccctcttaatttaaagttaaaatttaacgagaatataatggaataa

SEQ ID NO: 76117 - DNA, 1611 bp, Saccharomyces pastorianus
atgacatttactagcaacttgcccccaagctccgagcagtcaatatcaccacctgcctcttcattttcttcatcggctgatacgttgaaagatattgatattccccataatggagccgatttgtctacatatagtaaatttctggccctgtattgcagaagcgacaaatgtaatgacttttactctttagaggaaaaacagaattgcaaatttggagaccaatggctcgactttatcaacaccatttacagtctggacttttctggatccgaagtaagtggacgggtttctgaaagaattttgccagcttctttagcaaataaatttaccaataatttaggagtggcaataaagatttctgaatatacacgcggtgacgaacgccaaattcgtgggtgtgttacaactgttgagaatgaaaattctttcaataactggttcgtatatcatattttagaccaatctcggttatctctaagtgaacatccaattgtaaccaaagaagttaagtatcacgaattatttgcagatttttttgagaaaaatttgaaaaacacaatagttaatgatcaatggaattttggtggccgtgactattttattgaacgttcaagatattttaccgatcgatatttgagaattgaatgcatcttgccagcgtttccatgtaagtcatctaatgagcaaaaagtgtacggttccgttcctgacaaaggcgaagaactcgctttgaaaagattaataaaagccacacaagaccttgtcaagatatatccaccgggtatgaaaatttggatagttagtgatggccatgttttctccgattgtattggggtcgatgatgacgtcgtgagtacttacacgaccaaattgcacgaactgtataaaagagtggctatacctggtgttgacgccattggcttttgtggattgaacgacttattttttagcggtgcagctagtaaagttttcgatccaaagtgggttagtgatgttgaagttgcacactacacaggaactcaaatctgtcctaagtccgatttgtcgagacagattttgatgaaaggctgtgatacagatgcaggtcgtttgagaaagcagattgcaatagaaggacatccaagattgcatctgtataggggcttttcacgttttatgatggaagatttatctctactagaacatttccaaagttattccagaaaaaaattcaagaaaatcatttcaatgatcgcttttaacatgattaagagaaatgacgcgtattcgaacttagtggaattgatattccctcatcatttgagaatttctattcatgcgcacattaacagcgggcccaaatttggtataaaagtaatctccaacgaacagtgttctattgttagttcgttagaagaccttgatgaacccaaatttgaagattttttacatattcccacaccttggcataattgtgtcgtgaaggttgaggatgaaaaggagaaatactttttgacaaaatcaaaagtagtcaaggaggctctcgaaaagggtatgtatgatggtgtatggaaagatactcgtttcgatattggagaaggaggacatttcgttatcaagaaaatctcttaa

SEQ ID NO: 76118 - DNA, 516 bp, Saccharomyces pastorianus
atgttttttattaaagacctttcgcttaatattacccttcatccgtcctttttcggtcctcgaatgaagcaatatctaaagacaaaactattggaagaggttgaaggttcgtgtacgggtaaattcggatatattctttgtgtcctagactatgataatatagatattcaacgtgggagaatattgcccacagatgggtccgccgagttcaacgtgaaatatagagctgtagttttcaaaccatttaaaggggaagtagtggacggcacagtcgtttcatgttctcagcacgggttcgaagtgcaagtaggtccaatgaaagtatttgtgacaaagcatctgatgcctcaagatttaacctttaatgcgggttcaaacccaccatcataccaaagttccgaggatgtcatcaccataaaaagtagaattagagttaaaattgaaggttgtatcagtcaagtgagttctattcacgcaatcggtagtatcaaagaagattatttgggtgctatttaa

SEQ ID NO: 76119 - DNA, 792 bp, Saccharomyces pastorianus
atgccacgattgacggttggaacgaagaatatgttgtatcctttgcaaaaaacacttgcagtaggaagttgcaagccagagcaggttccaataagatcactagcctcagtggtggagagttcctccaaaatactcgacaaaagcggcagcgatcgcgaagtagatataaacgtaagcgagaagatttataagtggacaaaggcgggcatagagcagggaaaggagcatttcaaagttggaggtaacaaagtctactttcccaaggccaggatcatcctcttgaggcccaacgcgaagcacacaccgtatcaagcaaaattcatcgtcccaaaatcgttcaacaaactggatctcagagactatctttatcatatctacggcttaagagcaatgaacattacgacgcagctgcttcatgggaagtttaaccgtatgaacctacagacgacgcgatttagagaaccgcagatcaagaaaatgactatcgagatggaagaacccttcatttggcccgaagaaccccgtccggacgaaaactccttctgggacagcaccacgcctgacaacatggaaaagtaccgtgaagaaagacttaactgcttgggctcagacgccaacaaacccggcacagcattcgacggagtcgtggggccttacgaacgggtggcccagccttttatacctcgcttcttaaaacgagagatagacaataagcgagagcgtcacgccgccgaactgcagcgcgcagataaactaattgccctgaacaggtacatagaagatctacattag

SEQ ID NO: 76120 - DNA, 246 bp, Saccharomyces pastorianus
atgacgttattttccttttttttagttatattatctttttattatattctattctctctactggggagaaattacttaattttcatttatattaaaataatacctactgtttcatactttcactttaaccaccatttctttaagctaaagtttaggaacgctaaacatatcattgtttacttttcgaggaaacataactttcaacatcaggctcttttcgttttatattatctatattctatatag

SEQ ID NO: 76121 - DNA, 645 bp, Saccharomyces pastorianus
atggccagaattgtcgtattaatttcgggctcaggttccaacttgcaagccttgatcgatgcccaaaagcagggccaattaggcgaggatgctcatattgtctctgtcacatcttccagcaagaaggcatacgggttaactagggcagcggacaataatatccccacaaaggtttgttcgctatacccatatacaaagggtattgcgaaggaggacaaagccgcaagggccaaggcaagatcccagtttgagaacgacctcgcaaaactagtgctcgaggaaaagcctgacgttatcatctgcgcgggctggttattgatccttggatctactttcttgagccaactgcaatctgtgccgatattaaatctgcatccagcgctaccaggttgtttcgatggtaccacacacgcaattgaaatggcatggcgcaaatgtcaggacgagaacaagcctctgacggccggatgcatggtgcactatgtcatcgaggaggtcgacaagggtgagccattggtggtaaaaaagctagaaatcatacctggcgaagaaacactagagcagtacgagcaaagggtacacgatgctgagcacatcgcgattgtagaagctacatataaggttttacagcagcttcacaaataa

SEQ ID NO: 76122 - DNA, 720 bp, Saccharomyces pastorianus
atgcaccaagattttcaagaagacgagcatgagtatccagacatcagacgcaatccgctgcatgaggtgaccatgacttcctacatactggggattcttttaggtatatttgttggtctttttccacaaattagattcaagaattttaacctctttattattgccctgtccttattccattttttggagtattatattacagctaaatacaatcctcttaaggtacattcagagtcctttcttctgaacaacggcaaaagttacatggcggcacattcctttgctattctggaatgcctcgtagaaagctttctttttcctgatctgaaaatttttagctactctctagctaccaagctttgtacagtacttggatgtcttctagttattctgggacaatataccagaactattgctatgcatactgcgggacattccttttctcatattgtgaagaccaagaaggagtccgatcatgttttagtgaaaactggcgtttactcctggtcaagacatccaagttatcttgggttcttttggtgggcaattggcactcagctactgcttctaaatcccgtatcattggttattttcatttttgtactttggaaatttttcagtgatagaattcgtgtggaagaaaaatatttgatagagttctttagcgcggaatacatagaatacaagaataaggttggtgtcggaataccttttatataa

SEQ ID NO: 76123 - DNA, 1026 bp, Saccharomyces pastorianus
atggcaggcccaaggaatgtgcgtacattacatggaaatggaggccgtaataatgatgtgatgggcccaaaagaattctggttaaatatccccccaataacaagaactttatttactctagcgatcgttatgacgatcgtcggccggttgaatctaatcaatccgtggtactttatttatgtttggaatttgacgttcaagaaggttcagatatggagacttcttacttcttgtgtaatgctttcgtctcgtgccatgcctgcgctaatggaactatatagtatttatgacaggtcctcacagttggagcgagggcattttggtcccggtttgtccaatagacgaggactgatggtaacagtagactatgcctactacctgtgcttttgtatactagccatcactacggccactacaatcatttatgggtcctactaccctgttgtgctcacctctgggttcatatcatgcattacatatacttggtcgatcgacaatgccaacgtgcagatcatgttttatggtttgattcctgtttgggggaagtacttccccttaattcaattgtttatctctttcgtttttaatgagggtgatttcgtaatctcattgatcggttttactacagggtacctttatacatgcttagatacccatacactggggccaatatgggggatgatatccagaaaagctgatccaacctacggaatctcgcccaatgggaaattctcaacgccatggtggtttactagtctatatgctcgcataacgggtgcccacaatgaaactgcaacattcaacaacaactttgccaatgtgccatcttcgcaaagagaaacgagaacttttagtggaagaggtcaacgattgggtacggcccctgcaacattgtctcaaaccagtggcacagattcaggcagagcttctggaagtcaattaagaagtggcccatcgaatttgaaccaatttcaaggccgcggccaacgagtaggacaaacaaacagcccctccgactcacaataa

SEQ ID NO: 76124 - DNA, 708 bp, Saccharomyces pastorianus
atggctgttcacaccaataggcaaatccttacaagaggcaaaaactatgctacaaagcaatcaaagaaattcggtaccgatgaggtgacgttcgacaaggattctcgtttggattatctgactggctttcacaagagaaagcttcaaagacaaaagaaagcacaagagtttattaaggagcaggaaaggcttagaaaaattgaagaaagacagaagattcggcaggaacgtaaggaggtgatggaagaacagttaaagacgtttaaagagagtttaaacttggaagctgagatagaggatgcgaaaaatgataagacggaggatttgcaggtagaatctgatgaatcctggcacgggtttgattctgataaagatgacggcgataacgacaataatgaaagtagcgtaaagcctattttgaagaaaggagcaatcacggaaatatacgatgactcaactactgttgaattggagacattggaacccaatgataactttgaatatttagcccagctaaataatgtcaaattagaaaaggcagaaaaagtactcaaacaaagcataaatagagccaccaaatacgcgaagtttctgggcgtggatgagaaacaaaagaagaagccaagagtaaaaaagttcagatatttgaccaaaaatgaacgaagaataaaccaaagaaaggcaaacgacaacaagcgtaggagataa

SEQ ID NO: 76125 - DNA, 576 bp, Saccharomyces pastorianus
atgcgactgcattatctcctacgcttgttgtcgtttgcctttctttggtttattcttcgttcatttttggtcaaatatctgaacttttttactcttggcttcttcttttgtttctcatccacgcccagaaacttcgcgtatttggtggctctatttatgctttgtttgagtactttttctgccttttctaatttgacattatttagctgggctaaatattcaaagttatcattgggttccaatgtctccaattcaacagtagttgagtcatcgtatatttccgtgattgctcctttcttcaaaataggctttacgctactttcattattgtcgttatcgccgtcatctttatcagaatcaaacccgtgccaggattcatcagattctacctgcaaatcctccgtcttatcatttttcgcatcctctatctcagcttccaagtttaaactctctttaaacgtctttaactgttcttccatcacctccttacgttcctgccgaatcttctgtctttcttcaatttttctaagcctttcctgctccttaataaactcttgtgctttcttttgtctttga

SEQ ID NO: 76126 - DNA, 1125 bp, Saccharomyces pastorianus
atgaggatacagtcgctttttgttttatttaatgttgccatcatcgcatggtcatatccatatgagcctttaagggttttacaagtaggagagaatgaggtaatggaggttcccgaatcagaaaagctaaacttacgaagaagaggtgtcaaattctttgatgtgaccaaacacacttctttcttacctttctttaacaaggaggaagagccaacagtaccaacgtataactatcctcctgagatatcgaacaaagaagtagtggatgattcgattaagaatatagacaagggctctatgcacaagaacttggcaaagtttacaagtttttacacccgttactacaagtccgatcacggctttgaatctgccgagtggttagctgcaactatcgctaatattacaaaagatattccgcaagatacgttgactattgaacattttgatcacaaagaatggaagcaatattcaattatagtccgtgtcacgggatctactacgccagaagatattatagtaattggttctcatcaagattctatcaatctgctactgccatccataatggcagctccaggtgcggacgacaatgggtcagggacggtgactaatatggaggctctcagattatatacggaaaattttttgaagagaggatttagacctaacaacactgtggaatttcacttttattccgccgaagaggggggattgttgggttctcttgatgtttttacagcttatgccaaacagaaaaagcatgtgagagcgatgcttcagcaagacatgacgggatatgtttctgatccagaagatgaacatgtggggattgtcaccgactacactactcccgcattaactgattttataaaactaattatcaactcttatctatccattccttacagggatacacaatgtggctatgcttgtagcgatcatgggagtgccaccagaaacggatttccaggctccttcgtgattgaaagtgagttcaaaaagactaacaagtatattcacagcactatggatactttggacagattaagtctcgctcatatggcggaacacacaaaaattgtattgggggtaatcattgaactcgggtcatggtccgcttggtaa

SEQ ID NO: 76127 - DNA, 372 bp, Saccharomyces pastorianus
atgttaccgctatgcttgacgttcttatccttctttctgtctcttggtggttccttcaaagcagtaatgaccaaagaggaagcagatggaacaacagaagcagcagcttgtctgttttggattttcaattggacagtaactttgatacctttgaattccttggtggccttggcgatatcttcaccaaccttctttggggataaacccaatggaccgatctttggagccaaggcggcggaagcaccgacttcaccaccgacagctctcaagtacaagtacttaacttcatttggatcaaactttggaggcatattgactattgatttatccttctattgggcacttggggttgctttaacgggaagtaagtaa

SEQ ID NO: 76128 - DNA, 498 bp, Saccharomyces pastorianus
atgcctccaaagtttgatccaaatgaagttaagtacttgtacttgagagctgtcggtggtgaagtcggtgcttccgccgccttggctccaaagatcggtccattgggtttatccccaaagaaggttggtgaagatatcgccaaggccaccaaggaattcaaaggtatcaaagttactgtccaattgaaaatccaaaacagacaagctgctgcttctgttgttccatctgcttcctctttggtcattactgctttgaaggaaccaccaagagacagaaagaaggataagaacgtcaagcatagcggtaacatccaattggatgaaattattgaaattgccagacaaatgagagacaaatccttcggtagaactttggcttccgttactaaggaaattttgggtactgctcaatctgtcggttgtcgtgttgatttcaagaaccctcatgacatcattgaaggtattaacgctggtgaaattgaaattccagaaaactaa

SEQ ID NO: 76129 - DNA, 1899 bp, Saccharomyces pastorianus
atgtcaaaatttacttggaaggagttgattcagcttggttcccccagtaaagcatacgagtcctccttagcatgtatcgcccacatagatatgaatgccttttttgcacaggttgagcagatgcgatgtggcttaagcaaagaagatccggtagtctgcgttcagtggaattccattattgcagtctcttatgcagcaagaaagtatggtatatcaaggatggatacgattcaggaagcactaaaaaaatgtagtaacctcataccgatccatacagccgtttttaaaaagggagaagatttttggcaatatcatgatggatgtggatcttgggtgcaggatcctgcaaagcagataagtgtggaagatcataaagtatcactggaaccatataggagggaaagtcgcaaggcgctgaagattttcaaaagcgcatgtgatctagtcgaaagggcgagtattgatgaagtatttcttgatttgggccggatttgtttcaatatgctaatgtttgataatgagtacgagcttacaggcgacttgaaactgaaagatgcattaagcaatattcgtgaggcttttatagggggcaactatgatataaattcccatctacctcttatacccgaaaagataaagtctctgaagtttgaaggcgatgttttcaatccagagggcagagatctgatcacagattgggacgatgtaatacttgcactaggatctcaggtatgcaagggtatcagagatagcataaaagatattctcggttatactacttcgtgtggtttgtctagcaccaaaaatgtttgcaagttggcttctaattacaaaaaacctgatgcccaaacaattgtgaaaaatgattgtttattagattttttagattgcggaaagtttgaaattacatcattctggaccttaggcggcgttcttggcaaagaactaattgacgtattggatcttccccacgaaaacagtattaaacacatcagagagacgtggcctgataatgctggccagcttaaggaatttttagatgctaaagttaagcaatctgattatgatcgctcaaccagcaatatcgaccctttgaaaacagcagatttagcagaaaagttgtttaaattaagtagaggccggtacggtctgcccttaagttctcgccctgttgtaaaaagtatgatgtcaaacaaaaatcttagaggaaaatcgtgcaattccatcgtggactgtatttcttggcttgaggtcttctgcgctgagcttacgtccaggattcaggatctggaacaggagtataacaagatcgtaataccaagaacagtatctatatctttaaaaacaaaatcctacgaagtatatcgaaaatcaggtccagttgcgtacaagggcatcaatttccagagtcacgaactcctaaaagtaggcataaaatttgtcacggaccttgatattaaaggaaagaacaaaagttattaccctttaacaaaactaagtatgacaattactaatttcgatattatagatttacaaaaaactgttgtagatatgtttggcaatcaggtccatactttcaaaagctcagcaggcaaggaagatgaggaaaaaactaccagctcgaaagctgacgagaaaactccgaagttggaatgttgtaaataccaggtgacttttacagaccagaaggctcttcaagagcacgcagactatcatttagcattgaaactgtcggaaggcttaaatggtgctgaagaatcatccaaaaacctttctttcggggaaaaaagattgttgttttcacggaaaagaccaaactcacaacatactgccacacctcagaagaaacaagttacatcttccaaaaacatcttatcattttttacaagaaaaaaatga

SEQ ID NO: 76130 - DNA, 2853 bp, Saccharomyces pastorianus
atgtctgctaagaaaaggtcttcgggaaacgcagcatttgaacttccaaaacggagaagaacctaccaagcttgcatcagctgcagatcaaggaaggtgaaatgtgatcttggtccggttgataacccacacgacccaccgtgtgcacgttgcaaaagggagctaaaaaaatgtatttttagctctaataagggtacttcgaacgacttgcctcctaattcgattaatacaataagtctgtcatctctaggtaagagtaagcaagagatacaaaatgactcaacgagcccaattttatcggatgtacctttgtcaagaaaagggactagcaatgaaaaatcatttaaatcagaagggatgaagtggaagcttgaactttcctccatgcagaacgccctagagtttctggcccaagctgctggcactgtagcaaaagaaggcgcaaaagaaatcataaaagacaagtccacaacaccgaaaccactggaaagttctttggatgcgacaaataaatctgctacggacgaggggttgaaacgactttcaaaaagtgacagtactaacacactttacaaaaatacagcagatatgcttaaccacacgctgaatacgaataggaaaacatcacaattaatggaagaaatcgggaaagtgagacctacacctacccggaaaattgacaacttcgaatacatcggtccagatagcttgcttactaaagaggaggcgattgaactcatagaggcattttttctcacgatgcacccattctttcccaatatcccacttcaattgcatgatccgaaagaattagcagaatatccaattttgttttgtgcaattttgactgtttctgctcgctatcatcctttcgatactttaggattagacaatggagaagatgggatgagacacattgaagttcacgataaattatgggtgtattgccagaagcttatatctcaaacaatttgggcagaggctagtactaggtcaattggcactgtgcttgctttcataattttcacggaatggaacccaaggagtatccactataaatggtctgactatgcaaatgatcctgagttaaataatgtcaacgctagaggaagtaagaatattagtacgaggaaggacgaagaaggattgaccggtgtcggcgcaatccgtagaagcgaccgaatgtcatggatgctgacagggtctgcagtaaggctggcgcaagatatgggattcattgaaaacagctcaaaagtattcattgtcactcatatatctgagactaccagtgctatgaatatgaatcaaagatccttattaacagaatcattcagcgttttaaacttgaatttaggaaaaattgaaaacgatggaaatgaaagcaatgaggattaccttgggaatgaaaaattttatctggatgagattttgcctgatgaagaaagtaaactaaggtggaagagagtttttgaaaactcagaaaatgaccacgacaacgagaaaaattttctgactgattgggagagggagtttttaaacgatgagtatgttttatattattctaataaaaaagatgatactaatctagcacagaatcacataccaccatttccactaagattctcattcgcccaaagagcaaaaatagagatcattcgaatcctatccatagcatatgagacgatttactgtgagaagaataagaggaaattggcaacgacagatcagagacacaacctctctgtcctaagtgttttttctcccttgatagagggctggctcagtaactacagagagcttcttgtacccctttctgatgtccctttctcactagcagataggaagaacaaaaaacaaatatttgataacatcgatagaataaatggtgaaagtattatcacagatttcaattattgtcaactttatatcttttccctcgcactgcaagtggatgggaaaacaagcaggttgaatatgaatgaaattgtgacaagcgcgaggtatgtggaattagcatacagatctgcaaaagaaatattgagttctgcaaagcgagtttcaaggcaaggaatgctaaaatacatgcccgtaagatgggtaatacgaataattagatccattgcgttcatagtaaaatgctacctaacacttactggtagtgaactggcaacaaatccagatgccagaaacattttaaaattaagcgcaatatcggttgacgaaacattcgatatcatccgtgacactgcggttactttaaaagaagctacaccagatgaattacatctatgtcaaagatacgcagccatattaatgtacttatgtacagagatgaaacttcgaaaaaaatcttacttagaacgaccacccttattaagagatggcaccactcctctagagagcaatcgcgaatcctcactggagggacaagacttaactaagaagccaatattctctaaacgtattggatataataaaaccgagactacttttgaaccctcggaaaggcctttgacggaggaaattaatagcaattctcagaattcaaatgatacatcttctaaaggtatcgttgatccttttgttgaacaaaacaacgatatcacaacagcgttactgaacaatgaactcttccaaggtccatctctatctgacgaagttacagattggttcggtgctagtgaagatatcgggcttgaattcgtagaaccatggacagaacttattgagcaacgatatatgcaatgtggagatggtgataataataatttcgagaatttatacaacttgttcgtgaatagtaatgacaccaataatgatattaataactcaagggcaataacgcgtaaataa

SEQ ID NO: 76131 - DNA, 1230 bp, Saccharomyces pastorianus
atgggcaatatccttcggaaaggtcagcaaatatatttagcaggtgacatgaagaagcaaatgttgctaaataaagatggaacacctaagaggaaggtgggcagaccaggcagaaaaaggattgactctgaagctaagagtaggaggactgcccagaatagggcagctcaacgagcgttccgagataggaaagaagccaaaatgaagagtttgcaagagagggtagagttactagaacagaaagatgcgcagaataagactaccacggactttttactatgttctttaaaaagtttactgtcggaaattacaaaatatagagctaagaattctgatgatgaaagaatattagccttcctcgatgatctgcaagaacaacagaaaagggaaaacgaaaaaggaacaagtacagcagttagcaaggctgcaagggaattgccatcgcctaattcagatgaaaacatgactgtgaacacaagtatagaagtacagccgcacactcaagagaatgagaaagttatgtggaacataggctcatggaacgctcccagtttaaccaattcgtgggattctccccccggaaatcgaacaggtgccgttaccatcggtgacgaaagtattaatggtagtgaaatgccagatttcagtctcgatcttgtctccaatgatagacagactggtctagaagctttagattacgacattcataactactttcctcagaactctgaaagcctgaccgctgaaaaaatagatacgtcagcatgtcaatgtgaaattgaccaaaagtatcttccatacgagacagaagatgatactttattccccagcgtgcttccccttgctgtagggagccagtgtaataatatttgcaaccgcaagtgtatcgggaccaaatcatgttcaaataaggagatcaaatgcgacttaataacaagccacctattgaatcagaaatctctagcttcggtgcttccggtggctgcttctcatactaaaacaattcgaacccaatctgaagcaattgaacacattagcagcgccatatcgaatggaaaagcgtcttgctaccacattctcgaagagatctcctccctaccaaaatattcatcgttggacatagatgatttatgcagcgaattaataatcaaggcaaaatgtacagatgactgcaaaatagtagtcaaagatcgcgacttacagagtgctctggttagacagctcctgtag

SEQ ID NO: 76132 - DNA, 1605 bp, Saccharomyces pastorianus
atgtccaatgcaaatctaagaaaatgggttggtttttgctttgttgccatttatctctttttaggtgttccactgtggtacaagctaactacagtttatagagcatcattaccaataaattacattgagtcacttcaaaataacaaattccaagatattcatctcgtaataccggtgtatgttaagtcagatacttacagatttcctgacgttcatgacgctatccaagtacaagttaaccatttattgaattctcaggagcaacaggtcccttggtctttacaagttcttccatataatgagactattgagcagatggaaagtgaaggcaaccagtttcatgtcgttactttgaagttagacgaatttattggttactcatcagcttacgacaccaaagaaacactagtatattacgacgatgctgccgttttaagtaatgatctaccgttttttgttgctcaaacattggtagagcacactttccaattggaatggacgcatttgaataaaacgtgtgaaggcgtttctacaaacaacgatgtcgcaatatcttatgatccaaacattcatttaagtgtaactttattgtcaggtgatgggaatcctgttgcatgggaaattgagcctacattaactgactacttttcaccttttaggaagttcttatcaccactggtaaattttacagtagattcatccattgtttatcataatgatttgaatttgcattcattaaatggatcatgtacaagcgttacgtggtttgatctctctcatactattgatctttctgaactttcttcaatgacctattacccagaagattctgcactgaatttagccatagtctttcctagtgcttcttcaagtcccgatggtctggcgttcattaatggcactcggatttcagacgaaataaccacattagattggaatagttatctagttcctcaatggggggttataataataaataaaatgccgttgaagccaaattcagtcattagcgaagattatttagaacctatgatgtaccgttttgcgacagatatttttcaactattgggattaacggagggctcgcaagatttgttatcaccttatattaccatagattcattcaaaaggttgacaattttacagaatctagataaagctacggaaacattatggtcgttagtgaaattaactcaacaatttcagggcatgtctatcccacgcgaagtatcggataatgttatcgaagctttagacttaaggctacagattattgatttattaaatgatcctggaaagggtggagatatcgtctggaacaatgccctgcatctaagtaatgaattggttaaactatgcgaaaaggcatttttcaatggagaaatggttcaacaaaatttcttcccacaagagcacatgatagctgtgtatttacctttattaggcccaatatcggcagtcatgttctttggtttctacaacgtgatgaaggaaaagaatcaaaagagtaaaaagaatggaaccgagagagaagttgctaaagaaaaattagagttgaaagaggctcaaaaattacatgctattgatggtgaagatgaattatga

SEQ ID NO: 76133 - DNA, 987 bp, Saccharomyces pastorianus
atggagagaatcatacagcagactgactatgatgcgttgtcgtgcaaattagctgctatatcagtcggatatcttccttcaagcggcctgcaaagattgtcggtggacctatccaaaaagtatacagaatggcatcgcagctacttggttactctcaagaaatttagtaggcgagcttttggaaaagtagacaaagcaatgcggtcttccttcccggtaatgaactatgggacatacttgcgtactgtggggatagacgcggccatattggaatttttggttgcaaatgagaaggttcaagtggtaaatttaggttgcggttccgatttacgaatgctgcccctgttacaaatgttccctcatttagcttatgtggacattgactacaacgaatcagtagaattgaagaatagtattttgcgtgaaagtgagattttgcgtacctccctcggtttgtcaaaggaagatacagcaaaatcaccctttttgattgatcaagaaagatataaacttgctgcttgtgatttgaacgatatcactgaaacaacccgtttgttagacgtatgcactaagcgcgaaatacccactatcgtaatatctgagtgtcttttgtgctacatgcataataatgagtctcaattactaataaatacaatcatgtcgaagttttcacatggactatggatatcctacgatccaattggtggttctcaaccgaatgaccgatttggcgccattatgcagtccaacttgaaagaatcaaggaatttggaaatgcccacgttgatgacgtataattctaaagagaaatacgcttcgagatggtctgcggctcccaacgttattgtcaatgacatgtgggaaattttcaatgcacagattcccgaatctgaaagaaaaaggctcagatcattacagttcttggacgaattagaggaattaaaggttatgcaaactcattatatccttatgaaggctcagtggtga

SEQ ID NO: 76134 - DNA, 423 bp, Saccharomyces pastorianus
atgtatacaaaagagtactactggttttcacaatatatgataataacaagcactttggtgctcaccataatatggtccatcttaccatcatcgctgggtgaggctgcaccaaagcagtttatcaacacgctattggacatcttcccacaaagaagatggattattaccttggagagcataatgctgatgggcatgctatgcacatacatcggccttctgatgtacaatgaagatacattaacaccgccgctagattctctatctacagtaacggatgccggtggtcaacttgtaatagaggacgacccggacgtattcgttaagaaatgggcgtttaaagaaacaagtggtatttacgatctgcctctgatggatgcctgccaacttctctacctatatgataacgaccataccagcacatag

SEQ ID NO: 76135 - DNA, 1044 bp, Saccharomyces pastorianus
atgacaactttattacagctcttgtcaaattattataaggctaaattagattcagaacgaatatacaatgaatatgttcagtcgcagtatgagtttgcatctttagacaagttgaacaacaataaaggtgacccaaagaaagtagttgatgagacattatttttgcagaggcaaattgcccagctgaataaacagttacaactttcatttcaagagaatgaaaaactattaagcgtacagaagaatcaaaaagctctttatcaaagtaagttatccagcaaggatgcattcattgatgatttgaaactcaaactgaaagtcgagcagatatctgtagacaaacataataaggaacggacaccttcaacaggccgtgatgaacaacagcgtaattcaaaagcggcacatacatcaaagcccacaattcatcttctttcgccaattgtaaatcgtgataagcctaataatcaaacgaacgacaggggtggcaacgatcctgactcgcctacatcacaaagaagatcaagaggactgagatctttattgagttcaggtaaaaatacaatatttgattcaatatccaaaaatctcgacgatgagataaatgaaaatgcgcatatcagaaatgataccacatcttccaagatagctggcaaatcgccatcaagattatctgcgctgcaaaaatctccagaactgcgtaaagaaaggaacaatatgatattaaaggaacacatactgcgttcaaaagatgaccaaaatatcacgtcatctagaaaactggataatatcgagctatctagtattggtgactctactgcaatgacatcaaggagttctaccgttaatgcaaatgacatcttgggaaatgaagagaacgacgggattacaaagctgaaaagagttaacaagttaaccagctctccagttaaaagggattgcagtacaaacaagaaaagaaaactcacaaagcagcgaattgccacgttacccaactcagatgaagaattgagtaataatttaaatgttgacgagtttgtatga

SEQ ID NO: 76136 - DNA, 393 bp, Saccharomyces pastorianus
atgagcaggaaaacgttgccggaaaaagtttatttatccgagagaataattgatgaagaagtagcggtatgcacagtagcggcggaagtattagcaatttttactctggtgtgcacaagagtgttcatcatttttttcacggctaggatatgccatggaatatggccatcttcgccatcagagagaccgtaccacacgtttagagcagccaggttgcgaaactcttctaagatggtttccagcaattgtgtactatcagaatgtggacagtttaaaaggttgactgcgaatttgtcccaaaccgtatcaccgtcgcattttttgaatttgatcaaagcaccactcctaatagcacagcgatgctgtgagtgtgccagtgggaacgggtgctga

SEQ ID NO: 76137 - DNA, 2064 bp, Saccharomyces pastorianus
atgccttacaaaatcaaccgaatgaaaaattcgctcgagataaatgaaaccggaggtaccttattggttgatgagcggaagagattaagaataggtgagttatatcgctacaagttttccgtgaacaaagatgtaattaaggaacaagggctagatgtatcgcatctattcttgaggatcaagaacgaggaaagcgcgcttctgcgaccgctttatttgacggggccatattctttttacatcgatgttaggccgcataactataatgagaatcgcaagtttccagggaaggaaactattccatttgttgaaaatctaaagccggacgaaagatttaaagtaaaaatattattgaatgagaattctagagttggcgacacttctctttattcatggacaatagatataatttcgcagttggcggtaaccacaattccgaagctggaattttcgtttaggatagggactacaaggaaggtggtcaagaaatcgaatgggctctttaagagtattgaaggtgtctctttagagatgtgggatactgaaaccctttgggatttaccaccaaaatttccagaaaagcctgtacatctcgttattatgacacatggtatattttctaatatcgggtgtgatatgctatatatgaaagataaaattgaagaaatgacgtttcctatggatgagtctattaatccgaatataattgttcgaggttttatgggcaacgtcgggaaatcaggtcacggtatacattgcttgggcgttagagttggaaagtatgtgcttgagactgttgataagttgaataaaaagtacaaagtagacaggatatcattcattggccattccctaggagggccaactcaatccatggcggtgcgttacataagtattaaaagaccagatttttttgatgcagttaaaggtgttaaacccgttaattttattacgttagctagtcctttcatcggtgttattggcgacttccccttttatttgtctgttccactggatatgggcgcgcttggtttgacaggaagggacttgaatttaaaatatacaccgttaacgtccaaagatgggttgtatgcagacgatgaagtgtacccagaacattccaagtacatattagaaattcttccacaggcgccggctaaaaaagtatttgagtcttttaagaggagaacggtatatgccaatgtcatggatgatggtattgttccattacgaactgctgcacttttgtatctggattggcgaagcatacacaaagtccagaaaattaggaaaaaaaataagaactctccaacttcaagcgagtttgtgtcctccgatagcccagagagtagtggagcatcatcaccttctaacgaaaatggtaacaacgtcggggagattcctgcagaaagtccaaacaaaaaagcgacgttgcagtggactttacctcaggccgttatccacggaagtaaaataaataaatataagagaggacaaactaatgaagccaactcagattcggataatgaacaaggagtatttcttgatggtcaaaagttcgaacctccaaaagaagccaatactgtattgtctgcattatcggtattgacagctgccataccagatcaggagtatatcaaaaacccggctgtaaggaaagatgaagtcattcatgataaactttatcacccggaagaattacctccgccgcattatgagaataggcctatcgttaagaagcttatatatcctaatgagagtgtcaacaggattcaagagcgcattgctagagaatggcaagaaacgatgacttggagaaaagtattagtgcagatccagcctgattcccataacaatatcgtagtaagaagaagatttgttaatttatacggctatgttgctgtggaacacatggttgagcaccatttcggatccaaggtttgtagcgagctggctgaagatgcaaatgagccaaaagatgagccaaaccagtcatcgcaagcggaccggtcgaatgagtataacgagggggaaatatcaaagggcgcggagaatgccacatga

SEQ ID NO: 76138 - DNA, 909 bp, Saccharomyces pastorianus
atgactgttataaagacagaaccaacaacagaagtgacattatattctccaccatcaaaagaatctttaagtaaagatgacgcccacagaaaaaaacaaaacaataaacaaccttcgagtataaatagccgctcaggaccaaataagcataaacttgccgccaaagcaccggaaaagaaaatcaataacacagataaacaagacctctctgcctttttattaaatccttcccttattgttaaaccttctgagagcaaaaaaaaagagaatattgtggcctataatgatacaccaggtataaaaacagaacatacagcgtttcagccgctgacaccaatttcgaaaaaaagggccctgaaagagaaagcagtatcagaaaaatgtgatagctttgatctttccagagacgagaagccttatattcagaaaaagtcaaagacgctttcttccgtcacagagattaattcctcagaatataaactctcactaaatggcgaaaatacatcatccccagctaaggaaaaatcgcaagaacccatagaaaatcctggaagttaccaaaaaacaagaaattacctttttgaaaagcccgatcctttagacacgtgcctccaggactactcgagtatgctaccgtcaaatgtagcagaagaagatcaagaatattttatcagcgtagctgattcgacattggaggagtggactaacaagggccaggaaattattgaccaacagttccagctctaccaagaaataatcaagaaacgaatagaactaagctacaaatttaagggtattatttctgtaatcaatgatagggcagatgccctagaagaacagggtcaacaactagaaggaaaaattaagaaagttaaaactttggctaatgaaattctcaatattatataa

SEQ ID NO: 76139 - DNA, 1305 bp, Saccharomyces pastorianus
atgtcaaacaagtttcactgtgacgtttgttcagctgattgcacgaacagagtgagggtttcatgtgctatttgtcccgaatacgacttatgcgtgccctgcttttcacaaggctcgtatacaggaaagcatcgcccttaccatgattataggataatagagaccaattcataccccattctctgtcctgattggggtgccgatgaagaattgcagttgattaaaggcgcacagactttagggctcggtaattggcaggatattgctgaccatataggcagcagaggcaaagaagaagttaaggaacattacctaaaatattatctggaaagcaaatactatccaatacctgatattacccaaaatatacatgtcccacaagatgaatttttggaacagcgaaggcatagaatcgagtccttccgggagaggccgctagagcctccaagaaagcccatggcatcggttcctagctgccatgaagtacaggggtttatgccgggcagattagaatttgaaacagaattcgaaaatgaagctgaaggtcccgtaaaggatatggtttttgaacctgatgaccagcccttagacattgaattgaagtttgccatcttggacatttacaattctagattgacaaccagagcagaaaagaaaaggctattatttgaaaaccatttaatggattacagaaagttgcaagctattgacaaaaagaggagcaaagaagccaaagaattgtataaccgcataaaaccttttgctcgtgttatgactgcacaggattttgaggaatttagcaaggatatattagaagaattgcattgcagggaaagaatacagcaattacaagaatggagaagcaatgggttaaccacgttagaagcaggtcttaagtatgaacgagataagcaagctagaattagcagtttcgagaaatttggcgcttctacggcggcttcactcagtgagggcaatagccgttataggtcgaattctgcacataggtcgaacgcagaatacagccaaaactacagcgaaaatggcggtagaaagaaaaatatgaccattagcgatatacagcatgcacctgactatgcactgttgtccaacgacgagcagcaactttgtattcaactgaagattttacctaaaccgtatctcgttctaaaggaggtaatgtttagagaactgttgaagactggaggtaatctaagcaaaagcgcatgtagggaactacttaatatagaccccataaaagcgaatagaatatacgattttttccagagccagaattggatgtaa

SEQ ID NO: 76140 - DNA, 1062 bp, Saccharomyces pastorianus
atggaaagcagaaataccgtgcttccttctttaccaaacattattacaggtacttctaattcgcctttccaactgcatactttgccaaatacaaacttccctagtgatgaccaaggtgtcatcaggttgccaccattagctgcatctgcgcacattgtgagaccagtggtaaatatttataaaagtccttgcgatgaggaaaggccaaaaaggaaaagtccacaggctgtggatttcttatcacaacgtgtaaccacttccatgacgcctttatccaagcccaagaagctgagctctcattcaccattcacgccagcggtcagagtctgttctaaagagcagccacctcagagtatgcactcttataaaaaagttaatattcttactcctctatctgctgcaaaggctgttctcacaccaaccacaagaaaagaaaagaaaaggtcatttgcctttattacacactcacaggaaacttttccaaagaaggagcctaagatagacaatgctcggttagctcgtcggaaaagaagaagaacttcatcatatgagcttgggatattgcaaacagcatttgacgaatgtcccacgcccaataaggctaaaaggatagagttatccgagcaatgtaatatgtccgaaaaatcggttcaaatatggtttcagaataaaaggcaggctgctaaaaagcacaagaacagtggcaacaccagccattgcaaagttcactctaatgattcgatgtctatgatatcttactcagacgctgcgttggaaattacctctacgccaacgagtacgaaggaggctattactgcagagttgctgaaaacttcacctgccaatacgtcctcgatcttcgaagaccaccacataacgccttgcaagcccggcggacagctcaagttccacaggaaatctgtgcttgttaagagaacattatcaaataccggtcatagcgagattatcaaaagtcctaaaggcaaggaaaaccgcctaaagttcaatgcatacgaaagaaaaccccttggggaggtcgatctcaattctttcaaaaactaa

SEQ ID NO: 76141 - DNA, 591 bp, Saccharomyces pastorianus
atggtagcagaagttcaaaaacaagccccaccatttaagaaaaccgccgtagtcgacggtatcttcgaggaaatttcactggaaaagtataaaggtaagtacgttgttctagcttttgtcccattggctttttcatttgtctgtccaactgagattgttgcgttttccgatgccgccaagaaattcgaagatcagggcgcccaagttttatttgcctccaccgactctgaatattccttactggcatggaccaaccttcccagaaaagacggtggattaggtccagttaaagttcctttgcttgctgataagaatcattccttatccagagactatggcgttttgattgaaaaagaaggtatagctttaagaggtttgttcataatcgacccgaagggaatcattagacatatcactatcaatgatttatctgttggcagaaacgtcaatgaagctttgagattagtcgaaggtttccagtggactgacaaaaatggtacagttttgccatgcaactggaccccaggagccgccaccatcaaacctgacgttaaagattccaaggagtatttcaaaaatgccaataattaa

SEQ ID NO: 76142 - DNA, 309 bp, Saccharomyces pastorianus
atgaacaatgcccatgaagagaacatttcttctgtaacagggtttaagtctacatcaggatcacctgcaatagggtcatcgctacccgggagatctggggaaggtagaagttcatcatcatcgtcaggatcaactgctctcttggcggtggttaacagcaccttgaaagctatattcagcaataccttggatagcatttttcatatggtatgtactgacagcgataaaagattatcctctgaatttcactgcttgcaatctatgtttaatctacaactatttgtcaatcttgggtgccctttatcttag

SEQ ID NO: 76143 - DNA, 966 bp, Saccharomyces pastorianus
atgcttatggatgagtatgaggaaaacaaggacatgtgtccgatctgtaagacagatcgatacctttctccggatgtgaaatttttggtgaatcctgaatgctatcacaggatctgtgagtcgtgtgtcgatcgaatatttagtctcggtcctgcccagtgtccatataaagggtgtgacaagattcttagaaagaataagttcaagacccaaatattcgatgatgtggaagttgagaaagaagttgacatcaggaagagagtgttcaatgtgttcaacaaaactatcgatgacttcaatggtgaccttgtggaatataacaaatatttggaagaggtggaagacattatatacaaactagatcacgggatcgacgtggctaagactgaggagaaactacgcacctacgaggaattaaacaagcaactgattatgaataacttggagagaagcagaacagagatagaaagtttcgaacagagacaaaaattcgaaaaggagatgaaattgaagaagcgactgttggaaagacaaatcgaagaggaggacagaatgaacaaagagtggacaaagaaagaaatcgtcaaccggttgagtacgaccacccaggatatcaatgaaacaatcgaaggcgttaaaaatacggttaaattgaaaaaatcgtccgctagaaggaaattggaagaactaaatagagttctgaaaaacaatccatatttcaattcaaatgtgaacgtacagaattcgagactcaaagatgctgtaccgttcacgccgtttaacggtgatagagaagcacacccaaggtttacgttgaaaggttcagtatacaatgacccattcatcaaagatcttgagcacaggaaagaatttattgcgtctgggttcaacactaattatgcgtacgaaagggtgttgacagaggcatttatgggcttaggatgtgttatatccgaggagctttaa

SEQ ID NO: 76144 - DNA, 111 bp, Saccharomyces pastorianus
atgcaaccatctaccgctaccgccgctccaaaagaaaagaccagcagtgaaaagaaggacaactatattatcaaaggtgtcttctgggacccagcatgtgttattgcttag

SEQ ID NO: 76145 - DNA, 189 bp, Saccharomyces pastorianus
atggattcgctgtttgcttttccatcggcttccggtgcggtagtggcgtcagcagaaagctttttaatgcggcggacacgtttagctttggtaatacatctacccgatggaggcactagtccatccaaattcaaaacctgtcttggtgtttttttcaggtattttacgttttcatcttcatactggtag

SEQ ID NO: 76146 - DNA, 1239 bp, Saccharomyces pastorianus
atgtcagaattacatgctttgcttactttcccagagaggcccatttctcaaagttactatgtaccaaaactgcagcatttcttaaaatctggtataccggctacatatactttggagcaggtcgcagccttcgagcatgaggaaaagaacaggaacggggataaggaattcagagagagcactgacgacaataaaacctcaaacacaacgccgttacacgttttagcaagatcgctacccttggatatcaaggatgaggaactgcaagtggtgatggatatgatgaatattctttttgagtatggggctggatggaattttattgactacgaggacaaaacagtgggtgatttgtttttagagagaaatcaaagtagagagagccctctttatagacggctcgtggaagctggtgtgtctgctgaattattactgagaaaactcaatggtggcgacgtcgaattcttggatacagatgaactaatagatatcgagcctgaggaaagcgttcaaacagcagttgatggtcaaaaagaagaatcagttggtagtgatgacgatgctaccgcggcaaatcaacaagtgtacttaaaaacagaactagagtacaaagacgatgcgcttatcacaaaggaaaataaggacggtgttatgatggattgggaaaccaagattatggaacttgcttccgaaaccttatttcctgatccagaggccactaattctgctacgatcttaaacattggatttggaatggggatcatcgatacattcatccaagctcgaaaaccatatcgtcactatatttgcgaagctcatccagatgttttggccaagatgaaaatggatggttggtatgaaaaggataatgtggttattttagagggaagatggcaagatacgttgaataatttattagacaaaggtgaagttttctttgatggtatttattatgatacatttagcgagcactaccaagacatgttggacttatacgatgtcgtggtaggtttaattaaaccagaaggcgtgttctcatttttcaacggattaggcgctgacagatcgttgtgttacgatgtatataaagaaattgttgagatcgatgttgctacatatggtatgaaatgcgattacaccaggtattctcttgacgagcaattgccagattggaatgatgttaagcggtcttactttaactgtaactattattaccatccacgtatcacgtttgcttaa

SEQ ID NO: 76147 - DNA, 2697 bp, Saccharomyces pastorianus
atgacgtctaggaaaaggtctccgcacgatttcatatttaaagaggaactgggccatggctcttactctactgtgtttaaagctctagataaaaaaagcccgaataaaatttatgccattaaagtttgttcgaagaaacacataatcaaagaagctaaggtaaaatatgtcaccattgaaaagaataccatgaatttgttggcacaaaagcatcacgcgggtataatcaaactatactatacttttcacgatgaggaaaatctttattttgttttggattttgccccaggtggagaactactttccttattgcacaaaatgggtactttcaatgatatatggacgcgtcatttcactgcacagttaattgatgcattagaatttatccattcacatggcatcattcatagagacttaaaaccggaaaacgtccttttagacagggatggtagacttatgattactgattttggggccgctgccaccatagaccctagtttaagcggagattcggccaagtttaactctgacagcaacggctcaaaagacaaccaaaattgcgcttcctttgttggtactgccgaatatgtctctccagagctgcttttatacaaccaatgcggttatggctcagatatatgggcactaggttgcatgatatatcagtttgtccaaggacaaccgccgtttagaggggagaatgagctgaagacatttgaaaaaatcgtagcattagattatccatggggacccaataaccgcatcaataatagcacatcaccaataaatccccttgtaataaacctagtacaaaaaatattggtgatagaggtcaatgagagaatctctctcgaacagataaaaagacacccatatttttcaaaagtagattggaatgataaaatcaaaatatggagaggaatctggcaatcacaaggacaatcgctgcaacaaactactttgggactcccaaatataccgcagaatatactacccaccagacaattacatgtaattgacactccagcacgaagtatacaaatcacaaaacaaaaacgtaagaaaccaacgaaaatttccaacactactagtagcatagtagtatggagaaaaaggcttggtatatcaacaggtaaggatgatttaggcaccgtaccgtccactacgcctgcagtgaccgcccctaatgataccaatgtattaacaaatacggcggcacattctactgcaaatattgccttaccgcctaattcacaatccaatcaagtcaagcgagcacaactagttgcaccaaatagaatacctcccaaagtaccggtaattaatgacaacgtgagaaataagtcaattccgcgcacaaagcctaatgtgccacctttgcaaacatcatcaataccacaaaagttgtcaacatcgtcagcatcgtcagctctatcggcgccgtcaacagagataaggaaccaggacttaacacacactttagatggaagaaactcaattgatattcatgttttaaaacaagactacgtcttcatttatggcattccatatgaacacgaagggcctgctatgtctttgaacagctacaataagatcgataatgatttaattacgtcactagttgcgcagcataaagaagaattaaaaaactcagagtcgtttttacaggtattgactttgaagaagagcggaatgttaagttacaaaaacacagttatggagggaaatgatgatcaagaaaacaaagaacaccagatggctaatatagaagatacagacttgtccatgtacgattttgaattcaatgagttgacaaggaagggttttttaatcctggaaaaatataagaatagaatatggtttatctcgctaccttcatattcaacgttatccaaaataccattcaatgccgtgaagtcttcgacaataaataacaatgaaaattgggtcgattgctttttcagagcaagacaactactagaagaaaagcaaattcttgataaaatcagtaacgtttcctttgatagtaaggcatcgagtgaaccatcatcacctccgcctatttcaagaaaagagcggcctctgagtataggaaataatgtaacaacactcagctatactgcaaaaaatggaagccagaacaatgcaccacaaaacgataatgttggagaagaaaaaccttttcgcatacctagtagtaccaaggataggcccggtgcaaattccactccttcttcaagacatcctagggttttgtcaagcaataacgctggtgaaactccgaaaaaaatgaatggaagattaccaaatagtgcaccttctaccaatacatataccaacggttcggtcccagcttttaatcataggccttctactaatgtagggaacaataagcataatattttaacttcgaagaagcagggatcatccgtattttctccttcatcttctacgaccaagcctcaaatcaaaacaacaggatatcgacagccaacaccttcacctccacttccgcaaatggaattcccaactacgagagaaaagtattctgctccttctaacatggtgatcagtagcagcagatacgaggtcttacatacccttaataacagccaaacaaactttgatagggaaattgctagtaggggtgcctcagcagcatttagaagtttacagaagagtaagaaaaaaaaataa

SEQ ID NO: 76148 - DNA, 675 bp, Saccharomyces pastorianus
  modified_base (49)..(49): a, c, g, t, unknown, or other
atgaacaacagtgaagatccgtttcaacaagttgttaaggacaccaggnagcaattgaaccgcataaacaattacataactcgtcacaatactgctggtgatgacgatcaagaggaggaaatacaagatattttaaaggatgttgaggaaacaatagttgatttggacagaagcataatcgtaatgaaaagggatgaaaacgaagacgtgagtggtagggaagcacaagttaaaaatataaaacagcaacttgatgctctgaagttgcgttttgatcgaagaatacaggaatctactcaaacaactattcctctagaagagacggtggaaaattcaacacttaacaccagcatggctgagaacaatgatggtggtatgtccaatccgtttcaggaacaaatgttaagagaacaagatgttcatttagatggtattcacaagacaatgcaaaatttgcatattcaagctcaaacaatgggggatgaattagagaaccagggacaattgttggataatatggacgagggtatggacggtgttgtaaataagctggctagaggtcgtaggcaattggaatgggtctacgaaaaaaataaagaaaaatacgacgattgttgtataggacttcttattgtcgtcttgatagttttattagttttggcattcattgcttga

SEQ ID NO: 76149 - DNA, 528 bp, Saccharomyces pastorianus
atgaatgaaagtgagaatagtccccaacataatgaagttacggttcctatggtagaggatacttcaagtaatgctgatattccaatggagcaaattcaacgcgaagacaataagaactacgataaacatgacaataaatgcttcgatatgaatggcaatcacaataataactctgataacttacaatttgacagtgtaccatcttctgcaacgaaagatttgaaaaacatcaaaagtgtcaccaaccaaaatgtaaaaatagaagaatcgagtagcacaaattcagtcattgaagagtcatctgaacctaaaatatcaaaattagaaaatgtgaaccttgccgcgacggtaggtggttcacaaactagaaaatacctgaatacaaatgtgacaccgcatttattagcgggcatgaggctcatagccgtacaacaaccagaagatccgttacgtgttttaggtgaatatctaatcgagcagagcaatatactgaagagtggagaaaaagagagtaatgctagtaaatga

SEQ ID NO: 76150 - DNA, 852 bp, Saccharomyces pastorianus
atgtctcaaagaataattcaaccaagcgcatctgaccaacaattcccaggtaaatctgatggatatgaatatactgttgggcctaagcaagcgataacaagcgaagcttcaacaacatacattccctctagaatatactcagagtctctacttttcaaaaggcaagaagcgtctttatcagcaatggctttcttgttccaggaaatgatttcacagttgcatagaacatgtaaaactgcaggcgattttgaaactaaattaagtgactatggccacaatattggaattcgtctattagaactgctgaattttagggcttctgtatctcctagttctcttcccagagcatctgctttcctttcacaaagtgaatcttcttcaaagttatcaaatgcgtcaaattccccgggcatgttggctaactccagcacagcgacttctgcatctgctaatgaacgactccaagaaaaacaaacagaatcattgtctaactacattacaaagatgaggcgccgtgatctgaaaattctcgatatactgcagtttatccacggtaccctatggtcatatctttttaatcacgtaagtgatgatttggttaaatcttcagaacgtgacaatgaatatatgatagtagataacttccccactttaacccaatttatcccaggtgagaacgtttcttgcgagtacttcgtttgcggcattatcaaaggattccttttcaatgctggatttccatgtggcgtgacagcacatcgaatgccccaaggcggacatagtcaacgaaccgtttatttgatccaatttgacaggcaagtgcttgacagggaaggtttgagatttggctga

SEQ ID NO: 76151 - DNA, 675 bp, Saccharomyces pastorianus
atgtgggattcgttaattgtaagcatcaacgatacgcacaagttggggctggaggattgcctcgccgtttttggccacgttcccattaccaaggccgtcaagcatgtcagactgacagagatcgacacgcagacgtccacgtttacgctcaagttccttcacacagaaacgggtcagaacatcgagaagattatctacttcattgacaatgacacgggcaacgatacccgcactgctaccggaatcaagcaaatcttcaacaagatgttccgcatcgctgcggagaagaggaagctgtcgctcatccagatcgacactgttgagtacccctgcactctagtagacttgttgatcctggtaggcgtggcgctaccgccattgtgctacctctatcgtcctgcactgcacgctatctttttcctggtccctaatcctgtgggctccatcttagaggcgtggctggatagtgatcttgtgctgcgactcatcattgttgccgagttcctgactcacgccctcgagacgctcattttcgtcgtccctaggctcaagtactaccgtgttcctggcgagttcgtgcccgagtggcttcttctaggtctcctcgaaggttacggtcctgcgagacgtctagatactaaggctcgcactcttggcgaagggtcagttaattag

SEQ ID NO: 76152 - DNA, 1902 bp, Saccharomyces pastorianus
atgagcagtaacaacaacacaaacacagcacctgccaatgcaaattctagccaccaccaccaccatcaccatcatcaccaccaccatcacggtcatggtggaagcaactcgacgctaaacaatcccaagtcgtccttagcggatggtgcacatatcgggaactaccaaatcgtcaaaacgctgggagaggggtcctttggtaaagttaaattggcatatcataccactacgggccaaaaagttgctctaaaaatcattaataagaaggttttggcaaagagtgatatgcagggcagaattgaaagagaaatatcttatctgagactcttaagacacccccacatcatcaaactttatgatgttatcaaatccaaagatgaaatcattatggttatagagtacgccgggaacgaattgtttgactatattgttcagagagacaaaatgagcgagcaagaggcaagaagatttttccaacagatcatcagtgccgtcgagtactgccataggcacaaaattgtccatagagatctgaagcctgaaaacttattactagatgagcatctgaacgtaaagattgccgattttggtttgtcaaacatcatgactgatggtaatttcttaaagacttcttgtggttctcccaattatgcggctcctgaagttatcagcggtaagctgtacgcaggcccagaagtggacgtgtggtcatgtggggttatcctttatgttatgctttgtcgtcgtctaccgtttgacgatgaaagcatcccagtgcttttcaagaatatcagcaacggtgtgtacacgttgcctaaatttttatctcctggagctgctgggctaatcaaaagaatgttaatcgttaatccattgaacagaataagcattcatgaaattatgcaagacgattggttcaaagttgatctgccagaatatctacttccaccagatttgaaaccacacccagaagaagagaatgaaaataatgactcaaaaaaggacggcagcagcccagataacgatgaaattgatgacaaccttgtcaatattttatcatcgaccatgggttacgaaaaagacgagatttatgagtccttagaatcatcagaggacactcctgcattcaacgaaattagggacgcgtacatgttgattaaggagaataaatctttgatcaaggatatgaaggcaaacaaaagcgtcagtgatgaactggatacctttctgtcccagtcacctccaacttttcaacaacaaagcaaatcccatcaaaagagtcaagtagatcatgaaactgccaagcaacacgcaagaaggatggcaagtgctatcactcaacaaaggacatatcaccaatcacccttcatggatcagtataaagaagaagactctacagtttccattttgcctacatctttacctcagatccacagagctaatatgttagcacaaggttcgccagctgcctctaaaatatctcctcttgtaacgaaaaaatctaaaacgagatggcattttggtatacgatctcgctcatacccattagacgttatgggtgaaatttatattgccttgaagaatttgggtgccgaatgggccaagccatctgaagaggatttatggactatcaaattaaggtggaaatatgatattggaaacaagacaaacactaatgaaaaaatacctgatttaatgaaaatggtaattcaattatttcaaattgaaaccaataattatttggtggatttcaaatttgacggctgggaaagtagttatggagatgatactactgtttctaatatttctgaagatgaaatgagtactttttcagcctacccatttttacatttaacaacaaaactaattatggaattagccgttaacagtcaaagcaattga

SEQ ID NO: 76153 - DNA, 597 bp, Saccharomyces pastorianus
atgaataaagaccaggcagaaaaatatcaagaacggagtctgcgacaaaaatacaacctactacatgtactgccaacactgaattccagagcgttatcgggactatactataaaaattttcataattctgtgaagcgatatcaaatcatgctgccagaacaactgaaaagtggaaaattttgctcccattgcgggtgtgtttacgttcctaattttaacgcaagtcttcagttaacgactaataccgagcaaggtgactccgacgaacttggcggcgagagtatggaaggaccaaaaaaatgtatccaggttaattgcttgaattgtgaaaagtctaaattgtttgagtggaaatctgagctcgttgttccaacatttggacaagatgttagtccgatgatcaatagtaccagcagcgggaaggtttcgtacgcggtaaagaagccccaaaagagtaaaactagtactggtaaggagagatccaagaagagaaagttgaactcacttacaaaccttttatcgaaaagaaatcaagagaaaaaaatggaaaagaagaaaagttcgtcactgtcattagaaagttttatgaaaagttga

SEQ ID NO: 76154 - DNA, 972 bp, Saccharomyces pastorianus
atgaataaagaagagcaagaagacccacagcaagagcaaatatcaactgttcaggaaaatgatcccaggaatttgcagcaactgggaatgttgttagtatctccagggctcgatgaagacagattgagtgagaaaatgatttcgaagatcaaaaaatccagggatatcgaaaaaaatcaaaaattgctcatatctaggctgtcgcaaaaagaggaagatcatagtggtaagcctcctaccattacgatttctccagcagagaaaaccgtaccctttaagtcgctgaatcattctttaaagaggaaaagggtacctccagcgctaaatttttccgatatacaagcatcttctcatttgcatggatctaaaagtgctccaccaaacataacaagatttccgcagcacaaaaatagccttagggtcagatatatgggtaggatggctcccacgaatcaagattatcatccttcagtagccaattcatatatgacagcaacctacccttatccatatactggactgccaccagtaccatgctacccatattcttcaactccaacacaaacgcacgcatacgaaggctattattccccgatgtatcccggccccttgtataataatggtataataccagccgactaccatgcaaagaggaagaagttggctggtagatcaccacacttggaagatttgacatcgagaaaaagaacctttgtctccaaacaccacaacggagacccaatcataagtaagactgatgaagacattgaatgctctgtcacgaaaaattcattaagtgagggcgcttcacttaacgacgatgccgatgatgacaacgacaaagaaaggatcattattggagaaatctctctgtatgatgatgttttcaaatttgaagttcgcgacgacaaaaatgactatatgaaagcatgtgaaacaatctggactgaatggcataacttgaagaaatga

SEQ ID NO: 76155 - DNA, 408 bp, Saccharomyces pastorianus
atgtcgtacaacggaatagggctcaagtcggcaaaagggtcatctacgtcgggccacgtgcagcgatcacttgctagcaacaataggcgcagaccacagggtagtcaacagcagcggcaacaacgacaaaatgcgatcaaaaaggccagccatgacaaggcaagcaggcctcttgctgtgcagaaacagatagagactcatatggagaaacgtgagattgaagtacaagttagcgagctacgggaccgactggaggaggaagaaacgctctcggaagagcagattgacaagaaatgtgaagcgttgagggcaaaactgacgaacgagtggcaagaacagcagcggatgtcctctttgtacacccctcgtaaggcgcgtctaacggaagagcagcatcgacatgaatag

SEQ ID NO: 76156 - DNA, 1926 bp, Saccharomyces pastorianus
atggatgttctcaaagaggtgttgtcactagaccaagataaatttgaccagctgaaggagacgagccgagataaaacaaatgaaacggatgatccttttgaaaactatttgaaggattgtaaatttaaagcgccttcaaacaaagatcagtcaccatttgctaaacttaaatcattacaggaaactcattctaacaatgaagcggctattaatataattattcctcaattgattgattacttaaccgaattcactaataggttatcaaattacacacaagatttagacttcattaaaaaaaagtccaatgaattacagtcattgctcgaatacaactccactaaactggcacatatctctcctatggttaatgatttgatgattcctcctgaactcattgatgacatcattaaagggaagatcaatgaaagctggcaggataatataacattcatagcagataaagaagaaatttataacaagtataggtccaataatctcgatcaagacaacaaggacgcagaaaattcagcaatgctagcaccaaaggattttgataagttatgtcaactcctggacatcctaaaaaatgttattctagaaaggtcgaaaagacttattatttccaaaatcaaaactttgaggagtcataacccagtaccatcgcaaaggatacaaaacaaattattaaaagttcaaaaaattttccccttcataagagataataatctctccttagcccttgagttaagacaggcatattgttacacaatgaaatggtattatagagaatacttttctagatatatcaggtcattgactattttgcaatttcaacaaatcgactcgcaatttgcattgggtaatggcctttctacaacttcagtgagtgggtttaacaattcaccatcattgtttttctcaaattatctaactacatccgcttcaaatgctttctataataaactccctgtaacagatgagaaaattgataaatactttcagataaagaaaagattgaacattttaacacaagaagacaatacggtaatggtatcccaaattgcagaaaataacacaacgaaaaactacattgaaattggatttaaaaatttaaaccttgcaattttagataactgtacggtggagtaccattttttaaaagatttcttcgctatgaatggcgataattttgaggaaattaatggtttattggaacaaatatttcaaccaacttttgatgaagccacaacatacactcaacaactgatccaatataattatgacatttttggtgtattaataagtattcgtgtggccaatcaattacaatttgaatcagaaaggagaggaatgccgtctatgtttgatagtttcttgaatggtcaattaattcaattatggcctcgatttcagcaattggtcgattttcaatgcgagagcttacgaaaagcggcaataactacaaatgtggcaaaatatgccggcaactcaagcacatccaatagtagccctttgacctcacctcatgagttaactgtacagttcggtaaatttttatcaagcttcttgacgttggcaataacacataagcagtccatagacgaaagatctgaacccttatacaattccatcattagattaagaaatgatttcgaaacagtcatgacaaagtgcagtaaaaagacgaaatcaccagaaagatttctggctacaaattacatgtatttatacaataacctacagcaattgcatctacatttaaatataaatgactcggatgcacaaaactacaattttgattctgctgaaaatgttggtacgaaagttgcgaatgacgacgataatgattcaagcgtaccactaataatcagagagaccgaaaatcatttcaaaactttagttgaagctttcaccagaaattga

SEQ ID NO: 76157 - DNA, 789 bp, Saccharomyces pastorianus
atgggatttttagcaagagaaaaagtacatctaaaaaaagtagtaataggaggaagccaagattggttgaaacacagttataaactcttcaaggcaattatgaacaggattttcggatatgggaacaaaaagagccatgatcagctcttacaagagtcgaatcagtccatgaatcaggcccaacaatcactatcgaacagaatatcccagttagatactcaaatcgcccagttaaacttccagctgcaaaatattcaaaagaatttgcaaagatcaaacaacaagcaaccctcgttaagaaaacaggctttgaagattttaaataaacgtaaacagttagaaaatatgaaggattctttagattctcaatcctggtccatgacgcaagcccagttaacaaatgataacttacagaacacaatgatcactataaacgcactaaagcaaacaaacaatgccatgaaggctcaatacggcaagataaatatcgacaaactacaggacatgcaggatgagatgctggatttaatagaacaaggggatgagctgcaagaagtcttggcaatgaataataacagtggcgagctcgacgacattagtgatgcagagctggatgcagagctggatgctctggcacaagaggatttcactttgccaaccagcgaaaactcattaggtaacgatatgcccagttacttactaggtgcgaatgcgccaccggcttttattgatgaagagccaaacttagatactgaagacaaaaataaagctttagaaagcgctcagtga

SEQ ID NO: 76158 - DNA, 885 bp, Saccharomyces pastorianus
atggacattaacatagacgatattcttgcagaactggataaggaaactactgctgtcgactctaccaacatcacgcaaggttcttcttccactacccacagagatgcaaatacaatagtgggttcgtccttagacttgaatgacaagactcagatatatgtctctccccagcaggatttttctgacttgatgaagtcttggaaaaatgaacggtgttcgccagaactcttaccatatcctcatcagttgatgaaaagattattgaatcgaatatccatgcaatctcaattaattgaaaacatttcaatgggattcctcgatatgcaaaatgcttctaatgcgaacccgcctatgcctaacgaatctaaattgcctttactctgcatggaaactgagttagaaagattgaaatttgttattagaagctacatacgatgtaggctaagcaaaattgacaaattctcactttatttgcgccaattaaatgaagatgaaaattcgctgatctctcttacagatttactatccaaagatgaaatcaaataccatgacacgcattccctgatctggttgaaactagtcaatgattctatcctgaaatacatgcccgaagaacttcaggctattaatgatacagaaggtagcgtaaacatgatagatgagcccgactggaacaaatttgtctttatacacgttaacggcccaccagatggtaaatggaacgaagatccgctattgcaggaaaacgagttcggtaaaccttgctacacggtcacaatacccgatttaaaggaagaggttgaactcactattggaagtatttacgttatgagatatgaagtcattagggatctgctgagagacgacaaagttgctcttatttga

SEQ ID NO: 76159 - DNA, 2301 bp, Saccharomyces pastorianus
atgggaaataggtctttgacagaggcagaccacgccctgctgtccaagcccttggtaccgacatctgcggaacatacacaaacgcaagagtatcctcgtcctttcgtagatggcagcaattctcagagcgggtctgaactacaggcttctccacaaggtcagtttggagaaaaggcattgactagtactaatcgcttcattcccctggcaaatgatgacccgggtatgcagcacgagatgggtcttgatccctcaatgaggcgtagaagagaagaatgggcagaacgtggtgcggcaaaaatcgtcaaagatgttgtcgacccagctacgggggagttaactaagcatgttgtcaagatgggaataaaggacttcaagtttggagagcaactcggggatggatcatattctagtgttgttctggctaccgcccgtgattcgggcaagaaatatgcagtaaaagtgttgagtaaagaatatctgatccgtcaaaaaaaagttaaatacgtcacagtggagaaattggctttgcagaagctgaatggcaccaagggcataatcaagcttttcttcactttccaggacgaggcaagcttgtatttccttctagaatatgccccccacggtgatttcttgggcttgattaagaaatatggatctttaaacgagacatgtgcacactattatgcgtcgcagatcatcgatgccgttgactccttgcataatatcggcattattcacagggatatcaagcccgaaaacatattgctcgacaaaaatatgaaagtgaagttgacggattttggtacagccaaaattttaccggaggaaccttcgaacaccgcagatggcaagccttatttcgatttgtatgctaagtcgaaatcatttgttggtaccgcagaatatgtttctcctgagctactgaatgataattatacagattcccgttgtgacatttgggcatttggttgcatattgtaccaaatgcttgcgggaaaaccgccttttaaagctgccaatgaatatttgacattccaaaaagtaatgaagattcaatatgcgtttactgcaggttttccgcaaatagtaaaagatttagttaaaaaactattagttagggatccaaatgatagattgaccataaagcagatcaaagcacacctctttttccatgaagtcaactttgaagatggttctgtttgggatgataatccaccggagatacagccatataaaataaatgcagaggcgatgaagcccctgcaaaaggtttctgaatctgataccactgtcaaaatggccaaccttcagctggctggtaatggacatgcagatactcccctgcaagcaccagcagcgacctctcaagagcattctgtgatcagtatgactgcagcaaccgccgcattcaataaagattatacaagtcaacccaaattggggagcaagtcaagcacatctgttagatctgcctccaacaacacagatcgcgaggtaattcaaaagaaggtttcaaaaaatcgcgcatctgtatcatctccttcaatttctactacatcacgggggaaagataatagaagtcgctcttctgacgccttctggtcacgctacttgcaaaatatggatgaacgtgtcttgttgatgaaggaggtagcgctttccacacgaaacttagaggactcacctgtaggtcttgagaacgtggctctggactacaagaaccctcttgatatcgatcctcctactgatagtgcaggcaaattttacaagaaaatgtttctaataacaaacctagacagagcacttgtttttgtcaagagaagaagcctcagcatgtgggaagaacaggaatttgaattgcaattcgaactagagttgaatgacgttgagaagatacgctttataagtgatcaagtccttgaaattgacggttccaggacgattttcataggatgcaaagagagagcagttttaatgaaactatggaaattaatacataatggaatgaccgccaaacctaaagtagtatcgccgaagtcggaccataaaatgtttgataagttcattcttcaaaaaagacagaatacaaaaaaaaagaatcaagctcctcccgtacctcaatcgaataggctaataaatggtttaccggaccgttgcatcttaaagacacccgaagaaggcgcacttcacacaaaacgtcccacttcgttgcagacccgatcgtcatctaattactcaaaattgctggcaagatcgacacaaatgcggaaaaacatgacacggacagatgaaaaatga

SEQ ID NO: 76160 - DNA, 492 bp, Saccharomyces pastorianus
atggaggctctcgttgccttgcagcagacactatcttggtttcttcttctagtagtggtgatactcattttttttcttcttttatcttgcttgactcaattaaggcgactaataacaaaacgaatgacgaaaatggaaaacaatagaaaagttaggaaccagaatcacttttgtaaagttaatattgcgcttgcggagctccttactgtttcaactgatgatactgatatgcctttacaaaagaaatcaaattctattaacagaagggtgccaacatgtacgtatatatatatgtgtgcgtgtgtatatatgtctgacatatacatgagtaaccggctaagtaaggtttttacgttgattgctgcatccatcggtcgtgagtattgtcaaattgccgatgccctgcaggcaaaaaaaccgttgaaaaatcgttgggaaaatgggcttgcccgactgtcggatttaagggcttggaccctaaaggttgcatga

SEQ ID NO: 76161 - DNA, 951 bp, Saccharomyces pastorianus
atgagtatcaccactactagaagaagaaaccaagatagtgtctgctgcaaggcaacgagagcctccattaaggtggaagctgtctcaggccagacagtttttgaaaagcaaaaactgctacacaatttcgatgagttgccagaatggcaaaaagataatgacaaaattctcaccgggtacgttcgtgaaacactgtcatggaaaaagtgcttatattctttattttattggaacaacgagactgtgaacatttatacacatttggtaccggctatcgtatacttcgtgtttgccattacgttgaccaactactttctaattcccgttttcccctccacttcctggtccgattacaccgttataaacattttcttgatgggcgctttctcatgtctcatgtgcagtagctgtttccactgcatgaagcaacactctgaaaagcaaagcaatttctggagcaagctcgactacttggggattatcagtttgatttcctgttctatgatccctataatatactttggttacttcgaccacatatcctacttcagtcttttcacgattgttactttagtcctggcaacattttgtacagtctgtgtcctccacgacaagtttaacacttccacatttcgtccatttagggccatgtttttcatattgtttggatttagtggcttactcccattgaccacagggtttttcaagttcggtatccaaggggttcttaacagaataaaagtcagctttgtgttttgggaagctctcttttacatttcaggggctgtaatctacgggtttaggattcctgaaactttggctccagggaagttcgatttcttcggtagctctcatcaaatatttcatattatggtggttcttggttctgtatgccacttgaaagccattatcgattcttacaaattaatgcattctcatatccacccttga

SEQ ID NO: 76162 - DNA, 372 bp, Saccharomyces pastorianus
atgagcacgagaacaaaggccctgaatgcatacaggcatggcttaagagcaacccgaatagctttccggaatgatgctgaagtattactagccgcgagagctaaaatgcgttcaggaatgttatgtcccccagatcctaaactcaccacagaggatcagattcaacatttagaggatgtggctgtttttttgagacgaaacctggttcagggcaaaaaggttgatggctcaagtactaaggagcctaggtaccatttgaacattcacaaagacaccgaattgggtgacaatgagacgattgcagaccctacggcaagagtgaaaacaaacttaaaggcaagaccatttaaatgctctgataaaaagcaatga

SEQ ID NO: 76163 - DNA, 1086 bp, Saccharomyces pastorianus
atgcgctcctccatgtttagatgtgtgagtcgcgctcattacagcacaagtgtcacagaagatttcataaatagcattctagcaagggctcaagaggcaacagcaaaagcttcctccaatgctctcaaattggacaagatgaaggagggtagaatgcaaaataagaggagaaacgggaatcagaataggaatagtatgaacaataaagaaagcaggggtagagagggaaatcaaggagaaagaaacatgagactgaaaaaccgttctagtgattctgttcgtgctaacaagcagcagtggaataaaggtgctaatacgtcttttgtaaagaatcctactggaaatacagtagttatgcagccacagttcaaaaagatgcagaatggcaaaaataatttgaaaggagatgcgagagtcgaagatgatttacttgatgtcttcaattcgtcgatggagcaaaaacctgttaatttcaatggaacccccaaatctaaagcaaggtttcaaaaaaagagtcatatcttaacagcatctaaaaggagaaaggctcctcaacagcagctacagaaggttatcaagagacctgtcagttcagaatatgtactagaagagcccactcctttatctttgttagaatatactcctcaagtttttccaacaaaggaatccagattagtcaactttaccttagatagcttgaaaaaatccaattaccccatttacagatcgccaaatttgggaatcctcaaagtacatgatttcaccctaaacacgccaaactttggtaaatatacaccaggatcctccttgatttttgccaaagagcctcaattgcagaatttacttattgaagaagacccagaaaattttcataggcaagtaacaggagaatatcaactcttaaaaccatatgtgaaaaaagattttgaaaaactgacgaaatctaaagatactgtgagtaagctcgtacaaaatagtcaagttgtgaggttatcattacaatctgttgttatgggctccgaggaaaagaaattggtatatgatgtttgttctggaatgaaaccaatttctgaattacaacagtaa

SEQ ID NO: 76164 - DNA, 1971 bp, Saccharomyces pastorianus
atggcacctttaaccaagaagacaaacggaaaacgttctgctaaagaagttagtcattcagaaaagaaattagccaaaaaacctagaatttctattaattcgtctgatgaagaatcagaactatccaaaaaggaagatgctgtatcctcttcatcagatgatgatgatttggatgatttaagtaccagtgactctgaagcagaagaagaagctgacgaattagatatttccgatgacagtgaggaacatgaaaatgagaatgaagagaaggaaggaaaggacaaatctgaaggaggtgaaaatggaaatcacactgaacaaagaaaactgctaaaagaaaggaaaatgcaaagaaaatctggtacccaagtgcaacaaattaaatccgtctgggaaagattgcgtgtgaagaccccacctttaccaaaacaaattcgtgaaaaactttccaacgaaatctgggagctatctaaggactgtatcagtgatcttgtcttaaagcatgatgcttcccgtattgttcaaactttagtcaagtattcgtccaaagatcgtcgtgaacaaattgtcgatgctttaaagggaaaattttatgttctagccacatctgcgtacggtaagtatctattggttaagttactgcattatggttcaagaagttcaaggcaaactataatagatgaattacacggttctttgagaaaattaatgagacatcgtgagggtgcctacgttgttgaagatttatttgttctttatgccacacatgaacaaagacaacaaatgattaaagagttttggggctctgaatatgctgtatttagagaaacccacaaagatttgaccattgagaaagtttgtgaaagtagcattgaaaaaaggaatattatcgccagaaacttgattggtaccattaccgcatcagtagaaaagggttccaccggctttcaaattctacatgctgctatgagagaatatgtgaaaatagccaacgaaaaggaaatatctgaaatgatcgaattgcttcatgaacaattcgctgaattggtgcatactccagaaggttcagacgttgcttgtactttggtcgctagagctaacgccaaggaaagaaagttaattttaaaggctttgaaaaaccacgccgaaaaattgatcaaaaatgagtacggtaatattgtcttcattacaattctgaactgtgttgacgatacagttttagtattcaagactttcagtcctactgttaaggaacatttgcaagaattcataattgataagtttggtagaaggccttggttatacatactattaggtttggacggtaagtatttctcacctatcgtcaagaatgaattattgagatacattgaactgtccaaagccacctctaagaaggatcctttacaaagaaggcacgaacttttgtcgaaattcgcccccatgtttttaagcactatatcaaaagattattccagtatattaacagagaatctaggctgtcagttcattgccgaagttctaataaacgatgagttgtacgcgcagctgaatgaaaaagaccaagaaaagtatcaacaggtcttaaacaacattttaactacttttaagggtgacataaccgaagaagagcacccaatacatagagcattttctactagactattaaaggcactaattcaaggtggtaaatggaataacaaagaaaaaaaggtcataccattaaaaaatgttcaaggcttaggcgttccatttgctgaaaagttatacgatgaaattattgactcctccaacttgttagaatggattaataacgctgatagttcatttacaattgttgcactgtatgaaacgttaaaagatcaaaaagaagggaaaccatttttgaaggatttgagaggagttcagagtaaaatcaccgttgatgaaagtaacaaaggctctcagcttttggctaaattgttaaaataa

SEQ ID NO: 76165 - DNA, 1755 bp, Saccharomyces pastorianus
atgggaattcacataccatatctcacgtcaaagacatcgcaatcaaatgttggtgatgccgttggcaacgctgatagtgtagagttcaacagtgagcatgactcaccttcaaagagaggtaaaattacacttgagtcacatgaaatacagagggctcccgctagcgatgatgaagataggattcaaattaaacccgtgaacgacgaggatgacacgtcggtcatgatcacttttaaccaatctctttcgcccttcatcatcactctgacttttgtcgcatccatatccggtttcatgtttggttacgacactggttatatatccagtgcgctgatctcgatcggcacagatctggaccacaaggtacttacttatggggagaaggaaattgtcactgcggctacctctctgggagctttgattaccagtattttcgccggtactgcagctgacatatttggtaggaaacgttgtttaatgggttcgaatctgatgtttgtcattggcgcaatcttacaggtctccgcacacacattctggcaaatggctgttggtagactgatcatgggtttcggtgtcggtatcggttccttgatcgcgccacttttcatcagtgaaattgctcccaaaatgatcagagggagactaactgtcatcaattccttatggttgactggtggtcaattagtcgcttacggttgcggtgctgggttaaactacgtcaacaatggttggagaattcttgttggattgtcactaattcccactgctgtgcaattcacatgcctgtgctttttacctgacactccaagatactacgttatgaagggcgacttggcaagggctactgaggtgttgaagagaagttacactgacacttcggaggaaatcattgaacgtaaggtggaagaacttgttactttaaatcaatctattcctggtaagaatgtccctgaaaaagtctggaataccatcaaagaattgcacacagtaccatctaatctaagggctttgatcattggttgtggtttacaagcaattcaacagttcaccggttggaattcgttgatgtatttctctggtaccatcttcgaaactgtcggtttcaaaaattcttccgctgtttcaatcatcgtgtccggtaccaattttattttcactctagttgcctttttttccattgacaaaataggccgtagaaccatattattgattggcttaccaggcatgaccatggctttagtcgtgtgctctattgctttccattttctaggtattaagtttgatggcgctgtcgctgtggtggtttcctccggtttctcctcttggggtattgtgatcatcgtatttattatcgtatttgctgcgttctacgctcttggtatcggtactgttccatggcaacaatcggaactattcccccaaaacgtgagaggtattgggacttcatatgcaactgctacaaactgggctggttcactggttattgcatccacatttttgaccatgttacagaatatcactcctgcaggtacatttgcctttttcgcgggattgtcgtgcttatcaaccattttctgctacttctgttatccagaattatcgggattggagttagaagaggtacaaactattttgaaggacgggttcaacatcaaagcctcgaaggctttggccaagaagagaaaacagcaagttgccagagttcatgaattgaaatatgaaccaactcaagagattatagaggatatatag

SEQ ID NO: 76166 - DNA, 1152 bp, Saccharomyces pastorianus
atggtcgtgacatttttgcaggacctggaagttttgcaagatgcgttattaaataatttgcaaaaattaagtgcaatctcccgcagaaaagaaagcggagaaagcaagcatgataacaaggacagttttgcagccattgccaacgaacacaatgatgaagaagaagagattgaatttgaggatttggtgaatattatagagaacaaagtttcagatttcgaatcggtactgaaatgtagtattgtggaaatgacctacaaataccccgaattaaaattacagtgggaaaaaagccctagatacgatcaatgcgataagttgcatattgtgaagcttgataaacaaatgaacgaggacatatatgctcagttggtcgaagaactggatttcgtgttgcaattcgtcgattggttctattgctaccgcctgaaagtcaaagagattctacgacaacaccacaaacgtgacttagcttggaacgacgagaaaagagaccgcgctataaaatttcacgctgtggattacgacaagcttcaccaaggaacgtcgtcatcgtcaagtttaacatctacatcgatggaaaaagccagcactagagagaagcttttgagcaaaacaaaacaactgacgaataacttggtgagaggaaatcaaattttgcagtccggaattttacaaagtgacctgaatttggatgaattgagagcccaaaccaattccttaacacaaatcgatgacaagtacactcaattcgaaaccgtcttcaagaaaactgccgatttggtcaaagtactggaaaatgcctcccatcaagagaaacgagatgtctatttatcacttgggttcctcctatgctgcatctcgtgggttctatggcgtcgtattttcaagttacctgttaaactcggcctctggctgctattcaagtttttcaagggtatactcgtcaccctaggtctagttaaaagctatgcgggctcctcgtcctctcttcaagcacccagtcttgtgctaaatgcacccattctagccactacaactacatcctcagcaacctctgtggaaccattcgcatctgtatcagccgtcagtagtatccagcgggctgtcgatgaggccgtggacaggatcgtctcacatgatgagctatga

SEQ ID NO: 76167 - DNA, 1566 bp, Saccharomyces pastorianus
atgtcccatctcttcccaccatcatcaccagttgctggtaaacctttggaaagcccacaaaaagaacctggtaagcttgctaatacttctgtattgaccttaggaagaaaacggtataattacgaattggaagagtatcctactccagacccgtcgtctagcatcggaagacaatcttcaccagtgaaagatatcacttcacgtttaaatgagaccaaatctgccttgtcatctccttcaaagcaagaaaaggtgcttgcaggccctatcgagattgaattagatgcatcggatccctcacgtttagccatcggtaggaaaaaatcagtctgcaacattattttgccatgcagaaagaatatctctaggcagcacgcttttatttcatacgccgccgacagaaatgaaataaaattggaatgtaatggaactaatgggttgtccgttcacttgccttactccatgcagttgcatttggtaaaacccttcccaacaaggaacttttataaactagtggcagaagagcctttgacctcgcaaaatactaaacaatcgcatggaaaaactcttcaaaagaaccaaaacttcatcagctttgttttggctaaaggtgaaactgttactttcccctatatccaaggaagtttcataaattttacaggcgtcacagtctgtctttcattgaaaaaagtagcaccttatcctggcgatggcaacaataactttgacgaagagaactcgacagaaacggaggatgagttgtgtttattaacaacaacgagcgatgatttttcttggcaaaaagaaacaccttcgatgaaatttgtcccagttgagcattcacctcgtacagaacagatctcaaaaccattacttattgcatctcctgctcttgtgaaaaactcccccattagttatagaacaacaccccaaacatctttcgttattaatcagccatcaactccaaagaaactgaagcgtaaatcaatttcattgaaaaataacactatacaagagacaccacttcctaaagataaaataattgggacattaagtgccagtactaggagtggtggcattaatgaagaagaatctttcgcagcagttgcaaaaaaaactaaagagctgtcttctacaaccgcgattgtatctcctgcacaaaaacgtcttaagacttcattgaatattattcccgaaatttctcggtcgctctcagaaagaggaattcggtttgatgacctagttcatgtgctatgtaatcatcttgcattttctaaccttcaacaaacgcctttatcccaattgcaaaacatcaattccaacacttcacaattaagcaaagatgaactaaaaaaggtcttggagactatttcttgcattggtattattgtgcgtgaaggaaaagatgcgtctggcaagccattagaagacgagtattactatgatgttgaaaacgatgatagcgacgagagaaagattttgtataattcgttaaaaggcaggagccgattaaggtcgtgcaggaagaaacataaacagtatttctggaagaggccgaccaaataa

SEQ ID NO: 76168 - DNA, 1155 bp, Saccharomyces pastorianus
atgtccaagagcaaaactttcttatttacctctgaatccgtcggtgaaggtcacccagacaagatttgtgaccaagtttctgatgctattttggacgcttgtttagaacaagatccattctccaaggttgcctgtgaaacagctgccaaaactggtatgattatggttttcggtgaaattaccaccaaagctagacttgactaccaacaaatagtaagagataccatcaagaagattggttatgacgattctgccaagggtttcgactacaagacatgtaatgttttagtagctatcgaacaacaatctccagatatcgctcaaggtctgcactatgaaaagagcttagaagacttaggtgctggtgaccaaggtataatgtttggttacgctacagacgaaactccagaagggttaccattgaccattcttttggctcacaaattgaacatggctatggcagatgctagaagagatggttctctcccatggttgagaccagacacaaagactcaagtcactgtcgaatacgaagacgacaatggtagatgggttccaaagaggatagataccgttgttatttctgctcaacatgctgatgaaatttccaccgctgacttgagaactcaacttcaaaaagatattgttgaaaaggtcataccaaaggatatgttagacgaaaataccaaatatttcatccaaccatccggtagattcgtcatcggtggtcctcaaggtgacgctggtttgaccggtagaaagattattgtcgacgcttacggtggtgcctcatccgtcggtggtggtgccttctccggtaaggactattccaaggtcgatcgttccgctgcttacgctgctagatgggttgccaagtctctagttgccgctggtttgtgtaagagagtccaagtccaattttcatatgctattggtattgctgaaccattgtctttacatgtggacacctatggtacagctacaaaatcagatgacgaaatcattgaaattattaagaagaacttcgacttgagaccaggtgtgttagtaaaggaattagatttggctagaccaatttacttaccaaccgcttcttatggtcacttcactaatcaagagtactcatgggaaaaaccaaagaaattggaattttaa

SEQ ID NO: 76169 - DNA, 825 bp, Saccharomyces pastorianus
atgatctctgtcatggcggatgagaaacataaggagtattttaagctatactactttcagtacatgataattggtctatgtacgatattattcctctattcggagatatccctggtacctaggggccaaaacatcgaatttagtcttgatgaccccagtatatcaaaacgttatgtacctaacgaactcgtgggcccactagaatgtttgattttgagtgttggactgagtaacatggtcgtcttctggacctgcatgtttgacaaggacttactgaagaagaatagagtaaagagactaagagagaggccggacggaatctcgaacgattttcacttcatgcatactagcattctatgtctgatgctgattataagcataaatgctgccctaacaggcgccttaaagttgattataggaaacttgaggcctgactttgttgatagatgtatacctgacctccaaaagatgagtgattcagattctttggtttttggcttggacatttgcaagcagactaacaaatggattctatacgaaggcttaaaaagcactccaagcggacattcaagtttcatagtcagtaccatgggctttacatatctttggcaaagggttttcaccacacgcaatacaagaagttgcatttggtgccctttattagctctagtagtaatggtttcaagggttatcgatcacagacatcattggtacgatgttgtctctggagctgttctagcatttttagtcatttattgttgctggaaatggacatttacaaacttggcgaaaagagacatacttccttcaccggttagtgtttag

SEQ ID NO: 76170 - DNA, 384 bp, Saccharomyces pastorianus
atgatctgttatttccttgttgtaactataaattttctaaaagaaaagacaaccatttgccattattttgttaacattttttcattgtttttgtttttgtttgtttttgtttttgtttttatttttgtctactttttttatgttattttgttttatcgtttctgttcgttgtttacctattttcctgccaattcaatttggtactatctttctattatcaatattttctttcccttatgtttttttctatatgaaaacttcacagggagaaatagaagaaaatgttcattattctgtttaactttgataaaaattacttatacgtctcccaatcatggtttcatggtcactggtaaggaaaaattcgaaaaactacgggactaa

SEQ ID NO: 76171 - DNA, 2571 bp, Saccharomyces pastorianus
atggacctcccaactgttaatagcacaacaagcatttccgacaatgtggatttaaagaactactatgaggacttgcttttcaagaataacagcggaaaatcgctatccgatttaccccgtaaactgaatgataactccaataattcaggaagtgatacggttgatccgcttgctggcctgaataatttgagaaactcaataaaaagtgcaggaaatggtatggaaaacaggaggacttttgacgatattgattttatgggtaggtttccatatttgccaccagtgccaagtcaacaacagcaaccattttctcaccaaaacgagttcattcaagaacacccttccagtaatttgacctcttttcaaatgtcttcgtctaattcagagccgatgtccgcaccgcccatttcatccaataacaataatttaaactctactcaaatgggtaattatcaagctcaacaacggtcgttcccgcaatttaatggaaattcatttcattcaaatggaaacgacctaatggggaatcggatggattcagactacatgcgtttaatgaataaaacaaacataggttttacttcaaatagcggcaacaattttgctgccccatcacacagtgctggcaacccatctagtatgaataaccaacaagtaccatcatttaattggcaacagccatctcatccagagtctaccattaggagatcctcctacatatcagatactctaatcaaccatcaaatgcctgacgctcggcaaaagcaaacatcccaagtgcagcagcagcacgctcagggtttcaatcttttcaatagcagattcaactatgataacttgaactcaacccatttgaccgccaaaggtgtgcccaagtttggaaatggtatacaacctccgtatccttatgataacgagcctaataatgccagtatcagcaatagtaataacaacaacaacagtcacaatatggttccgatgcaacagtttcgccggaatacacaaccggtagcgagcttcaatccatccctttctacttttcaacaacaacagcaacaacagcaacaacagcaacaacagcaacaacagcaacaacagcaacaaccacaacaaccacaacaaccaagaaacgttaatgtacctacttctttcaatggcgaacgtattgatgatgttcagcttgttcaacttcaaagaagcagttctgtcccttcttctacaaactcacataaccttcagaacgagaacagcaatgaaggaaatgtatctttggacaatggtttaattttaattcagggtaaacacttgacttcgtccaaaaccttacacgatttatacagcgactgtggcagcggctattttgctagctctgcagtttttgaattcacagataatattaagaaaatgctgaagttgcacgattctaatgaaagttatgacgcgaagaacatgggcttaatcgatgaagaaggtaatacataccaatctttattaaatttcttagacattttaagaagttgcaacatgaattacgttaatgatccagagtcgaataatggaattgtttccaataatggaggcaataaaaataggaggaagggttctttcacaacagaactatcatgcaggaattctaataactcctttttaccttatacaccattggtactggttgctttgaaaaatgggaaacttgaactactatctactccacaagctaccaatttgttgttaaagagaggtgacttggttattattgatggtgaccgtggaagggatttagtattggttgttgagccctctgtcgatttgaatttagcattatttataaattttctgaaaaagaaaattcactttgactctttaattacaagtgagtcacagcattatcgcaatgatgagtttattcaaatgttgattgactcaaaaagtgggcaaaagaaaaaattaaatcccaaattgtatgatgttgttgaattaactgagttaatcataccatctaaacaagtcttacgttttgccaccccgtgggaggtaacaacgaatttgcacaataaatttgaagatgaattaaaagccttgcatattgctcagagtaaattacaagcgttaaatgataattcgaaatctcaaaatacaaatgtcagttcttccaataattttacgaatgctgcaacttattcaaagcctaaattgaatatcaagattttaaacgcagaattccaatttgatagaaagaaattaacgttttactacgtttgtgaggagagaaatgattttagagacttgataaaagagctgttcaaatattacaagacaagaatttggttgtgtgccatcccgaataatctgtctattgattctaagtattatgataaacaacaaaaagagctgaaattatatcaaaacatagtaaaaaattacaatgctgaagatttaatgaatgtcaatgatttttcgcagaacaggggcaataacagagttaattttgcacctccgttgaacgaaattgaactcgataactttcagattgctgtgtatgaagaattagttcacgaattatttcattaa

SEQ ID NO: 76172 - DNA, 1992 bp, Saccharomyces pastorianus
atgacgcttggtaatagacgccatgggcggaataatgaaggaagctctaatatgaatatgaatggtaacgaccttgacgatgtttcccattacgagatgaaggaaatacaaccaaaggaaaaagaaattggctctatagaaccggaaaatgaagtagaatattttgaaaaaacagtggaaaaaaccattgaaaatatggaatatgaaggtgaacatcatgcatcttacttacggaggttcattgactcgtttaaaagagcggaaggctcgcatgcaaattccccagactcgagcaactccaatgggactactcctatatccacaaaagattccagctctcaattggacaatgagttgaatcggaagagctcatacatcactgttgatggtattaaacagtcaccacaagaacaagaacagaaacaaggaaatttgaaaaagagtataaagccccgtcatacggtgatgatgtccctagggactggtattggtactggtttgctggtcggtaactccaaagttttgaacaatgcaggtccgggtggtttgatcattggttatgccattatgggtagttgtgtttactgtattattcaagcttgtggtgaattggcggttatatacagtgatttgattggtgggtttaatacatatcctttgtttttggtcgaccctgcacttggattttctgttgcttggcttttttgcttacaatggctatgtgtttgtcccctagaattggtcactgcatccatgactatcaaatattggacgacatctgtgaacccggatgttttcgttgttatcttctacgtactaatcgttgttatcaacgtttgtggagctaagggttatgcagaggcagatttcttcttcaattgttgtaaaattctgatgattattggatttttcattctcgccattattattgattgtggtggtgcaggtaccgatggttacataggtagcaaatattggcgtgatcccggagccttccgtggtgatacacccatccagaggttcaaaggtgtcgttgccacatttgtcacagctgcgttcgcctttggtatgagtgaacagctggctatgactgccagtgaacaatccaatccaagaaaggctattccatcggcggcaaagaaaatgatttatagaattctgtttgtgttcttggcgtctttaacattagttggtttccttgtaccttacacctcagatcaattgctaggggccgcaggttcagccactaaagcgtcgccctacgtcatcgctgtctcctctcatggtgttcgtgtggttcctcatttcataaacgctgtcatcctgctgtctgttctttccgttgctaacggtgccttctataccagttctcgtattttgatgtcattagccaaacaaggtaatgcacccaaatgtttcgattacatcgatagggaaggtagacctgctgttgctatgcttgtcagtgcattatttggtgtcattgcattctgtgcctcatctaaaaaggaagaggacgttttcacctggctgttagcaatctccggtttgtctcaattattcacgtggattaccatttgtttgtctcacattaggtttagaagagctatgaaagtgcaaggaaggtccttaggagaggttggttataaatctcaagtcggtgtctgggggtcggcttacgctgtacttatgatggtgttagcgttaatcgcccaattttgggttgccattgccccaattggtggaggaggtaagttaagtgcccaatcattttttgagaattatttggctatgccaatcttgattgctttgtacatcttttacaaagtttggaaaaaagattggagtttattcattcccgctgataaagtagacttagtttctcatagaaacatctttgatgaagaattattaaaacaagaagatgaagaatataaagagagattaagaaacggaccatactggaaaagagttcttgatttctggtgttaa

SEQ ID NO: 76173 - DNA, 306 bp, Saccharomyces pastorianus
atgtcggactcagaagtcaatcaagaagctaagccagaggtcaagccagaagtcaagcctgagactcacatcaatttaaaggtgtccgatggatcttcagaaatcttctttaagatcaaaaagaccactcctttaagaaggctgatggaagcgttcgctaaaagacagggtaaggaaatggactccttaagattcttgtacgacggtattagaattcaagctgatcagacccctgaagatttggacatggaggataacgatattattgaggctcacagagaacagattggtggtgctacgtattag

SEQ ID NO: 76174 - DNA, 432 bp, Saccharomyces pastorianus
atggagaccaatttttccttcgactcgaatttaattgttattatcattatcacgttgtttgccacaagaattattgctaaaagatttttatctactccaaaaatggtatcccaggaaacagttgctcacgtaaaggatctgattggccaaaaggaagtgtttgttgcagcaaagacatactgcccttactgtaaagctactttgtctaccctcttccaagaattgaacgttcccaaatccaaggcccttgtgttggaattagatgaaatgagcaatggctcagagattcaagacgctttagaagaaatctcgggccaaaaaactgtacctaacgtatacatcaatggcaagcacattggtggtaacagcgatttggaaactttgaagaaaaatggcaagttagctgaaatattgaagccggtatttcaatag

SEQ ID NO: 76175 - DNA, 1452 bp, Saccharomyces pastorianus
atgagtagctccacaaagtgcaagaaagcatacgaagcggtagtcaaaatggttacgcatagattcaactccaaagcagtccgcaattaccatcaaccacaaggtttaaacaggagtctggtaacccgcaatgcagctagagttaggggtatggtcccttcaagaagagggggcgtgggattgtataagagttcaagtagcaagttgatgaataaactaggaagacaaaagacatggataaatgagtttgaacattttaattctctgcacgaaatagcatatacccctaacattgcgttaagtagtgaaatccaaaaatatttaaaggcattggaaacaaactatcggtccatctatgagaaaagttcagaattactggataagaagctggaagaaattgacaagaaatggatagagaaaaacgggtgtatacctgatgcatctaaagacgatgtggagaaaaatctaagaaagcaatatttagcagatgtacaggacgtaaaaaacgaacatatacctgtgatgaattgtgaacctggtgggtctcagttcaagtatctctgtaaaactattgagttattatcatccaataagacaatttgttttgccatcgatgtagaggcatttgaatttgatacagacattgttacagagattggcatctccatatatgatccaagagaaaacatttattccttgatgccgattacaagaagttatcatttaattgttgctgaagcgttaccgttaagaaacaagaaattcgtatgcgactttaaagactgctttttacttggagaaagtcttgtattaccattggaacaatgtgtagagttcattcagtcgttgattaatttctatatgaaatgtgagacggaccaagatacaacctgggaaagagcgtttgtgggtcatgctatagcgggggatattaagtggctgaagaaaattggggtccatgtacctgaattggataatgaacttaccaaaccggaggacttaacggagagcaaaggtgttaggaaacatgttaagatgcttgacacagagaaaatttatggcatgtgttatggcaagaagggtagcagtttaggtaaactactaaggctttttcacttgccacatgccttcttacataacgcaggcaatgatgcatattacacgttgctcctgatgctgaagttaggagattataactttagaaagcaaattggggcagatgatttagaaacaatgggatataggataagagaatggtttaagcgtgaggcggacgaacccaaaattttgccaatgtcgtacgtgctaagtgtgatgaatgccaataatagcaaaccgaaagttgatgataagggaagaaagaagccgagggatcttgtacctcagacggaatttagcgggtctcattggtttcaaaatgcacgcgcagccttcaaaagtactcttgtgtga

SEQ ID NO: 76176 - DNA, 1344 bp, Saccharomyces pastorianus
atgtcatcgcaaaacctcaatgataatccaaaaaatacatcctcagcagctgaagataagaagaaacaaacttcatccttaaagttggcaccaataccaaccacatcgccatggaaatcatcttcgccatatagcaatacagtaattcctgtagaggaactaagagatatatcaaagactgcaaagccaagtaaaaatggttcggggtcaattaaattaacaagcaataccaaatggactccaattacgccgtctgttataatctcaggttccaaggacacaaattcaaagtcaggaaagaaatctaaaaattctaagactaataaaaaaatgaaaaagcgtggcaaatataataacgatatcaataaaaaggactttaacggtcaaaccaacagtacatcggaaataagtaacgtttccaatcttgaatcaaaacctttagatgctaacgctaaagtaaacatacattcaagctcaggagcaactgccggtggaaatataaagaggataacaaacaacaacaattcaaccaacggtagacaatcaagaaattatcaaaacaggaatggcaaaacaagatacaacaacaatagtagacacagtcaggcggctaataatgccatctccttcccaaataattatcaggctagacctgaatatattcccaatgccagccactggttgaacaacaattcaagaaatagctataaccaactgtcatacatccgtcaacagcagtattataataacatcaactatcaacaacaattgcaaacaccatattattactcaatggaacctatttttaaatctatcgaaagtatcaaaaaccaaattgaattctattttagtgaagagaacttgaaaacagatgaatttttaagatctaaattcaaaaaagccaatgacggatttatccccatgagtttgatagggaaattttaccgtatggttaatttatctctaggtggagacccaaatttaattctggcatctatgagagaagttttacaacataaagaaacaaaccatttggaaattgcctttggaagtatagaaggtgctcagaagaacatggcagatgatttcaatccattggaaaactattttattaggcgcgaaaattgggctgaatacgttacggaaagtaattttgatgaaaatgatgacgaaactgaaaaatacaacattgagaaactattgggaccgaacgatttagacaattattcttatatgggctatccaaacttttttcccggtaatgaaaatgggaaaaagagtcagagctatgaccaaggtgaaattagcaggcagtttgaacaaaacttacaaataactgattaa

SEQ ID NO: 76177 - DNA, 1503 bp, Saccharomyces pastorianus
atgtcatttgaaaatttacataaagtcaatgctgaggcattggaagatgcagtggttgagatctgctcctcattggaggttgatgcagcaaagttggacgaactaacagcgtacttcattgaatgtatggaaaaggggctgaataacacctctgtaggcgaagaaaagacggtggacaagggtctacccatgatccctacatatgtaaccagtttgcccaatgggacggaacgtggtgttttgctggctgcagatttaggtgggactcacttcagagtgtgttctgtgactttgaatggtgacggaacctttgatatgcagcaattgaagtctaagattccggaagaatatctaaatgacaaggatgtcaccagcgaggagctgtttagctacctgggtcgccgtacaagggccttcgttaggaaacatcatcctgagttgttgaagtccacgggggagaacataaaacctttgaaaatgggatttaccttctcatatcccgttgatcaaacctctttgagttccggtactttaatcagatggaccaaaagcttcaagattgaagacacggtcggcaaggatgtcatgaggttataccaggagcaattagacattcaggggctctctatgattaatgtggtagctttgaccaacgacacggttggcactttcctatcccactgctacacttcaggctctcgtccatcgagtgctggtgagattagcgagcctgtcattggttgtatctttggtactggtactaacggttgctatatggaggatattgaaaacatcaagaagctaccagatgagctcagaacaaggctgctgcatgaaggaaaaacccaaatgtgcatcaacatcgaatggggttctttcgacaatgaattgaaacatttgtctgctacaaagtatgacatcgatattgaccaaaaattttctccaaatccaggttaccatctatttgaaaaaagaatttccggcatgtacttgggtgagctgttaaggaacatcctggtggacttgcatgcaaggggcttaatcttgggacagtatcgtaattacgatcaattacctcatcgtttaaagactcctttccaattgtgcagtgaagttctttccaggattgaaatcgatgattcgacaaacttgcgtgaaactgaattgtcgtttttgcagagtttgaggctaccgaccacttttgaagaacgtaaagcaattcaaaatttggtccgttccattacgagaaggtctgcatatctagcagccgttccgattgccgccatcctaatcaagacaaacgctttgaacaaaagatatcacggtgaggtagaaattggttttgacggttatgtcatcgaatactatcctggattcagatccatgctgagacatgctttggcattaagtccaattggcactgagggtgaacgtaagatacatttgcgtctagccaaagatgggtccggtgttggcgcagctttgtgtgctctggtggcataa

SEQ ID NO: 76178 - DNA, 1119 bp, Saccharomyces pastorianus
atgtttagaatagctaaaaacctcgtacggacttttgagcagagcgtgcaagataccctggcactctcgcaggactcgagcaatctggacgctttctttcagtctataccaccaaatttgttgtctgctcagttggaatcacccgtagatgcggtttctgaaggtgttaagcacaccaacgtcaatgaaacgctttccggtctccgcattgtttgggtggacgagatgcagttccaactgcagtcctttttcgactatatagtaggcttcaatgatgatccggtgccggtggtcagtaatcaacacggattttcgtacccagattaccgtcgtatcacatccatcttcaatgaacactgtggccgaactttgaaggtcaacatatggtcagctaaaggaggcacgttcagagacgagtatatcagcattatatcgaaggagagcgacgatttggacgatgtttctctaaaccatgacgagaggaggccatctagtggggaagcgcaccagttccaagcactcgggctcaaagtccaatggacgcctttgatagcttccactttcacataccatatcctgaacgtgaacatcccagatggacccgcccaatcggcagggctcatcccagatgaagactacattatcggctgccaagatggcctgttggccacgggaggggagacgcttttacaagatattgttagatcaagagcaaactacgatctggtcctttatgtctacaacaaagtttctgactgtgtgagaccaatcacagttcatataggtcccgacggcaggttgggttgcaacgttggatacgggtttcttcacaggattccaacagtaaagcactgtccacaacaagcacagcagcaggggcaagatgacaaccctgttcctgttcctgttccagtagaatctgagacggcttttgtgccatcagcattcacagcaccaccggtgccaacaaagaagaaatcaaaaaataaaaagggtacccagccattggcaatggatgactattttaatgaaggcagagataagtcatctaccgctgcgaagtcagcagaatctgacatcctcgccccaccaccacaaaaacagtcatcctctgattaa

SEQ ID NO: 76179 - DNA, 1554 bp, Saccharomyces pastorianus
atgcaagtgaccacaagatttatatctgcgatagtctcgttttgcctgtttgcttctttcacgttggctgaaaacagcgcaagagctacgccgggatcagatttactcgttctaacagagaagaaatttaaatcattcatcgaatctcatccgttagtcctcgtcgagttttttgctccatggtgtttgcattctcagatcttacgccctcacttagaagagaccgcctctattttaaaggagcataacgtcccagttgttcaaattgattgtgaggctaacagtatggtttgcctgcaacaaactataaatacctacccaaccttgaaaatctttaaaaatggtcgtatttttgatggtcaagtctatcgcggtgtcaagatcaccgatgaaatcactcagtacatgattcagctatacgaggcttctgtcatttatttaaattccgaagatgaaatccaaccatacttggaaaatgcaactttaccagtagtaataaacagaggcttgacaggcttgaatgaaacgtatcaagaagtcgcactggaccttgctgaggattacgtctttttatcccttctagattcagaagataagtcattatcaatccacttgccaaacactacagaaccaattctgtttgatggaaatgtagactctttggtcggaaattccgttgctctaactcagtggttaaaagtggtaattttaccttactttaccgacatcgaacctgatctcttccccaagtacatttctagcaatttgccgttggcttacttcttttatacttctaaggaagaattggaagattacactgatcttttcacgcagttaggtaaggaaaatcgtggccaaataaatttcattgcattaaactctacaatgttcccacaccacgttagattcctaaatatgagagaacagttcccattatttgctatccataatatgatcaataatctgaaatatggtttaccacaactaccagaagaagagtacgcgaaattagaaaaaccacaaccactagacagagatatgatcgttcagttggtaaaagattaccgtgaaggtactgccaagccaattgttaagtcagaagagattccaaaagaacaaaagtccaatgtttataaaatagttgggaagacacatgacgacattgttcatgatgatgacaaggatgtccttgtcaaatattacgcgacatggtgtattcatagtaaaaggtttgcgcctatttacgaagaaattgcaaatgtcttagcatctgatgaatctgttcgcgataaaatcttgatcgccgaagtagattcaggggcaaatgatatcttaagttttcctgtgacaggatatccaaccattgctttgtatcctgccggaaataactctaagcctattatcttcaataaaattagaaatttggaagatgttttcgaatttatcaaggaatcaggtacacatcacattgacggccaggcaatttatgataaattgcaccaggccaaggattctgaagtgtctactgaagataccgtacatgatgaattataa

SEQ ID NO: 76180 - DNA, 408 bp, Saccharomyces pastorianus
atgatgtttaatatttaccttttcgtcacttttttttccaccattcttgcaggttccctgtcagatttggaaatcggtattatcaagagaataccggtagaagattgcttaattaaggcaatgccaggtgataaagttaaggttcattatacaggatctttattagaatcgggaactgtatttgactcaagttattcaagaggctctcctatcgcttttgaacttggcgttggcagagtaattaaaggttgggatcaaggtgttgccggcatgtgcgttggcgaaaaaagaaagctgcaaattccaagttctttggcctacggagaaagaggtgtcccaggcgtcattcctccaagtgctgatttggtgtttgatgtcgaattggtaggcgtgaaatcagccgcctag

SEQ ID NO: 76181 - DNA, 1449 bp, Saccharomyces pastorianus
atggatttttatactactgatatcaacaaaaatgttgtgcctttgttcagtaaaggaacagtagcaagaacagcatcaaaagcacaatatccatcatggtgcaacaacgcgttaaagttaactaatattcttcttaaatctcttcgatgtaaatttcaaacgaaccgctgcgaggatgatcgaggttttgaggtatattgtgttattttaaaaagcatcgctttattaatggccgctaaagaatcattgatattactacaaatacctccttctttaccatcaggatttccatttcgttcaccccaactatcatttacatatttatcaacccgtcttagtgggagccgacacaaatctacgcattctcatcacatcaatcatcaaactcatcccattcatagtagcagtagcaacagtaatagtaataaccgtattcctacaaaaacagattcctccaaacagcatacacagcatttctcttttgctaatgcgggagcctccaatagagacgaactgctatcaatcgtgcgcaaaattgataaatctaatttgaagtgttgtgactgcggtagcaccgcaacagtagaatgggtgtcaatcaatttattgtgtatattgtgtatcaaatgttcgggcgttcatcgatctctgggttcacatatctccaaaattagatctttaacgttggataatttcacctcgttagagttgatgcatcttttacaaaataatgtttccaatagtaatgttaatgccatttatgaaagcaatctcaggaactttccagttaaaaaaataactgcaaattctgatgactcggaaagatccaaattcattattgataagtatcaatttaaaaagtttgttatcgacagcaaccaaggcagagaggcttctttgaagtctataattaaagctatccatttagatagtgttttcatgatgcaaagggccattgcccaaagtaaatattccctaagagaattgacggcaagcgaaaaagagcagaatgatctaaaccatccttccatttttcaatattccctaaagcactatgaaattgttgatgggactcccattttttttattacagaatttttattgtgcaatggtatccatatagataatttaccgaagattactacgaattggtctccaaaggttttagaatattgggaaactaagttggagatgtacggaacattccaagctgtaaatacttctcgtccaagatcagggccgcatttaaatatgcattcaaatgtagattcagcttcgtcctacaataagaaacacaatttgagagttaacatacctgaaagaagtgcctcagcaagtaaaaggtggagtttgagctccattcctaagtcttctcaaaatttgatgtccccaacaaacttattgacaatgcataagtctttaaaattggccaaaaaggacaaaaaataa

SEQ ID NO: 76182 - DNA, 219 bp, Saccharomyces pastorianus
atgcaattcaagaccatcgtcgctgccttcgctactgttgccgctgtccaagctgctaacgtttctaccaatggttccaacggtaccaaaggttccaacggtaccaaaggttccaacaccactagcaccaagatctccactggtgctgctgcttccaacgctttgggtgctggtgtcttcggtgctgccgtcgctgccggtgtcgctttcttattctaa

SEQ ID NO: 76183 - DNA, 120 bp, Saccharomyces pastorianus
atggtgctgtgtgtcatcgcggtggttttcctggcttttctcctcatatataaggaactcgagaaattcttgattttcttttccatcttctcctactgtattatttactttattagttaa

SEQ ID NO: 76184 - DNA, 330 bp, Saccharomyces pastorianus
atggaaaagaaaatcaagaatttctcgagttccttatatatgaggagaaaagccaggaaaaccaccgcgatgacacacagcaccatatctcatgtaacaaacgtgaaaaaagcgatgattttttttctgctttctttttctcatttctcaagcggatattccgcttgcaaaaagaaaaggcgtggctctggtcttcgctattttggaaataaactttggcgtcctacgcccagaagcggccaaagcggccaatcacgcccgaagacgggaccgcacggctcccaacgagtcgtttttttggaactgaaaaaggcccaacgttgggcctag

SEQ ID NO: 76185 - DNA, 240 bp, Saccharomyces pastorianus
atgcacgcccgcgactggtttttagtttttattgcaattttcattcctcccttagcagtctggctaaaaagaggtttttttaccaaggatctgctcattaactttctgttatttttactagggtttttccctggtctgatccatgctttgtacgtgatcagctgtcatccatatgaggagaacgaggcccggtactcacacctctcctcctcggatgataactatggtagtttagcatga

SEQ ID NO: 76186 - DNA, 1320 bp, Saccharomyces pastorianus
atggacttactgggcgatatcgtggagaaagatacatctgactccgttgaaagtaatgacaatggcactcttagtaccaacaactgtggaacgggatttcccgagttgtacaaacccaagaaaatatcatcttggaaggaaagactaagagaaaaaagagcccaaaagaaaaaaactagtggcaaggatgctgaaaagcaacaaacgagtacagacgccccactatcggaggcaaaatctatccataatgaaaatattaaagttctgcagggaatgagtgatgaacaaatcgtgcaagaacgtgaggatctgtataactctttagatcccaaactgattgccaagctattgaaaaacataaataagagagcgaaggacgaaaacaacactccattatttgcagaaatagaaggcgcttctggtacttgggtaggtggcaacaagcaaggtatatacgatctaccaccgttagacgatgaaaatgtagacgttgccttagaaattaggcctaagttaggcaaagatacaaaacatgttcaatttgaagaagcaggaaaagaaaaagacgtggaagaagaagcaaaaactaatgatgacgtcgatgatatcgcacccttagatttccagatggcacaatgcattgatcatatgaaaaatgaagagctattcaaagacgttcattttatcaaagaggagagccaaaatgaaatcaatttagagaaacttgatataaatgatcctaatttcaacgataaattgcacgaaaaatacttccctgatttgcctaaagaggtcaacaaattaaaatggatgcaaccggttcagcaaaaaacagacaagaattatatcattgaagacgtatctgaatgtaggtttgactttaatggtgaccttgttccacccacaagacaaatagactctaccattcactcagggttgcaccatcacagcgactcgcctgaactcgccggttacaccatagtggagttagaacatttagcaagatccacttttccttctcaaaggtgcattgctatacaaactttggggagaatactttataagctaggccaaaaaagctactaccagctagtgccagaaatagatgcagacacatacaaggaagacggaagcatatcgaacgttatggataagatctattccatgttttgggacttgattaaagacggaaaagtcatcgaatccttagaaatcgcctctgatgagaaattcactagaaatttgtcagtcagaaattatgctattgatgcactttggttatggaaacaaggcggtggggacttccgaaccaagaaatag

SEQ ID NO: 76187 - DNA, 1272 bp, Saccharomyces pastorianus
atggaaaacttatgccctccacctccctcccaaatgaaggatttttccactcctccaagaaacaggcatcgtcacaaaagatcctttgctatatctggagattttgaattcttaaaacaacctgcctctgcgcctgttttgccttctgcgtacgactcacctaccttcgaaaatacaccaagaagagtaagcggtatgagcgtaacaatgcctgatgaatctcaaaatgaatcagcattactaaactcaccaagcccaaggttttttattagcgaagcatccacatattcatcaccaattaaaggagtgccggacgctatcattaatttggatgatgtgctcattaataaaccaaaaaagtgtagatcacatcgcaaaaccaaatcagcaccagtaaaattggacgaattttattcctcccataaatgtagctcagtaccagaattaactataaatgaagaaatagatgaagatgacaccaaccctcagttgctggagcccgtaaaaccattatcatcaacttctctatctactgatatgaatgaagataaaaaaatgacactaaaaaatgccaggagccataactcgttaaaaattcaggcacaaaagcaaaggtactacaactcagcaagatatctgcctttgaatagtgaggaccgagcaacagatccacaaattttaacgaagcaaagctctgttacgtctttattttcttctaggtcaattacacctgtatcttgtaacattaacaatgcgggtagaatcaatgcaatcagtggtaattatctagatgacgtcctttatgaccttgacacccctgccacaactctaattcaggatattgataaccttcaaactagtatcaacgaaagggttaggttgtcaccacaatcctcgtcgataaaaaagtatttttccaaagatggcaaatctgttagcagcttcaatttccagtctcaggagtacgatatggtatcttttactgaggattttgaccatgtaacatcattgtcttcttctattcttgactctgagaaacaaacagacgacgaagaagaagagagtattccggaagaaatactacgaggagaacctctccacgtatacaacgaaactagtggatctgataaaagtgtcattttgtcgacgaaacaaaaatctgctcccattaacaaggatagtaagcacagttcaactcagtatgaagaaaaatcttttaagaagaataaaaagttcaaaattttcgccaagttattctgcactaggaaatag

SEQ ID NO: 76188 - DNA, 384 bp, Saccharomyces pastorianus
atgccacagtcttttacgtctattgcgagaattggtgactatattttgaagtcacccgtcctctccaagttatgtgttccagttgccaatcagttcattaacctcgcaggttacaagaagttagggctcaaatttgacgacttaattgcagaggaaaatcccatcatgcagaccgctttaagaagactccctgaagatgaatcttatgccagagcatatagaataatcagggctcaccaaaccgagttgactcatcatttactgccaagaaacgaatggatcaaagcccaagaggatgttccttacctgttgccatacatattagaagctgaagctgcagctaaggagaaggacgagttagacaacatagaggtctccaaatga

SEQ ID NO: 76189 - DNA, 978 bp, Saccharomyces pastorianus
atgattgaagagaatttgaaacagaaaatccacgataagttcgttgcagccaaaaagaatgggcatctgaaagtaacgcatgcagaatcgaagaagttgaaagatcctcaaacgacgacacaatattgggtgacatttgctccatctttggcacttaagccagacgctaacaagaatagcgattcaaaggcggaggacccgttcgccaatcccgacgaagaactagtggtgactgaagatctaaatggtgacggagaatataagctgctactcaacaaatttcctgtggtccctgaacatagtctcctagtgacaagcgagtttaaagaccagagatctgctttgacgccaagtgacttgatgactgcttataatgtgctctgttctctccaaggagacaaggacgatgatgtcacttgtgaaaggtatctggtcttttataattgtggacctcatagcggttcctcacaagatcacaaacacttgcagatcatgcaaatgcctgaaaaatttataccttttcaggacgtattgtgcaacggaaaggatcattttttgcccaccttcaacgcagagccattacaagatgataaggtttcctttgctcatttcgtcttgccgctgccggaatcgtcagatcaagtggacgaagatcttcttgctatgtgttacgtatctttgatgcagagagcacttacatttttccaagattggaccaatgagtctccggagttgaccaagtcatacaatgtgctactgaccaagaaatggatctgtgtagttccaagatcgcatgccaagagtggaccgccattgatgttaaacattaactccacggggtactgtggtatgatcctcgttaaagacagagaaaaactagagaacctcactgaagatcctcatcttgtggacaagtcgttactgcaatgcggtttccccaacacagcaggccaaaaaccaacagagtatcactattaa

SEQ ID NO: 76190 - DNA, 1104 bp, Saccharomyces pastorianus
atgccgcgaattactcaagagatatcttacaattgcgattatggcgacaatactttcaaccttgctattgatataggaggcactctggctaaagtagtcttctcgcctatacacagtaacaggctgatgttctacaccattgaaacagagaaaattgacaagttcatggaacttctgcattctattatcaaagaacataacaatggatgctatagaatgactcatataattgccactggtggtggcgccttcaagttttatgatttgttgtatgaaaattttcctcaaataaaaggtatatcgaggtttgaagaaatggaaggcttaattcagggtttagactttttcattcatgagattcccgatgaagttttcacttacaacgatcaagatggcgaaaggataatacccaccagttccggcaccatggactcaaaggctatctacccataccttctagtcaatatagggtcgggtgtctcaatattaaaagtcaccgaaccaaacaattttagtagagtaggcggttcttcactgggaggaggaactctttggggcctattatcactaattactggcgctcaaacttatgatcagatgctcgattgggcacaagagggtgacaattctagcgttgatatgctagttggagatatttatggaacagactataataaaattggcctaaagtcgtcagctattgcaagttcatttggtaaagttttccaaaatagaatcacatctaacaaatctttggaaaacaacgaaaataaattatattcctcacatgagtctattgagaaaaacaatggacaaatgtttaagaatcctgatatttgtaaaagtcttctattcgccatctccaacaatattgggcaaatagcttatttgcaagctaaaatcaataatatacagaatatatactttggcggatcttataccagaggacatttgactaccatgaacactttgagctacgctattaatttttggtcacaaggatcaaagcaagcgttttttctcaaacatgaaggctatttgggtgcaatgggtgcttttctaagcgcgtctcgtcattcatctactaagaaaacaaatacgtag

SEQ ID NO: 76191 - DNA, 1158 bp, Saccharomyces pastorianus
atggatacagggagtgcgagcataaaggactatgagaccgtgttaacggatattgaggattctattgctgtgagcagcgaagaagtgctaaataaccaagaactaaggctcaaaaatacattgcacgaaattacttccagcattctggcaataaatgaagagaacaagtttgtgaatcctcttaggaacgatgagagcttagacgtagagggaaaggaggtctttgtaaatccaaaaattctgagtgcaaaaatcaaggagttcaataaactaatggagttacttaagttgacttacttggaacaggagacattggactatttcttcaggtttactttgtcctcgacgaaacctttgcagttagattccgaaaaagacccccaatttgtaaaacttaatgaaagagttaatgatttaaaagaagaaatttcgaatgttcaagaaagcaaaatagaacaaatcaaagctgaaatccaagagaccggtcacaactttgcagaaaagcaagatttaataaatgagttgtatctggaagccactggtgatattgaaaattgttgggattcgctcaatgaactaaaaaatttaacaaacaaagaagataagaatatgatgggagaaaaagatacgatattaaattcaagtgattcagatgattttgtggaagagacatacacgaattggcaaaaactactatttttgcagaagcaaaatcaaaggttaacgaaagagctcaaggaaatgcatgaagttaaaaatcaaataatacgaaaaggagagcaatcaaaaaaagaggattctggacatttaatggccaatgaatcagaattatgtcagtcaattaatttgctaacaaaattttgggaaaagcactttttactcaaagggtcaaagacgactatattaaattttgaaatctttacccagcttggaaaagtacaatttgaaataaaggatatgcaatatataattgccatatctttaagcgatttaaaaaggccaatgataaaagacattactattttacaaaaagcgggtggcaatatagtcacagacattgaagcgaacagtaaatttaacaataagtacagaaataatactaaggtgcaaatctttgaggtaatggatgacattataagcgagctaacaaacgaataa

SEQ ID NO: 76192 - DNA, 714 bp, Saccharomyces pastorianus
atggccccaaaaaaagttttactcgctcttacctcatataacgatgtattctacggtgacggcgccaagaccggtgtttttgttgtagaagccttacatcccttcaacacattccgaaaagaaggttttgaagtcgattttgtatctgaaaccggaaaatttggttgggatgagcattccttagccaaagattttctaaatggtcaagacgaaacggattttaagaataaagactcagatttcaacaagacattggctaaaattaagacaccaaaagaagtaaatgccgatgattaccaaattttttttgcatctgcaggtcacggtaccttatttgactatcctaaggctaaagacttgcaggacattgcttccgaaatttatgctaacggtggtgttgtcgcagctgtttgtcacggtcctgctatttttgatgggttaacagacaaaaaaacaggaagaccattgatcgaaggtaagtctatcaccggttttactgatgttggtgaaaccattttgggtgttgatagtattttgaaagccaagaatttggcaaccgttgaagatgttgctaaaaaatatggcgctaagtatttagctccggtcgggccctgggatgattactctattactgacggaagactggtaacaggtgtgaatcctgcttctgcgcactccactgccgtaagatccatcgacgctttaaagaactga

SEQ ID NO: 76193 - DNA, 1710 bp, Saccharomyces pastorianus
atgaaggatttaaaattatcgaatttcaaaggcaaatttataagcagaaccagtcactggggacttacgggtaagaagttgcggtatttcatcactatcgcatctatgacgggcttctccctgtttggatacgaccaagggttgatggcaagtctaattactggtaaacagttcaactatgaatttccagcaaccaaagaaaatggcgatcatgacagacacgcaactgtagtgcagggcgctacaacctcctgttatgaattaggttgtttcgcaggttctctattcgttatgttctgcggtgaaagaattggtagaaaaccattaatcctgatgggttccgtaataaccatcattggtgccgttatttctacatgcgcatttcgtggttactgggcattaggccagtttatcatcggaagagtcgtcaccggtgttggaacagggttaaatacatctactattcccgtttggcaatcagaaatgtcaaaagctgaaaatagagggttgctggtcaatttagaaggttccacaattgcttttggtactatgattgcttattggattgattttgggttttcttataccaacagttctgttcagtggagattccccgtgtcaatgcaaatcgtttttgctctcttcctgcttgctttcatgattaaactacctgaatcgccacgttggctgatttctcaaagtcgaacagaagaagctcgctacttggtaggaacactagacgacgcggatccaaatgatgaggaagttataacagaagttgctatgcttcacgatgctgttaacaggaccaaacacgagaaacattcactgtcaagtttgttctccagaggcaggtcccaaaatcttcagagggctttgattgcagcttcaacgcaatttttccagcaatttactggttgtaacgctgccatatactactctactgtattattcaacaaaacaattaaattagactatagattatcaatgatcataggtggggtcttcgcaacaatctacgccttatctaccattggttcattttttctaatcgaaaagctaggtagacgtaagctgtttttattaggtgccacaggtcaagcagtttcattcacaattacatttgcatgcttggtcaaagaaaataaagaaaacgcaagaggtgctgccgtcggcttatttttgttcattacattctttggtttgtctttgctatcattaccatggatatacccaccagaaattgcatcaatgaaagttcgtgcatcaacaaacgctttctccacatgtactaattggttgtgtaactttgcggttgtcatgttcaccccaatatttattggacagtccggttggggttgctacttattttttgctgttatgaattatttatacattccagttatcttctttttctaccctgaaaccgccggaagaagtttggaggaaatcgacatcatctttgctaaagcatacgaggatggcactcaaccatggagagttgctaaccatttgcccaagttatccctacaagaagtcgaagatcatgccaatgcattgggctcttatgacgacgaaatggaaaaagaggactttggtgaagatagagtagaagacacctataaccaaattaacggcgatgattcgtctagttcttcaaatatcaaaaatgaagatacagtgaacgataaagcaaattttgagggttga

SEQ ID NO: 76194 - DNA, 606 bp, Saccharomyces pastorianus
atgttttcaagatggatggaagataaaggggtttcccgagtaaccagtagtaacttacgattctctttaatcgaaacatcggcagctcttgtaattaaatcctctgtaaaaccaattctaatagcagctagtgatttcatggaacagggcacaacaatcataccatcatgctggaaagatccggacgaaatgcatgcagaaacatcgcgaacagagtatgttttggttgccaaggccgccacgtcatgcggttcccaatctgtttcatatttcattgttgctgcaccccattttgaaatcaccaaatgtgtttctacgctcaactcttttagcacttgtagaagtctgattcccagtgcaacaccagtcgcaccagtaattgcaacaacaattctctttggtcttggaggcgaagttgataccctggttacttcctttgacagtttatatgtaaggaaagatggtgaagttgtaatggttctacctagcaaaggaaaattagcaaaaatgcctgttgttttgaaaaaggctatattagttcttcttggaaataggagcatatctattcaattgaagctgttcaatgcgttggactccgtagattga

SEQ ID NO: 76195 - DNA, 729 bp, Saccharomyces pastorianus
atgctcctatttccaagaagaactaatatagcctttttcaaaacaacaggcatttttgctaattttcctttgctaggtagaaccattacaacttcaccatctttccttacatataaactgtcaaaggaagtaaccagggtatcaacttcgcctccaagaccaaagagaattgttgttgcaattactggtgcgactggtgttgcactgggaatcagacttctacaagtgctaaaagagttgagcgtagaaacacatttggtgatttcaaaatggggtgcagcaacaatgaaatatgaaacagattgggaaccgcatgacgtggcggccttggcaaccaaaacatactctgttcgcgatgtttctgcatgcatttcgtccggatctttccagcatgatggtatgattgttgtgccctgttccatgaaatcactagctgctattagaattggttttacagaggatttaattacaagagctgccgatgtttcgattaaagagaatcgtaagttactactggttactcgggaaacccctttatcttccatccatcttgaaaacatgttgtctttatgcagggcaggtgttataatttttcctccggtacctgctttttatacaagacccaagagccttcatgacctattagaacaaagtgttggcaggatcctagactgctttggcatccacgctgacacttttcctcgttgggaaggaataaaaagcaagtaa

SEQ ID NO: 76196 - DNA, 540 bp, Saccharomyces pastorianus
atgagagaatataccagtaaaaaagaactaaaggaagagattgaaaaaaaatatgaaaaatatgatgcagaatttgaaacaatctctgaatctcaaaaagacgaaaaagttgaaacagtggatagaacaccctctgaaaacctctcttatcaattgggctgggttaatttattattagagtgggaagcaaaggaaattgctgggtataatgtggaaactcctgcgcctggttataaatggaacaatttaggaggattataccagtcattttataaaaaatacggaatctactccattaaggagcaaagagccaagctgagagaggccgtaaacgaggtctacaaatggatatctactttatctgatgatgagctctttcaagcgggaaatagaaaatgggctacaactaaagctatgtggcctgtgtataaatggatccatatcaacacggttgctcctttcacaaactttagaggaaaaattagaaaatggaagagactagtgcctgaagaacaacgcataaaaaggaggaagatataa

SEQ ID NO: 76197 - DNA, 1035 bp, Saccharomyces pastorianus
atgtctaatacagttctagtttctggcgcttcaggttttattgccttgcatatcctgtcacaattgttaaaacaagattataaggttattggaactgtgagatcccatgaaaaagaagcaaaattgctaagacaatttcaacataaccctaatttaactttagaaattgttccggacatttctcatccaaatgctttcgataaggttctgcagaaacgtggacgtgagattaggtatgttctacacacggcctctccttttcattatgatactaccgaatatgaaaaagacttattgattcccgcgttagaaggtacaaaaaacatcctaaattctatcaagaaatatgcagcagacactgtagagcgtgttgttgtgacttcttcttgtactgctattataacccttgcaaaaatgaacgatcctagtgtggtttttacagaagagagttggaacgaagcaacctgggaaagctgtcaaattgatgggataaatgcttactttgcatccaagaagtttgctgaaaaggctgcctgggagttcacaaaagagaatgaagatcacatcaaattcaaactaacaacagtcaacccttctcttgtttttggtcctcaacttttcgatgaagatgtgcatggccatttgaatacttcttgcgaaatgatcaatggcctaattcataccccagtaaatgccagtgttcctgattttcattccatttttattgatgtaagggatgtggccctagctcatctgtatgctttccagaaggaaaataccgcgggtaaaagattagtggtaactaacggtaaatttggaaaccaagatatcctggatattttgaacgaggattttccacaattaagaggtctcattcctttgggtaagcctggcacaggtgatcaagtcattgaccgcggttcaactacagataatagtgcaacgaggaaaatacttggctttgagttcagaagtttacacgaaagtgtccatgatactgctgcccaaattttgaagaagcagaacagattatga

SEQ ID NO: 76198 - DNA, 363 bp, Saccharomyces pastorianus
atggtcaaattaacttcaatcgctgctggtgtcgctgccatcgctgctactgcttctgcaaccaccactctagctcaatctgacgaaagagtcaacttggttgaattgggtgtctacgtctctgatatcagagctcacttggcccaatactacatgttccaagccgcccacccaactgaaacctacccagtcgaagttgctgaagccgttttcaactacggtgacttcaccaccatgttgactggtattgccccagaccaagtgaccagaatgatcaccggtgtcccatggtactccagcagattaaagccagccatctccaaggctctatccaaggacggtatctacactatcgcaaactag

SEQ ID NO: 76199 - DNA, 324 bp, Saccharomyces pastorianus
atggtaaacttagctaacgttttaaccaacgcgactgcagctacgctgagcgcatggtctaatacagttccgttagagacatattttcattttgatgaggcatcaggatttggcgactactatttgaatgtatccgtaatctggatgaatgaaaccctttatgaaaccagaattgtcccagctattatcaatgtccgcgaatggcttgaccatatggaggcaaacgatccttcacctagtgtaactaacccatacgaaacttcaggttattatgccttttcaacagtagtacctgttttaatggggaatatgaaagtagcataa

SEQ ID NO: 76200 - DNA, 696 bp, Saccharomyces pastorianus
atgtcagcttgcccttgcaacatcgttatactcccagtcgagattttgaagaagtcatctaaagatactaagtatagcttgtatagaacaattaatcgaggatatgatgtcccaagactcaaatatggcatcatagttagccctcgagtgcacagccttgagactttattcagtgatctgggctttgacaagaatatagagaaatcctcgctttacttattattaaatgatcctaccttagcataccctaatttccatgaacattttgaacagcttaaaggtgaaacaaacaaagatttatctctgccgacatattatattccgaaggtccagtttttgacggaggcattcgattcagaacataccctagcaaccatcggctacaaaccaaataataaggagagttatgagatcacaggttttacatccatgggtaatggttatggtataaaacttttcaattacagtgtaattcatatgatgcggtctcataagtgtaaaagagtggttgcagatattatcatggagcatgacctattgggttactatgaaaagaaacttggctttgtagaggtgcaaaggttcaaagttctcaaagaacagcaccaagtaaaggtatttgacgataaagttgactttaccaaagacttccatgtgatcaaaatgattaaagagttgggaaatcatagattgtag

SEQ ID NO: 76201 - DNA, 1491 bp, Saccharomyces pastorianus
atgacggccgcacatcctgttgctcagttaactgccgaggcataccctaaagtcaagagaaacccaaatttcaaagttctcgactcggaagatttggcgtactttcgttcgattttgtcaaatgatgaaatcttaaactctcaagctccagaagagcttgcttcgtttaaccaggactggatgaaaaaatatagaggccagtccaatttaattctcttgccaaactccactgataaagtgtccaagattatgaaatactgtaacgataaaaagttggcagtagtaccacaaggtggtaacaccgacttggtcggagcctctgttccggtatttgatgagattgttctttctctaagaaatatgaacaaagtcagagattttgatccagttagcgggactttcaagtgtgacgcgggtgtcgttatgcgtgatgcgcatcaatttttacacgaccatgaccatatcttcccattggatctgccttctagaaacaactgtcaagtgggcggtgtagtttcaacaaatgcaggtggtttgaactttttaagatatgggtctctacacggtaatgttttgggtttggaagtggtgctacccaacggtgagattatcagcaatatcaatgccctaaggaaggacaatactggttatgacttgaaacaattattcatcggtgcagagggtactatcggtgtcgttactggtgtatctatagttgcagcagcaaagccaaaagccttgaatgccgtattttttggtattgagaatttcgataccgttcagaaattatttgtcaaggctaaaagtgaattatctgagattttatctgcttttgaattcatggaccgtggctccattgaatgtacgatagaatacttgaaggacttgcctttccctctggagaaccaacacaacttttatgttcttattgaaacgtcagggtccaataagagacacgacgatgaaaagctgactgctttcctcaaagataccacagattctaaattaatttcggagggtatgatggctaaggacaaagccgattatgatagactttggacctggagaaaatctgttccaacagcttgtaattcttacggtggtatgtacaagtatgacatgtcacttcaattgaaagatttatattccgtatctgcggctgtgacggagagattaaacgcagccggtttgattggtgatgcaccaaaaccagttgttaaatcatgtggttatggtcatgtcggtgacggaaacatccatttaaatatcgcggtaagagaatttacaaaacagattgaggacttactagaaccatttgtttatgaatatattgcatcaaagaaaggttccatcagtgctgagcatgggatcggtttccataagaaaggtaagttacactacaccagaagtgatattgaaattagatttatgaaggatatcaaaaatcactacgatccaaatggaatcttaaacccatacaagtacatttga

SEQ ID NO: 76202 - DNA, 333 bp, Saccharomyces pastorianus
atgaaaattttggcactagccgtcgcctttcaaggcttggcattggtatgctgtacggatacaatagacaattataacaattttacgcataatacatcgacattgtaccgcatagcggattatgataagagattttggagcgtaaaactaccaccagtgaattggactacttgcggtaatgaagatcatccatggattactatccactatgacgagattgataaactcgttgacgataaactggcaagttgggacaaaggacctgttcccgatcgtgaagaatttaggaactctatccttagacaagcgagatgcgaccgcccacattactag

SEQ ID NO: 76203 - DNA, 540 bp, Saccharomyces pastorianus
atgaaaaagactccagactcatctccaccttttgcaagcacgaagaacgtaggcatgtcaaacgaagaaccggaaaaaatggttaacgatcgaattgtggtgaaggccatcgagccaaaagatgaggaagcctggaacaaactgtggaaggagtatcagggtttccaaaaaacggttatgcctccggaagtagccaccactaccttcgcaaggtttatagaccctacggtcaaactatggggtgctctagcctttgacaccgagaccggcgatgcaattggctttgcacactacctgaaccatttgacgtcgtggcatgtcgaagaagttgtctacatgaatgacttatatgtcactgaacgcgcaagagtcaaaggtgtaggtagaaagctcatagaatttgtatacagccgtgccgatgagctcggtacgcctgcagtgtactgggttacggaccattacaatcaccgcgcacagttgctgtacaccaaagtggcttacaagacagataaggttctttacaagagaaacggatactga

SEQ ID NO: 76204 - DNA, 1887 bp, Saccharomyces pastorianus
atggaccctggtattgctaatcataccctccccgaggaatttgaagaggttgtcgttcccgagatgctggaaaaggaagtaggagccaaggtcgatgtcaagccaacgctaaccacatcttctccagcaccttcttacattgaattgatagatccaggtgtgcataacatcgagatttacgcagaaatgtacaaccgcccgatctaccgtgtcgcattattcttctcacttttcctcattgcctatgcttacggattagatggtaatatccgttacactttccaggcgtacgcgacttcgtcgtactcccagcactcgctgctatcgaccgtcaactgtattaagacggttattgcggctgtaggccagatcttctttgccagattatcagatatcttcggcagattttccattatgattgtcagtatcattttttatagcatggggaccatcattgagtcgcaagcggtgaatattacaagatttgcagttggcggttgtttttaccaattgggtcttaccggtattattctaattttggaagttattgcttctgacttttccaacttgaactggaggttgttagccttattcattccagctttaccatttatcatcaacacctggattagcgggaacgtaacaagtgccataggtgctaattggaaatggggtattggtatgtgggcttttatactgccgctagcttgtattccgcttggaatttgtatgttgcacatgaggtatttagcaagaaagcatgctaaagatagattgaagcccgagttcgaagcgctaaacaaattgaagtggaagtccttttgtatagacatcgcattttggaaattggatatcattggaatgttattaattactgtatttttcgggtgtgtattggttccattcaccttagcgggtggtttgaaagaggaatggaaaactgcgcatattattgtccctgaagtcattggttgggttgtagtgttaccactgtacatgctatgggaaataaagtactcgagacatccattgacaccttgggacttgattcaagatagaggtatctttttcgctctactcatcgcattctttatcaattttaactggtatatgcaaggtgattacatgtatactgtactagtcgttgcagttcatgaatccataaagtccgctacaagaattacctccttgtattcatttgtttctgttatcgttggtacaatcctcgggttcatactgattaaagttagaaggactaagccttttattatatttggcatttcttgttggatcgtctcatttggtttgctggtccattaccgtggtgactccggtgctcattccggtatcattggctctttgtgtctattaggtttcggtgcaggttcatttacctatgtgactcaagcttccatccaagcatccgctaaaactcatgcaagaatggcggtagtaacctcattataccttgccacttataatattggttctgcatttggtagttctgttagcggagctgtctggactaatatcctacccaaagaaatttcaaaaagaatttccgatccaaccttagctgcacaagcgtacggttctccatttacattcattacaacttatacctggggaacaccagaaagaatagctttagtcatgtcttaccgctatgttcaaaagattttatgtatcataggtttggtattctgctttcctttgttaggttgcgcattcatgttgagaaatcataaactaacagattctattgctcttgaaggcaatgatcatttggaaagtaaaaacacctttgaaattgaggaaaaggaagaaagttttttgaaaaataaattctttacgcactttacaagcagtaaagataggaaagattaa

SEQ ID NO: 76205 - DNA, 1443 bp, Saccharomyces pastorianus
atgtctgagttaggtgagtattctaaattagaaaacaaagagcttagaacggagtttgaattgacaaattttccttttccaggcacaactgataacgactccgatgacggaagccaagggcagaactctttgaatatcattactcctgacatggatgatactctggttaatgatgtacttcgagaaaacgataaaaagtctagtatgagaatggcttttatgaatctagcaaactctattcttggtgccggaataattactcagccgttcgcgatcaaaaatgctggtatattaggcgggctattatcatacgtagccctcggatttatagttgattggacgttaagacttattgtcattaacttgactcttgctggcaagagaacataccagggtacggtcgaacatgtaatgggtaaaaaagggaaattgctgattctatttacaaacgggttatttgcatttggtggatgtattggttattgcataattattggggatacgataccccacgtactcagagctatattcagccagaacgatggtaatgtacatttttggctcaggcgaaatgtcataattgtaatggtcactactttcatttcctttccgttatcaatgaagagaaacatagaggcactatcaaaggcatctttcttggccgttataagtatgattataattgtactgacagtggtaattagaggacctatgctgccctatgattggaaaggtcattctctgaagttatctgattttttcatgaaagctactatattcagaagtctctctgtcatttcctttgcgttggtttgtcatcataatactagttttattttcttttccatgaggaatagaagtgtggcaaaatttaccagattaacgcatatcagtatcattatctcagtaatatgctgtgcactaatgggatattcgggatttgcagttttcaaagaaaaaacaaaaggcaatgttttaaacagtttcccaggaacagacactgctatcaacatagccagactctgtttcggatttaacatgctaaccacattccccatggaaatttttgttttgagagatgttgtcggtaacttgttacatgaatgcaaccttattaaaaattatgacgaacacactcaattatcaggtaaacagcacgtcgttataacttcttcactagtcttcatcaccatgggtatatcattaactacatgtaatttaggagcattatttgaactgattggggccactacggcatcgactatggcttacattttgccgccatacacaaatttgttgttaactagtaagaagaagatttggaaggaaaagcttcctttctatctttgtatatgctttggtttcatgattatgataatcagcagcacccaaactattattgatgcagttaatggttctgatggacagcactgccaaatatag

SEQ ID NO: 76206 - DNA, 1773 bp, Saccharomyces pastorianus
atgacaaattcaaaagaagacgccgacatagaggagaagcatatgtacaatgagccggtcacaaccctctttcacgacgttgaagcttcacaaacacaccacagacgtgggtcaataccattaaaagatgagaaaagtaaagaattgtatccattgcgctctttcccgacgagagtaaatggcgaggatacgttctctatggaggatggcataggtgatgaagatgaaggagaagtacagaacgctgaagtgaagagagagcttaagcaaagacatattggtatgattgcccttggtggtactattggtacaggtcttttcattggtttatccacacctctgaccaacgccggcccagtgggcgctcttatatcatatttatttatgagttctttggcatattctgtcacgcagtccttgggtgaaatggctacattcatccctgttacatcctctttcacagtgttctcacaaagattcctttctccagcatttggtgcggccaatggttacatgtattggtttgcttgggcaatcacttttgccctggaacttagtgtagttggccaagtcattcaattttggacgtacaaagttccactggcggcatggattagtattttttgggtaattatcacaataatgaacttgttccctgtcaaatattacggtgaattcgagttctgggtcgcttccatcaaagttttagccattatcgggtttctaatatactgtttttgtatggtttgtggtgctggggttaccggcccagttggattccgttattggagaaacccaggtgcctggggtccaggtataatatctaaggataaaaacgaagggaggttcttaggttgggtttcctctttgattaacgctgccttcacatttcaaggtactgaactagttggtatcactgctggtgaagctgcaaaccccagaaaatccgttccaagagccatcaaaaaagttgttttccgtatcttaaccttctacattggctctctattattcattggacttttagttccatacaatgaccctaaactaacacaatctacttcctacgtttctacttctccctttattattgctattgagaactctggtacaaaggttttgccacatatcttcaacgctgttatcttaacaaccattatttctgccgcaaattcaaatatttacgttggttcccgtattttatttggtctatcaaagaacaagttggctcctaaattcctgtcaaggaccaccaaaggtggtgttccatacattgcagttttcgttactgctgcatttggcgctttggcttacatggagacatctactggtggtgacaaagttttcgaatggctattaaatatcactggtgttgcaggcttttttgcatggttatttatctcaatctcgcacatcagatttatgcaagctttgaaataccgtggcatctctcgtgacgagttaccatttaaagctaaattaatgcccggcttggcttattctgcggccacatttatgacgatcattatcattattcaaggtttcacggcttttgcaccaaaattcaatggtgttagctttgctgccgcctatatctctgttttcctgttcttagctgtttggatcttatttcaatgcatattcagatgcagatttatttggaagattggagatgtcgacatcgattccgatagaagagacattgaggcaattgtatgggaagatcatgaaccaaagactttttgggacaaattttggaatgttgtagcatag

SEQ ID NO: 76207 - DNA, 1908 bp, Saccharomyces pastorianus
atgaagttagaaaatactctatttacactcggtgccctagggagcatctctgctgctttggtcatcccaaatcttgaaaatgccgccgaccaccacgaactgattaacaaggaagatcaccacgagagacccagaaaagtggaattcactaaggacgatgatgaggagccatctgactctgaagataaagaacatggaaagttccataagaagggccgcaagggccaagacaaggagtctcccgaattcaacggtaaacgtgcaaggggctctcatgggagcgcccacgaaggaggaaagggcatgaagcctaagcatgaaagttccaatgatgatgataatgatgataagaagaagaagcctcaccataagggtggctgccacgaaaataaggtggaggagaagaaggtgaaaggtaagaaagtcaagggcaagaagcaccacgaaaagacgttggagaaagggaggcaccacaacaggctggctcctctcgtgtccactgcacaattcaacccagacgccatctccaagatcatccccaaccgctacattatagtcttcaagagaggtgcccctcaagaagagatcgatttccacaaggaaaacgtccagcaggcacaacttcaatccgtagagaacttatctgccgaagacgctttcttcatttctactaaagacgcttccttgtccacctctgaggctggcggtatccaggactcattcaacatcgataatcttttctccggttacatcggttacttcacccaagagattgtcgacttgatacgtcaaaacccattagtagactttgttgaaagagactctattgtcgaggctacagaatttgacactcaaaatagcgccccatgggggttggcccgtatttcccacagagagcgcctcaacctggggtccttcaacaagtatctctacgatgatgatgccggtcgcggtgtcacgtcctacgttattgacacgggtgtcaacatcaaccacaaggacttcgaaaagagagccatttgggggaaaaccatcccacttaacgacgaagatctcgacggtaacggccacggtacccactgtgccggtactatcgcttccaaacactacggtgtcgccaaaaatgccaacgttgttgcggtgaaagtcttgagatcaaacgggtctggtaccatgtctgatgtcgtcaaaggtgtcgaatatgccgcaaaggcgcaccaaaaagaagcccaagaaaagaaaaaggggttcaaaggttccacagccaatatgtcgcttggtggtggcaagtccccagctttggacttggctgttaatgcagccgttgaagctggtattcactttgccgtggctgctggtaacgaaaaccaagacgcttgtaatacctccccagcttctgctgacaaggccatcaccgtcggagcttccacgttaagcgatgacagagcctacttttccaactggggtaagtgtgtcgacgttttcgccccaggtttaaacattttgtccacctacattggaagtgatgacgccaccgccactttatcgggtacctcaatggcttcccctcacgttgctggtttgttgacctactttttgtctttgcaaccaggttctgatagtgaatttttcgaattgggccaggactctttgactcctcagcaattgaaaaagaagctaattcattacagtacaaaggacattttgttcgatatccctgaagacactccaaatgttttaatctacaacggtggtggtcaagatttgtccgctttctggaatgataccaaaaagtcccattcatctggtttcaagcaagaattgaacatggatgaattcattggatcaaagaccgatttaatctttgatcaagtgagagatattcttgataaattgaatattatttaa

SEQ ID NO: 76208 - DNA, 225 bp, Saccharomyces pastorianus
atggtgcctccaaccaccatccgcactagggaccaagcgctcgcaccgttagcaacgcttgactcacaaaccaactgccggctgaaagagcttgtgcaatgggagtgccaattcaaaggagccgaatacgtctgctcgccttttaagaggctttttgaacactgcattgcacccgacaaatcagccactaactacgaggtcacggatacatataccaatagttaa

SEQ ID NO: 76209 - DNA, 1674 bp, Saccharomyces pastorianus
atgaaggttgattacgagcaattgtgcaaactctacgatgacacgtgccgcacaaagaatgtgcagttcagttacggtacggccggattcagaacgctggccaagaatttggatacggtgatgttcagtactggtatactggcggttctcaggtcgctgaagcttcagggtcagtatgtgggggtgatgatcacggcgtcgcacaacccataccaggacaacggggtcaagatcgtggaaccggacggatcgatgcttttggccacatgggagccatatgccatgcagttggccaatgcggcctcttttgccactaattttgaagagtttcgtgttgagttggccaagctgattgaacacgaaaagattgatttgaatacaaccgtcgtgcctcacatcgtggttgggagagactctagggaaagtagtccatacttgctgcgctgcttgacttcctccatggccagcgtcttccacgcgcaagttttggacctaggctgtgtcactacgcctcaattgcattacattactgatttgtccaacaggcggaaactggaaggagacatagcgccagttgccacagaacaggactactattcgttctttataggagccttcaacgagctcttcgccacgtatcagctggagaagaggctgtctgtcccaaaattgttcatagacacagccaatggtatcggtggtccacaattgaaaaaactactggcctccgaagattgggacgtgccagcggagcaagtggaggtaatcaacgacaggtccgatgttccagaactgttgaattttgaatgcggtgcggattatgtgaagactaaccagagattacccaagggtctttctccatcctcgtttgattcgctatattgctcctttgatggtgacgcagacagggttgtgttctactatgtcgactcaggatcaaaatttcatttgttggatggtgacaaaatttccactttgtttgcaaagttcttgtctaaacaactagaattggcacacctagaacattctttgaagattggtgttgtgcaaactgcctatgcaaacggcagttccaccgcttacataaaaaatacgttgcactgtcccgtgtcttgcactaagacaggtgttaaacacttgcatcatgaagctgccactcagtacgatattggcatttatttcgaagcaaatggacatggtacgattatattcagcgaaaaatttcatcgaactatcaaatctgaattatccaagtccaagttaaatggtgatacgttggctttgagaactttgaagtgtttctctgaattgattaatcagaccgtgggagatgctatttcagacatgctggctgtccttgccactttggcgattttgaaaatgtcgccagtggattgggatgaagagtatactgatttgcccaacaagctggttaagtgcatcgttcctgataggtcaattttccaaaccacggaccaggaaagaaaattgctcaatccagtggggttgcaggacaagatagatcttgtggtagccaagtatcccatgggaagaagctttgtcagagccagtggtacggaggatgcggtgagggtttatgcggaatgtaaggactcctctaagttaggtcaattttgtgacgaagtggtggagcacgttaaggcatctgcttga

SEQ ID NO: 76210 - DNA, 702 bp, Saccharomyces pastorianus
atggcaaatgatgggattcagaggaatgacaacagaaagggttttaaaactgtacagttctcggcttattctaaagaaattgacgtcataatgaaaaaaatatcattcttggaaaaaaacattacccaacaactagatactcttcctcattttccaaaaaccttaccaccaaatcacaaagattgtgtaagtagaaagcacagggccaggcgaggttggagtagtcagctgaaaaacttgctaggcatttactccaaagaggaaatttttactctggataatttagctgcaacactgcatgatcaagttttaaagttacaagctacactttttcccaatgccatactgaaacaggttcatctcgacaatgccaacatagaaaacaagagaattctgaaggaaattacatataaatacctttccaacgaaaactgtaaagaggagaacaaattcggaacattcatcgtaaagagaattttttttggtgacttatcactcggggtttccgtgttaatcaaccgtattgctttcgaatcggccacatcatccattatggtagtgagaagttcatttattgaaagtgatttcttttatgaagattatttgattttcgattgcagagcgaaacgacgaaaaaaattgaagaggaaaattttgtttatttccactaccatgaatttcaattaccaaaccaaagtttaa

SEQ ID NO: 76211 - DNA, 1206 bp, Saccharomyces pastorianus
atggaaaaccaagagaaaccgctttctgtagacgaggagtacgatttatggaaatccaatgttccattaatgtatgactttgttagcgagacacgtttaacatggccatctttaaccgtccaatggctccctactcctgttcaagaattagatggtggctttattaaacaagaattaatcatcggtacgcacacttctggtgaagaagaaaactatttgaaattcgcagaaattaatctaccaaaggaaattcttagtaatgaagacccacaagaagaagcaggagaggagtatcagtcctctctacctgctcctaggtcaaatataaggattaccgctaaatatgagcacgaagaagaaatcactagagcccgatatatgcctcaagaccctaatattgtcgccacaataaatgggcaaggcacagttttcctctattctcgctcagaaggtcttcagtcaacactaaaatttcataaggataacggttatgctttatcatttagcactttggtcaaagggcgattgctttccggctcagatgatcatacagtcgctctctgggaagtggggagtggcggtgaccctacaaaaccggtacgaacttggaatgatttacattctgatattattaatgataataaatggcacaacttcaataaagatctattcggcactgtttcagaagattctctcttaaaaataaatgacgtcagggcaaacaatactacgatcgatactgtgaaatgcccgcaacctttcaacacattagcatttagtcatcattcctcaaacctccttgcggccgcaggtatggactcgtatgtttatctatatgatctaagaaatatgaaggaaccattacaccatatgtcgggtcatgaagatgcagtgaacaatttggaattttcaagccatgttgacggtgtagctgtatccagcggatcagacagtaggttgatgatgtgggatttgaaacaaattggagcagaacaaacacctgatgatgcggaagacggcgttcctgaattgatcatggtccacgcaggtcacagaagttcagtgaatgattttgatttgaaccctcaaataccttggttggtagcaagtgctgaagaagagaatattttacaagtttggaagtgttcccatagtctacccatcgtgggaggtccaccaaaggtgaacaaggatataataagctaa

SEQ ID NO: 76212 - DNA, 3069 bp, Saccharomyces pastorianus
atgacagggaaagtcaacagagaccttttttttaaactagcttctgatcttcgagaagagcgtctacatgcagctgtcgcattaataaaggacttatccgcattagatttgcccgatgatgcagaagaatggtcttatgtattgaatcgtttaatcaagggtttgtcgtctgatagaaatagcgcgaggttaggattttctttatgtttgacggaagtaatcaatttagctgttaatatgccaccaggtcaacgaccaaaaggtttagaatcaacgaacgagttcttgagcaccttatcaaccattttgaacgttaatgtcaatgagggaacaaaaaaatccataaagggcaaagatgagcgtggaattttatttgggaagttatttggcttgaaatctctactaaatgaacctttattctcagaaatatttgttaaagatttggaaaaagggaacaccgagtttttcattcgattcacggaacagctaattgatctggccctgaagaaaaactggatcaaagaaccatgcttttttacccttttccagactatgaaaatgctgctaccttttatggatgaaagttccgctgaaaaaattcttctgatatatgataaatataacctgactctgacaaatgagggactgtcaacttatttgttgctgaaatatgaaggtgatgaaagtctaattccctcggtgttagatttgaaaaatccaggttggaaggataacgaccctctggcaagaggaaatctgccccttttaacaaaagtattgagaaactcttctgtaattccggatgccaatggaggtttaaaagagacgaaaaaacaaaaaaacacgaattggaaccctaggctgcattttgtttggagtgttctgctaccgttgtttggtaatggaaaattagagaacactagtcatatttcgaagaaaaggaagaaaaccaacaataaaaaggttcagaattcaattcaatttccagagttttggaaaatggccgtggacgaatcatttttcaatgagaaagcttctagtgaaagaaaatatttaggctttctaataatcgacgcggctttcaaggcagttcctggctcgtacatcgggttttgcttcagccaaaacgttatgagaacattgatcaaccaatcaatagattcacaaagagttttaaataagatttcccagttaactttagactccatagtgaaggcttgtgaagaagattctgcaaacagactagtaccttgtttaaatgcaatgttatttggtcctcacggttccataaactttgataagttaacaaaatctggcaccgcttccaaacttattgcaattaaagaattaccttctactgttcttgcccaattactcgatgtgtttttgctacagttacaagataaaaagggagatttatctcataccctttttgctcttgattccatccttcatatagttcgtgcacacaaagtcgaaatcaatgacatggacataatgaagcccgtgttgagacccatcgtatatatggctttcttcaaacatacatcagatgatctgaagttagaacagctacacgaattagccaaggaaagactttattccatcctgggagagttgacaataaacaaggaaatacgttgcaaagatcctgaaataaactcatggcaatatctgacattaaagttaatactggacattgaaaattctcatgtaggagatttaatcaatccactggacgaaaatttagaaaatataaaaaacgaagctatatcttgcttgagtaaaatttgcagatcaagaactgctcaatcttggggtctaagcacgttgttatctatgtgcttagtacaattatatgcaggtgacaccgattctatttctgtgatcgaagaactttgcgaattttccaaacacgagaataactcaatggtaggcatcactgaaatcttactatcacttttagcccaaaagaaggccttactcaggaaattgagtttaataatctggcagcagtttattgaagaagttgctttggaagaattgcaaattttattagatattttaaaagcgagagaaaacaagcaaggttttgcccagctattcgaaggagaagaagaatttgaagcaattaaggaagaagatgatgccagtgaagacgaatcgaaaactggtagtgaaagtgaaagtgaaagtgaaagtgatagcgatgatgctgatgaaaaagatgaagaagacgaggcaaatgaagatattttgaatattgataaagaggccactagcgccttagtgaaggcgttaaatttacccgataacatagttaatgataaaggggaagttgacttagaccaacttgaagggctttctgacgacggtggagacgatgaagatgaggagtctatggatgatgaaaaaatgatggaattagatgatcagttatccgaaattttcaaacgtcgtaaggaagcattatcaagcatatccactggaaaccagcggaaatttgaggtaaaacaatctagggaaaacgttatctcgttcaagcatagagttgtcgacatgttagctgtttacgtcaaatattgtgaaaaattgactcttgctaataaaagtgaacattccaacaatttaggaggctcattgagcaagctcgtttattttattatcccaatgctgaaatgtgccaatgagactcttgataggccactcgccgacaaaatttctaaattgttgaagggtaaaatattcaagataaaagtaactgcattcaaagacatgaacaaagacatcgagcctatggatttgttgaaaaaaacacacaagctgatgctgacttctaagccaggtcagcatgctgcagtgttttattcaatgtgttcaaccagctcactgtttttgagtaaattatacgttgaaatcggtggtaacgataagcttgacgaattgattgacttgtatactgcaactatcaaagagtggatgcagaaaggaaaatgtggacctaacatttttattgatttcatcaattggctatcttcaaaaaagcaaactgtaatggataaggaataa

SEQ ID NO: 76213 - DNA, 498 bp, Saccharomyces pastorianus
atgcctccaaagtttgatcctaatgaagttaaatacttgtacctaagagccgttggtggtgaagtcggtgcctccgctgctttggctccaaagattggtcctttaggtctatcgccaaagaaggttggtgaagatattgctaaggccaccaaagaattcaagggtatcaaggttaccgttcaattaaagatccaaaacagacaagctgctgcctctgttgtcccatctgcttcctctttggtcattactgctttgaaggaaccaccaagagacagaaagaaggacaaaaacgtcaagcacagtggtaacattcaattggatgaaattattgaaattgccagacaaatgagagacaaatccttcggtagaactttggcttccgttactaaggaaatcttaggtactgctcaatctgtcggctgtcgtgttgacttcaagaatccccatgatatcattgaaggcattaatgctggtgaaatcgaaatcccagaaaattag

SEQ ID NO: 76214 - DNA, 2202 bp, Saccharomyces pastorianus
atggaagtagacagtatattaggttccttgagcataactgatgattttgaccaattggttgacgtcacaagtctgtttgatgaattgtgttcaaaactaaaaccagaggctatcgtgaaagatcccaggtttgatttgttcgagggtacacattctttagaggtcaacaactccaaattagactccagtctgatagaattgacagcagaagaaatagaatttgatgtgaacgtggcctacgatccaccgttggcaagtgtagcagccatagcggatagattacttagatgtgttatctcctggctgaatgactaccagactttacccactactgtattaagctgcaggtatacagaaagcttattatcgtcattagttaagggaacaactgccggttcgtcctggtgtacagggaatattttgtatgataaagtactaggaagttgcatacttggcgtttgttatttaacaaaatttgtgcagaaactcttgagtgctggtattgtttttgaagaggaggatttaaattttaataacatggggtttaatacattcgataatttgccggggcaagatgttgttatcaattctctcaccgagagccttcagatattagaggcatattctgatgatagcttacatttaactatgctgaagcatatactaaaaattatcatttgcttagtccacttagaagaccatctgacagactattccacaaagacaagccacctggatgagctaattgaaaacgctaactcggttaatggcatatttccacaattacagctgtctccaccaaagggtgcgttctcaacatatatacaaaagcataggtctaatcaattccctcccaggaagattacgaagttaccgacggattacagcggctttattacactggcaaatgatgttaaaacaatactccttgtagataaagccgagtctgcgttggagacctaccagtttgccaaattcttcaacaagttggaacaaaggcatgtcattgcaaggatcttattccccttatttttcattagagacgacagaacagttttgggtaaattttcatatacccaattttatttgctacatgtcaaggagttttcagcacaaactccatctgaatttgaatcctctattggtaatgaacttatccaagaaagctctaatatgcttttagaatggtaccaaaactgctcccaaaacacatgtagatatagacaaggttttaacaggcaacttattctatgggattctcttcaagcccagtttgaaagtgtcaattcacaagtttactgttcgtggacatattttatgaaactatcaagtatgatcgaattctctttaaaggggtttgatttggatatttacaaaccctttgaagcatactctatgttttggtatgtttattatttaagtcaccacttagaaacctttttgaaagatagtcaaaatgatattgaatcaaatattaatgccattcattccatgaacaaaaaacttaaaaaattgaaagctggtgaaaagaaggaccaattgaggctaaagtacaggtttgctatggataatgaaatggaacaattacaagctaccaaacaatttttaaactatcttttgaaggaaattaacattaccaaatctttatgtctaatagaggttttccaatttgcaattttaaagtcatttggtttaattgacaacaagaatagtactccgtcaaaattctctaatgaacggttaatccataatttgagattcaagccatttaattcaattggtgttcctgagttaccagaatatgaagtatttcaacaaactttaaaagattttgtcattgaagaaaaaggagctgcatttgatataaagttagaaagggccactaactttatcgaaactgaagtgcgcaatgtcgttagttctattgatgagataatgcaaggaatcaagggaggcgataataacggcgttctagtaacaggaacaagactggttcaagagctctctctggagtactattgtaaactaaaacatacttctaaagcattatcagtcaactcaaaagttatcgtcaacactttgaaaaagaacattaaaaacaaggactcccacgaatacaaggttgaattagttcatacaacagaaggatggaactatttccccatacaaacattgagaataaagcaagaccgctataaataa

SEQ ID NO: 76215 - DNA, 1530 bp, Saccharomyces pastorianus
atgatcgctttgaagcccaatgctgttcgaaccttccgacaagtgcagcattgcagctttcgcatttgtcggtatcaatctacgaagtcaaataagtgtctgacgcccttgcaagagtacgacagactggtgaagttggggaagctacgggatgatacatatcagcgtggtatcatctcttccttaggggatttgtatgattcactggttaaatatgtacctccggttgtcaagacacccaatgctgtcgaccaagttggcggttggttgaatggtcttaaatccgtatttagccgtggcaaacctaagaacattggggcgtatgtggatgtatccaaaattggtaactcgatacctcgaggagtttacctatatggagatgttggctgcggaaagacaatgttgatggaccttttttatactacaattcccaatcatttaacaaaaaagagaatacattttcaccagtttatgcaatatgttcacaaaaggtcgcatgaaattgttagagagcaaaatttgaaagaactaggtgatgcaaaaggaaaagagattgatacggttccatttttggccgcagagattgcaaataattcgcatgttctttgttttgacgagtttcaagtcactgacgtggcagatgcaatgatattgagaaggctgatgactgccttactatccgatgattatggtgtcgtacttttcgcaacctcgaatagacatccagatgagttgtatatcaacggtgttcaaagacaatcatttattccttgtattgaactgataaagcatagaactaaggttatcttcttgaattcgccaacagattaccgtaagattccaagacctgtgtcctcagtttactatttcccatccgatacgagcataaaatacgcatcaaaggaatgtaaaacccgtcgagaaactcatattaaggaatggtataactatttcgcacaggcttcccacaccgatgattctactgattcacacacggtgcataagacattttatgattatccattaactatttgggggagagagttcaaagtccctaagtgtaccccacctcgagtcgcgcagtttactttcaagcagttgtgtggtgagcctttggccgcaggagattacttgacattggcaaaaaattttgaagcctttatagtgaccgatattccatatttgtccatttacgttcgtgatgaagtgagaagatttattacatttttagatgctgtatatgacagtggcgggaaactggccactacgggtgcagcggattttacttccttgtttgtggaacctgaacagatacttaatgattttgagttacgcccaacaaccaaagaacctgatagcgtcgatactggtatggtagatgagatggttgagaaacacggtttttcgaaagagattgccaagaaatcgcagatgtttgctcttgatgaagaaagatttgcctttgcccgtgccttaagcaggctgtcacagatgagctccaccgattgggttactaagcctacatactaa

SEQ ID NO: 76216 - DNA, 771 bp, Saccharomyces pastorianus
atgtctggtaatagagagcaagtctttcctacgcgtatgacgctgggtttgatgaagaccaagttaaaaggtgccaaccaaggttattctttactaaagcgtaagtctgaagccctaacaaagagattcagagatattaccaaaagaattgatgatgctaagcaaaagatggggagagttatgcaaactgctgccttttccttggccgaagtttcctatgcaacaggtgaaaacattggctatcaagtgcaagaaagtgtctctactgcaagattcaaagtgagagcacgtcaagaaaacgttagtggtgtgtatttgtctcaatttgagtcctacatcgaccctgaaattaatgatttcagattaactggtttaggtagaggtggtcaacaggttcaacgagccaaggaaatctattcaagagccgttgaaactttagttgaattagcctctttacagactgcatttattattttggatgaagtgattaaagtgacgaacagaagggttaatgctatcgaacacgttattatcccaagaactgaaaacacaattgcttacattaacagtgagttggatgagttggacagagaagaattttatagattgaaaaaggtccaagaaaagaagcaaaatgagactgcaaaattggatgctgagatgaaattgaagagagatagagcagaacaagatgcttcagaagtagctgctgatgaggaacctcaaggtgaaacattggttgctgatcaagaagacgatgttatattctga

SEQ ID NO: 76217 - DNA, 192 bp, Saccharomyces pastorianus
atgattgtggacaagcggcattgtctacaggctgtgcaaaattatatagtacagataaatgtaaccagaacaacgaagaaaaggtccctatgttgcttcttttctactaaaattagcctatttataatcttgcatctttgcctcttggtctgtcttttactttcattctattttgatttttaccccttctag

SEQ ID NO: 76218 - DNA, 1182 bp, Saccharomyces pastorianus
atgttggtgctagggtctcttagatcggcgctgtcgtgcagttccacagcatcgcttattagtaagagaaacccttgttatccatacggtatactctgtcgaactctatctcagagtgttaaattgtggcaagagaatacttcaaaagatgactccagtttgaacattactccacgattactaaagattatacctaacgatactgatatcgtgactcttgagaagcaggatgaattgattaaaagacgtcgtaaactttcgaaagaagtgacccagatgaagaggctaaaacccgtctcacctggtttgagatggtaccgttcccccatttatccatatttgtacaaaggtcgtccggttagagccctaactgttgttcgaaagaagcacggtggtagaaataattcaggaaaaatcactgtccttcaccaaggtggtggccatagaaatagaacgaggctgatagactttaacagatgggaaggtggtgcacaaacggtgcaaaggattgagtacgatccgggtagatcctctcatatcgccctattgaagcataatactaccggcgaattgtcttatattattgcttgtgatgggttacgcccaggcgatgtggtcgaatccttcagaagaggtattcctcaaactttactgaatgaaatgggcgggaaagtagaccctgctatcttaagtgttaagactacgcaaagaggcaactgtctacctatttccatgatccccataggtactattattcacaacgttggcataacacccgttggacctggaaaattctgtcgctctgctggtacatatgccagagtccttgcgaaattacctgaaaaaaagaaagctattgttagattacaaagcggtgaacatcgttatgtgtctttagaggctgtcgctaccattggcgtggtctccaatattgaccatcaaaacagatctcttggtaaagccggcagatcaagatggttagggataagacccactgttagaggtgttgccatgaataaatgtgaccatcctcacggtggtggccgtggtaaatccaagtctaataaattatcaatgtctccatggggacaactggcaaaggggtacaagactagaaggggtaaaaatcaaaatagaatgaaagtaaaagacagaccaagaggcaaagatgcaagattataa

SEQ ID NO: 76219 - DNA, 363 bp, Saccharomyces pastorianus
atggtcaaattaacttcaattgccgctggtgttgccgccatcgctgctactgcttccgcaaccaccactctagctcaatctgacgaaagagtcaacttggttgaattgggtgtctacgtctctgatatcagagctcatttggctcaatactactctttccaagctgctcacccaactgaaacctacccaattgaagttgctgaggctgttttcaactacggtgacttcaccaccatgttgactggtattgccccagaccaagtgaccagaatgatcaccggtgttccatggtactccagcagattaaagccagccatttccagtgctctatccaaggacggtatctacactatcgcaaactag

SEQ ID NO: 76220 - DNA, 459 bp, Saccharomyces pastorianus
atgagcttgaggccttgcttcgtatcattgatagatgaatctgataaacctatattgatttacgtccctaatgaggcggagaatgagatgaatgatgtactcaaatataacgtgctttctaacatatcgttagattattttgaaagtgctttggttgaatggcattctttagattccaaacctcttctgaagtcaatttttcaattggaaggtgtctctgtatttgctatgttgattaagcagacgggtctgaagattgtcattggatttgaacaaaaaagcctaagtggagctgatgatgaatttgaagcaatcaatcagattttcgaaaccgtaagaaaaatctatatacgtgtcaaatgtaatcctttacttgttagcggtgacgaaaagtccattataaaaagtttggaaagaaaatttgatgagttgtttatttcaactgaagttgaattatga

SEQ ID NO: 76221 - DNA, 1413 bp, Saccharomyces pastorianus
atgtctctctctcccgttgttgttattggaaccggtttggccgggctggctgctgccaatgaattggttaacaagtataacatccctgtaaccatcctcgaaaaggcttcctcgatcggtgggaactctatcaaggcctccagtggtattaacggtgcttgcaccgagactcaacgtcacttccatatcgaggactccccacgcttatttgaagatgacaccatcaagtctgctaaaggtaaaggtgtccaagaattaatggctaagttggccaatgattctcccctggctattgaatggttgaaaaacgaatttgatttgaaattggacctattggctcaattgggtggccactctgtggcaagaactcacagatcgtctgggaagttgcctccaggtttcgaaattgtttctgccttatctaacaatttgaagaaattagctgagactaaaccagagttagttaagattaacttagacagtaaagtcgtagacatccatgaaaaggatggctccatttctgctgtagtgtacgaggataagaatggcgaaaagcacatggtgagtgctaacgatgtcgttttttgttctggagggtttggcttttctaaggaaatgcttaaagaatatgcacccgaactggtgaacttgccaacgacaaacgggcaacaaacaactggtgatggtcaaagacttctgcagaagttaggcgctgatctgattgacatggaccaaattcaagttcatccaactgggttcattgatccaaatgaccgtagctcaagctggaaattcttggctgccgaatccttaagaggtcttggtggtatcctattaaaccctattaccggtaaaagatttgtcaacgaattgaccacaagagatgtagtcactgcagctattcaaaaggtttgtcctcaagaggataacagagcactattggttatgggcgaaaaaatgtacacagatttgaagaataatttagatttttacatgttcaagaaacttgtacagaaattgacattatctcaagttgtttctgaatataatttaccaatcactgtcgcccaattatgcgaggaattgcaaacatactcttcgttcactaccaaggctgatccgttgggacgtaccgttattctcaacgaatttggctctgacgttactccagaaaccgtggtttttattggtgaagtaacaccggttgtccatttcaccatgggtggtgctagaatcaatgtcaaggctcaagtcattggcaagaacgacgaaaggctactaaaaggcctgtacgcggccggtgaagtttctggcggtgttcatggcgccaataggttgggtggttcaagtttgttagaatgcgttgtctttggaagaactgcagctgaatctattgccaatgaccgcaagtaa

SEQ ID NO: 76222 - DNA, 1164 bp, Saccharomyces pastorianus
atgactgaattcgaattgcctccaaaatatatcaccgctgctaacgacttgcggtcagacacattcaccactccaactgcagagatgatgcaggccgctttagaggcctctatcggtgacgctgtctacggtgaagatgttgacaccgttaggctcgaacagaccgttgcccgcatggctggcaaagaagcaggtttgttctgtgtctctgggactttgtccaaccagattgccatcagaactcacttgatgcaacctccatactctattctatgtgattacagggctcacgtttacactcacgaagccgctggactggcgatcttgtctcaagcgatggtggttcctgtggttccttccaacggtgactacttgaccttggaagacatcaagtcacactacgtcccagacgacggtgatattcacggtgcccccaccagattgatttctctggaaaacactttacacggtattgtttatccattggaagaactggtccgcatcaaagcttggtgtatggaaaatggtctcaaactacattgtgacggtgccagaatctggaatgccgctgcacaatctggcgtgccattaaagcaatatggggaaatcttcgactccatctccatttgtctatccaagtctatgggtgctcctattgggtccgtcttggttgggaaccttaagtttgtcaagaaggccacccatttcagaaaacaacaaggtggtggtattagacaatctggtatgatggctagaatggctcttgtaaacatcaacaacgattggaagtcccaattgctgtactcgcactctttggctcatgaattagccgaatattgtgaggcaaagggcatcccgctagagtctccagcagacaccaactttgtctttattaacctgaaggccgctagaatggacccagatgtccttgttaagaagggtttgaagtacaatgttaagctaatgggtggtagagtctcgttccactatcaagtcaccagagatactttggaaaaagtcaaattggccatctccgaggccttcgactatgctaaagaacatcctttcgactgtaacggacctacccagatttaccgtagtgaatccaccgaggtcgacgttgatggcaacgctatccgcgaaataaaaacctacaaatactga

SEQ ID NO: 76223 - DNA, 501 bp, Saccharomyces pastorianus
atgagcggtggtaggggcaatagcagcaatagtagcgtcagtaataatagtaataataacaataataatgacgggggcgacgagagattgctgtttctaagaagcgtgggcgaacgcaatgaaattggctttccctctagattcaagtcggcgcattacaagaaaccgacaagaagacacaagtcagcgaggcagttgatctcggacgaaaacaagcggatcaacgccttgttgaccaaggctaacaaggctgcagagagttctactgctgctaggcgacttgtgcccaaagcgacgtactttagcgtggaagcgccaccgtctatcaggcctgccaagaagtactgcgatgttactgggttgaagggcttctacaagtcgcctacgaacaacattcggtatcacaacgcagaaatctatcagttaatcgtaaagccgatggcccccggcgtcgatcaggagtacttaaaattgagaggggccaacttcgttctaaaatag

SEQ ID NO: 76224 - DNA, 2871 bp, Saccharomyces pastorianus
atgccagtctctgtaataaccacggttttagcatgtctgtggctctcttataggctctataagtttctcactattcctgtgtccagcatcgtctccactttgaagatcaaaactccaccggcaacaaaagtgtctatcgacaaaatagccacggattcagtgaccattcattgggagaacgaacctgtaaaagcggaggacaatggcagtgcggatagaaacttcatttcccactatttgttgtatctgaataacacacaattggctatcttcccaaacaacccaaactccctttacacatgctgctccatcacgggtctcgaggcggagacgcagtaccagttagattttataacgattaacaacaagggcttcatcaataagctaccctccatttactgtatgacgaaggcgagagaggcgaatgaagcgttgaagactagaaaatggagaagaaacaccatcacatcgtccacggctatgcagcccagcaactccaagtccgaactcgccccgttgccctctcactactcctctgtttccctgtctactttctcatccaatattactaatagcaccaccagtaataatggttcaaatctacccgcttacacatctttgactacgttgaaggatttggattcgttttccatcgatgatctgaaaaagatactgatttgcgcccaggaggacttacacgatgtcttgtcccaacaaacctcgcttttgcaagattttcaagaatcgaagttagaattagaactagaactggataacttgaaaacacattggtcgcacgaagttgacttgcggaaatccttgaaatccaatatcaagtcattggagaattctaaactattgaccgatttgaaaatcgaaaaattgaacaagaaaatcgacaaatccaaggaaaaaatatcgaaaatgcgcaatgatatgcagaactggtctcaggaagataccgagctgttgtctaaggataccataaaggagaaatatttcaaattactaaacgaatccaatgcctctgtggccaatatcaacaaggaaattgagtctttacaaaatgaaatttccaagatggaggagtctaacaagagattgaacgcctctaagaaatcattgattacttccatagtggtgaatgccaatgtggaaaacgataaacctattgctagcggagaattgtcggctgttttgaagaagctcaatgattttactttagaaaaaaatggatttttaagtaatgctggtgaagagtttctatccaaattgaatgcagactcatcattgattaaaatgattaagcaagagctaagcattgatcaagaattggaggccaactggaaattgcagaggtcaaatttgttgaagaaaattagtgctttagaaaaccaatttaatgaaatgagccttaataatcggaatttgaaaacaaaattaatggttcaaccatataagaataacggtgattcgcttgctgccaccaattcgaataattccgcggaaaaaaacagaagttctggatcgattcaattaccattatccaacaacatgtcaagaacggggtccattgatttaatatcgaataataacaaaagtattaacaacagtaatgctgattctgctcctccgttgaggttgcacaatccagtttcgtactctccttcgaatgaacccatacaaccttcaagcagtctattgagtcaattgacacaggacaccgataatcgatcaatgctctccaatcacatctcatcgaacaacgaaaacaagcaacagccttcttcatattcacatgctttacctacaactgctactgctaatgcaacagcaacagcaacagcaactaatggtcactcaaggtcaaatttatggaccaccgcacaattcgctcaaccttcgcatcaacaagtatctacagatttggatcaagcttttgaatacgataatgcaaaccacttaatcagtggtttgcaaaatatgatctacgacgaaacagactatcctgataacataagcaattattccaagggttttactacagacgaacttgacaattactggactaagcagcaaccccaggtgcgcagcacaaatgaaagtcttttctctacgactggaacacctatgtcatcatataaggctaacccagtaatatctccatattctagttctcatttgcgacaaacctccaacgcaaccaatacgaatccgatgcatccacagagtctactcgccgctacattgaatgatccttcattacaaagttttgtacgcagtggttctttctacagtgctccgcaacctgcaaactccttagagaacaatatcaatggcaatgaaaccgagaacattagtccaaggatatcaagtgacttcaatttattggtgccaaacttgagcccacgactctcaaacgatgtgcccattgttccaggcaataacactactttaacacctttacactcgaacatattaacaatgaaccatcaaccaacggcggataacagtacacgaagatcattccatgcctcttcaccacctttcaactccatatggaattcaaatacaaatcaactttctcctccattggaggagcagtatcacctcgatgtgcctgtgggtccaaaggttcccgctaaagaaccaaaccctaagccttctcacaagaggaaccaaagtaacagcagcatttcttctgcatggtccaagtttaagcacaagtctgcatcatcacctgctaatgcggacacggatattcaagattcatcaactccatcaactagtccaagcggtagaagaatgtcaaaactgttgtccaagagcggtatgaataatctatttaacccgcacagtcacgactcatga

SEQ ID NO: 76225 - DNA, 1557 bp, Saccharomyces pastorianus
atggcgcccatctttagaaattaccggttcgctatcggtgcttttgccgttattatgctcattttgttgattaaaacatcttccatcggtccaccttctattgcacgtacagttactcctaatgctagtattcccaaaactccggaggacatctctatcttgcccgtcaatgatgaaccaggttaccttcaagattcgaagactgaacaaaactatcctgagcttgccgatgctgtgaagtcacaaacaagtcaaacatgcggcgaagaacataagtatgttatcatgatcgatgccggctctaccggttcccgagtacatatatacaagtttgacgtctgtacttccccacctacattacttgatgaaaaattcgacatgttagagcctggtttatcttctttcgataccgattccgttggtgccgctaactcccttgacccattactgaaagtagcaatgaactatgtccctattaaggcaagaagttgtactcccgttgcggtgaaagctactgcaggcctaagactcttgggtgatgccaaatcttcaaaaattttgagcgctgtaagggatcatttggagaaggactatcctttcccagttgtcgaaggtgatggtgtttccatcatgggcggtgatgaagaaggtgtcttcgcctggattactacaaactacctattaggtaatatcggtgctaatggccccaagttacctactgctgccgtttttgacttaggcggagggtctacacaaattgtttttgagcctactttcccaataaatgaaaaaatggtcgatggtgagcataaatttgatttgaagtttggtgatgaaaattacaccttgtaccaattttctcatctaggttacggtttgaaggaaggaagaaataaagttaactctgttcttgtggaaaatgcattaaaagacggcaaaatattgaagggtgataacactaagactcatcaattgtcatctccatgcctaccgcctaaagttaatgccacaaatgaaaaggttacattagaatccaaggaaacttataccattgactttatagggccggacgagccaagtggtgcacaatgtagatttctgactgatgaaattttgaataaagatgctcagtgccagtctccaccatgctctttcaatggggttcaccaaccttctttagttcgtacattcaaagaatcgaacgatatctatattttctcttatttctacgacagaacccgtccattgggtatgcccttgtcctttactttgaatgaattgaacgatttggcaagaatagtgtgtaaaggcgaagaaacttggaatagtgtcttcagtggcattgcggggtccctagatgaattggaaagtgactcgcacttctgtttggacttatcttttcaagtgtccttattacatacgggatatgacattccattacaaagagaattgaggactggaaagaaaattgccaataaagaaatcggttggtgtttaggtgcgtcattaccattgttgaaagctgataactggaaatgtaaaattcaatcagcttga

SEQ ID NO: 76226 - DNA, 1488 bp, Saccharomyces pastorianus
atgaaaactgatagattactgattaacgcttccccggagacatgtaccaagggagatgctgagatggatactatggatactattggcagaatgacatcagttaaagttttagcggaaggcaaggtattaagcaatttcgaagaaccgggcttaatgaggtgcggttatcatgatgcaaaaaactgggtcagaagattatcgagcgaaacaattgtcggtgaggacacgagtaatttatacccattttatgttgatactgcatacgatgtaaggcgtttgagaaaggatattataaatgctaaggttgacgtgcaggttgaaaacctgatcataatctgcaatattaatgatatttccactgtatttctcatgagagaagtggtggaatggatcttacgcaatttccattcaatgactgtatatgtacaagatatttttgaaaagtcaactcagtttgctgttggtgacctctgcaaagacagcaattgcagtaaaaacagagtaaagtattggtcaaaagaatttgttgaaaaacacgattcattctttgacttgatgattacactagggggtgatggaactgtcctttttgcttcatctatattcacgaaagatgttccgccgattgttccatttgcccttggatcattaggatttctaacaaattttgaatttcaaaatttcaaagaaacattgaaacatatcttaacagatgaggttcgtattaatttacgaatgaggttgcaatgcaaactctaccgtagaaataaaccagaaattgatgccgcaactgggagaaaaatatgttacatcgatttcatctccgaacatcacgtattgaacgaagtaaccatagatagaggtccagctccttgtttatccctattagaactctatggaaacgactcactaatgactaaggttcagggagatggattgattgttgccacgcctacgggatccacggcgtactcattgagtgcaggaggctctttaatatcgccaagcgtaaatgccatagcggtgacgcctatatgtcctcatactttgagctttaggcctataattttaccagatagcatggaattgaaagttagagtagatatgaactcaagagggacgtcgtgggtgaattttgacggaaaagatagagtcgaattgaaacagggtgactatgttgtgataactgcaagcccctattcggtaccgactatcgagtcatctgccagtgaattttttgaaagtatcagtaaaaatcttaattggaatgaccgcgaagagcagaagccatttgcacatattctctcgccaaaaaatcaagaaaaatatagattagactcatcgaaaaatggaaacgacaccataaataatcccctcgagagttcatgcataagctcagatgcacaagatgaggagaggaaatccgtaacggaaacagaaacagaaatagttgttgaacggactcgtcaggctcatttttcaatctaa

SEQ ID NO: 76227 - DNA, 1401 bp, Saccharomyces pastorianus
atggcaatcgttaatagttggctaatttgtttagtcagtattttttccttcgtggtacgtgtagaggccgctacattttgcaatgcaactcaagcatgtcccgaagataaaccatgttgctcacaatatggtgaatgtggtactggtcaatattgtctgaacaactgtgatgtaagatattcgtttagtcatgattcatgtatgcctgtacctatctgcaagagttcatccactaaattcaaagattattcctctaagttggggaatgctaacactttcttaggaaatgttagtgaggctgattggttgtatactggtgacgttttggattatgatgatgaagaaagtttaattttggcgatgcccaagaacagtggtggtaccgttctttcctccacgagggctgtttggtatggtaaggtcagtgctagaataaagacgtcacatcttgctggtgtggtcactgggttcattctgtattccggcgcaggtgatgaacttgattacgaattcgtcggtgctgatctagaaactgctcaaacgaatttctattgggaaagtgttttgaactacacgaattctgccaatatttccactactgatacatttgaaaactaccatacttacgaattagattggcacgaagattatgtaacatggtccatcgatggtgtcgtcggtagaaccttgtacaagaacgaaacttataacgccaccacccaaaaatatcaatatccacaaaccccatccaaggtggatatttccatttggccaggtggtaattctaccaacgctccaggaaccattgcatggtctggtggtgaaattaattgggacgcagcggatatcagcaacccaggatattattatgctattgtcaatgaagttaatatcacatgttatgatccaccaagcgataccaagaagaatggtacttctgcttatgtgtatacttcgtccagtgaatttttggccaaagacattgctattaccgatgatgaggtcacgatggacagtgatgagggatctggcttggacccacataagggagctaccacatcttccacccaaaagagttcttcctcaactgcaacctcttcctccaaaacgtcatccgatcacagcagttcaactaagaagagtagtaagactagttccaccgcttcatcatcatcatcttcttcttcttcttcttcttcttcctctactgctactaagaacggagataaggtcgtatcctccgtatcctcttctgtcacttcccaaactcaaacaacatcttctgtaagcggaagcgcctccagcagtacaagctcaatgagcggtaataacgcaggtgctaacgtagcggcaaactggcatttgactgttttatgtgtcatcctaggttatgtcttatag

SEQ ID NO: 76228 - DNA, 342 bp, Saccharomyces pastorianus
atggctaaagaaagtacgggattcaaaccaggctctgcaaaaaagggtgctacattgtttaaaacgaggtgtcagcagtgtcatacaatagaagagggtggtcctaacaaagttggacctaatttacatggtatttttggtagacattcaggtcaggtaaagggttattcttacacagatgcaaacatcaacaagaacgtcaaatgggatgaggatagtatgtccgagtacttgacgaacccaaagaaatatattcctggtaccaagatggcgtttgccgggttgaagaaggaaaaggacagaaacgatttaattacttatatgacaaaagctgccaaatag

SEQ ID NO: 76229 - DNA, 726 bp, Saccharomyces pastorianus
atggtcattgggcaaaacgtcctgctagctcgtataccaaaaatgggagacaattactcgacttatttgcttgatattgaagggacagtatgcccgatctcgttcgtgaaggagactttattcccttatttcacgaagaaagtgccgcaattggttcaacaggatacaagggactccccggtttccaacattctgtcgcagtttcacatcgacgataaggagcagttgcaggcgcatattttggagttggtggccaaggatgtgaaggatccaatcttgaaacagttgcaaggctacgtctgggctcacggatacgaatctgggcagattaaggcgcccgtttatgcagatgctattgactttatcaagaggaagaagcgtgtgtttatctactctagtggatctgtaaaggcacagaaattgctgttcgggtatgttcaggatcccaacgcgcctgcgcatgattcgttggatttgaattcttatatagatggttatttcgacatcaacacttctggaaagaaaaccgaaacacagtcttacgccaacatcttgcgggatatcggtgcgaaggctagcgaggtactgttcttgagcgataatccattggaattggacgcagcggccggtgttggaatagctactgggttagcttcccgacctggtaatgcacctgtccccgatgggcaaaagtaccaggtatacaagaattttgaaactctttaa

SEQ ID NO: 76230 - DNA, 1197 bp, Saccharomyces pastorianus
atggttagcttaacctttaaaaatttcaagaaggaaaaagttcctttagatctggaaccttcaaacacaattttagagaccaagaccaagcttgctcaatccatttcttgtgaagaatctcaaataaaactgatctactcgggtaaagtgctacaagattccaaaaccgtatcggaatgcgggctaaaagatggggaccaagttgtcttcatggtttctcaaaaaaagtccacgaagaccaaagtaacagaacctccaattgctcctgagagcgccactacccccggaagagaaaattctacagaagcatcccccagtacggatgcttctgcagctcctgctgccactgctcccgaaggctcacaaccgcaagaagaacaaaccgccactacagaacgtactgaatctgcctctacaccgggattcgtggtgggaaccgagaggaacgagaccatcgagagaatcatggaaatgggctaccaaagagaggaagtcgaacgagccttgagagcagcctttaataatccagatagagcggtggaatatctactgatgggtattccagaaaatctgcgtcaaccggaaccacagcaacaaacagccgccgcagcggaacaaccatcgacagccgccaccactgcggaacaaccggctgaagacgacttatttgcacaagctgcccaaggcggtaatgcttcatccggtgcgcttggcacaacaggaggagctacagatgctgcgcaaggtggacctccaggttccattggcctcactgtagaagatttactatcgttgagacaggtcgtttcaggtaacccagaagctttagccccattgttggaaaacataagtgctagatatcctcaattacgtgaacatatcatggcaaatccagaagtgtttgtgtccatgttgctagaagccgtgggtgacaatatgcaagatgttatggaaggtgcggatgatatggtggaaggagaggatatagaagttacaggagaggctgctgctgcaggactgggacaaggcgaaggtgaaggttctttccaagttgactatacccccgaagacgatcaagctatttcgcgcctctgtgaattgggctttgaaagagatcttgttatccaggtgtattttgcgtgcgataaaaacgaagaagctgcagcaaatattctattcagcgatcatgccgactga

SEQ ID NO: 76231 - DNA, 501 bp, Saccharomyces pastorianus
atgtcaagatatggcaaaaaccttgtgcattatataatcgtggaacacgacgatcaacgcggccaaaagccgatcgacgacgacgacgaaaaaaatttttattaccactgttccttcaccttcgaaactttttttcgggcgacggcgtttcttttagctcctgcggtatgtgcggtgcgggaggtcccttgtcgcctcacacggacccgatataacgctacggaatacatcgaggggtatgggtggatgatatcactgcagcaaggtctgggtgttgcaggattttaccggccttggcccctcagcgtccagctacagcgttatactactccaagtcgccgttcccgttttgctgttctcacccctcagagaaaatgccaccagaacgaagccaatggtcaggacttatcgttacttatactgttgagccggatatatccgctgtgctctaataccagccaaacgagaagggtagcggcaagaaagggtaaactttcatga

SEQ ID NO: 76232 - DNA, 603 bp, Saccharomyces pastorianus
atggaaggggcgtcggagtttttttttcttttttcatttatatcccatgccatgatgttaaccggtttaatcggttctagcagcttccttgaaggagatggcggcttcttcacccatagcggagatgatggtaaccatcaagtccttaccttcatcaaaagcagtttgcaaactgtcacccaattcaccttctggagccttgacatcatccttagtgtcaccgtccatgttcatcaaagacaagaaaccgtcatcaatgtccaacaattggtattcgtttctcttgacaactggaacttccatgttgtgagtagatggagacaaatcttccaacttcttaccagtgaagatatcaatggcaaccaaatggactttagcgtgaccgtgcttaccagtcttagaagtggacatgtcgacaatcttacatggtctactcttgatgacaacgaaaccgttctttctcaaggcagaacattgcattgggtaggtggcggaggaaccagcgtcagcagtttcaaaggtgtgttcttcgtcagacattgtatatatgagttggtatttgtgtgtgtttgggagtctatgagtaattggctacagaagtag

SEQ ID NO: 76233 - DNA, 474 bp, Saccharomyces pastorianus
atgtctgacgaagaacacacctttgaaactgctgacgctggttcctccgccacctacccaatgcaatgttctgccttgagaaagaacggtttcgttgtcatcaagagtagaccatgtaagattgtcgacatgtccacttctaagactggtaagcacggtcacgctaaagtccatttggttgccattgatatcttcactggtaagaagttggaagatttgtctccatctactcacaacatggaagttccagttgtcaagagaaacgaataccaattgttggacattgatgacggtttcttgtctttgatgaacatggacggtgacactaaggatgatgtcaaggctccagaaggtgaattgggtgacagtttgcaaactgcttttgatgaaggtaaggacttgatggttaccatcatctccgctatgggtgaagaagccgccatctccttcaaggaagctgctagaaccgattaa

SEQ ID NO: 76234 - DNA, 420 bp, Saccharomyces pastorianus
atgaaaaaagaaaaaaaaactccgacgccccttccatcacatcatgtactcttcgctgaaccgggtttttttctttgcaatttttttttcgttctcctaaagcatacacaaataaatccttttttttattttctatttattttgttatttatcatctatatagcaataatatactttgtttttattcgtatttcacacttttctttttccttatgcaggcagtgtaattcattggggaggatgattttcatgtgcgcatatctaccggctgcaagcagccggtcggtggcaaatccggcgcttccccctcaaaaaaaaaaaaaaaaaaaaaaaaagggaactctcagaacggggggggttgaagagcaggccaagggaaatattagttttgacctatgtgggaaaaagaattttcaatga

SEQ ID NO: 76235 - DNA, 2916 bp, Saccharomyces pastorianus
atggaaggctcaacgggatttgatggagacgctactacttttttcgctccagacgctgtgtttggtgacagagtgcgcagatttcaagagtttttagatactttcacctcatacagagactctgtaaggtccatacaagtttacaacagcaataacgcggccaactacaacgatgatcaagatgacgcagacgaacgagatttgctaggtgatgacgacggtgatgatcttgaaaaggaaaagaaagcagcatcgtccacctcattgaatatactccctcacaggattatcatctcgcttgatgacttgagagaattcgacaggtcgttctggtcgggcattttagtcgaaccagcatacttcatcccgcctgccgaaaaggcgcttactgacctagcagattccatggacgatgttccacatcccaatgcctctgcagtatcgtctcgccatccttggaagctttcgttcaaaggctcatttggtgcacacgcattgtctcctcgtactctaacggcacaacatttaaacaaactggtctctgttgagggtatcgtaactaagacttcgttggtcaggccaaagcttatcagatctgtccactacgcggcaaagactggtagattccattacagagattatacagatgctactacaactctcaccacccgcatcccaacgcctgccatctatccaacggaggacactgaaggtaacaaactaaccaccgaatatgggtatagtacgttcatagaccatcagcgtatcactgtgcaagaaatgcccgaaatggcccccgctggccaacttcccaggtccattgacgtcattctcgatgacgaccttgtggacaagaccaagccaggtgacagagttaacgttgtcggggtattcaagtcgcttggtgctggtggcatgaaccagtccaactctaatacattgatcgggttcaaaactctgatcctaggtaatacggtgtatcctctccacgccagatccacgggtgtcgctgcgagacaaatgttgacagatttcgatataagaaatatcaataaactatccaaaaaaaaggacattttcgatatcttgtctcaatctttagcgccttctatttatggacatgaccatataaagaaagccattttattgatgctcatgggaggtgtggagaaaaatttagaaaatggctcgcatttaagaggtgacatcaatatcctaatggtgggtgatccatccactgcgaagtcccaattgctaaggtttgtgttgaatacagcatcactggcaattgctactactggtagaggttcttccggtgtcggtttgaccgcagcggtcactactgatagggaaacaggtgaaagaagactagaggctggtgccatggttcttgctgaccgcggggttgtatgtattgatgaatttgataagatgacagatgtggatagagtcgccattcatgaagtaatggaacaacaaacggtgacgattgccaaagcaggtattcacacaacattaaatgctcgttgtagtgttattgctgccgcaaatcccgtttttgggcagtacgatgtcaatagagatccacaccaaaacattgccctaccggactcgctgttgtctcgttttgatttactatttgttgtgacagacgatatcaatgaaatcagagatagatccattagtgagcatgtcttaagaacacacagatatttgcctccaggttatttagagggtgaacctgtgagagagcgtttgaatttatcattagccgttggggaggatgcagatataaatcctgaagagcattccaactccggggctggtgtagaaaatgaaggagaagatgatgaagaccatgtcttcgaaaagttcaaccccttattacaagcaggtgctaagttagcaaaaaacaaaggtaactataacggtacagaaattccaaagctagtcaccatcccattcttaagaaagtacgttcaatatgccaaggaaagggttattccacagttaacacaagaagccatcaatgttattgtgaaaaattatactgatttaagaaacgatgataataccaaaaaatcgcccattactgcaagaactttggagactttgatcagattagccacagctcacgccaaagtcaggttatccaaaacagtcaacaaggtggatgctaaagtggctgccaatctactaaggtttgcactattgggtgaggatatcggcaatgatatcgatgaagaggaaagtgaatacgaagaagctttgtcgaagaggtctccacagaaatcaccgaaaaaaagacaaagagtcagacaaccagtaagcaactctggatccccaatcaaatctactccaagaaggtcaacggcatcttccgttaatgccacgccatcgtcagcacgcagaatattacgttttcaagatgacgaacagaacgctggtgaagacgataacgatataatgtcaccgcttcctgcggatgaggaagctgaattacaaagaaggcttcaactggggttgagagtgtctccaagacgtagagaacatcttcacgcacctgaggaaggttcgtcgggacctcttaccgaggtcggtactccaagattacctaacgtatcttctgcaggtcaggatgatgagcaacaacagtcagttatttcttttgacaatgtggagcctggtaccatttctactggtagattgtctttaatctcaggtattattgcgcgtctgatgcaaacagaaatatttgaagaagaatcctatcctgtggcctctttgttcgaaagaatcaacgaagaactaccggaggaggaaaaattctccgctcaagaatatttagcaggtttgaagatcatgtcggacagaaataacttaatggttgctgacgataaagtttggagagtctga

SEQ ID NO: 76236 - DNA, 162 bp, Saccharomyces pastorianus
atgaggtggacgatgctgctttcttttccttttcaagatcatcaccgtcgtcatcacctagcaaatctcgttcgtctgcgtcatcttgatcatcgttgtagttggccgcgttattgctgttgtaaacttgtatggaccttacagagtctctgtatgaggtga

SEQ ID NO: 76237 - DNA, 315 bp, Saccharomyces pastorianus
atgacggattgtcgtttggctggctcaccaactaaacgttctccgtctttagtgaaagccactacagacggagtagttcttgagccttctgcattttcgataattctcggaactttaccttccataatagctaccgcagaattggtagtacctaaatcaataccgataactgcatctggaattttggttgactggaaacgggtcagaatacgaagtatattatgtgctttaaaggctttccatgatgggaacatgttacttgaatttaagttcttaattatgaccagtgaaatagttacaaatgctcttcggtaa

SEQ ID NO: 76238 - DNA, 1935 bp, Saccharomyces pastorianus
atgttcccatcatggaaagcctttaaagcacataatatacttcgtattctgacccgtttccagtcaaccaaaattccagatgcagttatcggtattgatttaggtactaccaattctgcggtagctattatggaaggtaaagttccgagaattatcgaaaatgcagaaggctcaagaactactccgtctgtagtggctttcactaaagacggagaacgtttagttggtgagccagccaaacgacaatccgtcataaactcagaaaacactttgtttgctactaagcgtttaatcggccgccgtttcgaggacgctgaagtccaaagagatattaatcaggttcctttcaaaatcgtcaagcattctaatggagatgcctgggtagaggctagaaacagaacgtactcccccgcccaaataggaggttttatcttaaataaaatgaaggaaacagcggaggcttacttagcgaagagcgtcaaaaatgctgttgtcaccgttcctgcttacttcaatgatgcccaaagacaagctactaaagacgcaggacaaattattgggcttaatgtattacgtgttgtcaacgaaccaacagctgctgccctagcttacggtctagataaatcagagccaaaagtcattgctgttttcgacttgggcggtggtactttcgatatttcaatcctggacatcgataacggtatctttgagggtaaatctaccaatggtgacacccatttgggtggcgaagattttgacatttatttgttgcaagaaattatttctcatttcaagaaagaaaccggtatcgatttgagtaatgaccgtatggctgtccaaagaataagagaagccgctgaaaaggctaaaatcgaactgtcttctacactctctacagaaataaacttgcctttcataactgctgatgctgcaggcccaaagcatattcgtatgcccttttctagggttcagcttgagaatataaccgccccattgattgatagaacggttgatcctgtcaaaaaagcactgaaagacgcaagaattaccgcctcagatatatcggatgttttattagttggtggtatgtcaaggatgcccaaggttgcagatactgtaaagaaattattcggtaaggatgcatcaaaagctgttaaccctgatgaagcagtcgctttaggggccgctatacaggctgcggtcttgtctggtgaagttaccgatgttttgttgctagatgtcactcccctatcattgggtattgaaactttaggaggagtttttacaaaattaatcccaagaaattctacaattcccaataagaaatctcaaattttttcaactgcggcatcaggtcaaacatcggtggaagttaaagttttccaaggtgagagggagttagtcaaggataacaaattaataggtaattttactcttgcgggcattcctccagctccaaaaggtatcccacaaattgaagtcacttttgatatcgatgcgaacggcatcatcaacgtttcagcaaaagatctcgccagccacaaagactcttccatcactgttgccggagcgtctgggctatctgatacggagattgatcgaatggttaatgaagcggaaagatataaaaatcaggatagagccagaaggaatgccatcgaaaccgctaacaaagctgaccagctagctaatgacacagaaaattccattaaggaattcgaaggtaagctagataaaactgattctcaaagactaaaagatcaaatttcatccttaagggaattggtttctcggattcaagctggagatgaggttaatgatgacgatgttggaacaaaaattgacaatttgcgaacttcatcgatgaaactttttgaacagttatacaagaacagtgacaatcctgaaactaagaacgggagagaaaataaataa

SEQ ID NO: 76239 - DNA, 939 bp, Saccharomyces pastorianus
atgcctcgtctcttggccacgcagtctcatgttgtacatggatatgtgggaaataaggctgcaacgtttcccttacagtgtctaggctgggatgtggattgttgtaacagtgttcagttttccaaccatacgggatatggtttagataaagtgtttgggactataacgagggaaacagatttgaaggaactcttatcaggtctttttgataatttttcccaagactaccaagccttactttcaggctacttgcccaataagaattccgttcgatgtatgggaacatactacgctaaatttaaagaggcgaatccagaaatgatatggcttatggatcctgttatgggtgacgaaggacaattatatgttagtgaggatgttataccagaatatagaaagctggctttgtctccaaaacagctagtcgatataataactccgaatcaatttgagctggagatactttatgggggggaaatcaagactaaagaacatttgaagaaggccttaaagagattacaccaaactatcccagtgatcattgtcacatcctgtgactgtaagatgtttgatgacaaagattttatttattgcgtagcttcaatggagggtaaaacccccattgtttacagagtgccgtttattgattcgtatttcactggggttggtgatttgttttctgctttgttattggatcgagtgtataagatcttatcgaaccctacaacaacattaaaatttgaagaccaagtcaataatgttcttaatgttattcagaaggttttgaaaattactaggagctatgcttcaggaaaaatgaaagcaaaaatgggttccgccttggaaatgaaagaaatggaattgcgtcttattgaatcaagagatatatatgaaacaatcaacattcatcaaacagattatatttacgcaaggttgtga

SEQ ID NO: 76240 - DNA, 462 bp, Saccharomyces pastorianus
atgaaaataacaataacaagccttctattttttcttgtcatgatcgtcgagctcgcaagtgcgggcacactacttcataatggtgcaaatttgccctcattacgtgataacaccactctaactgatgctcgtaatgtgttaaagtacttacaagtgcttggttttccaagcaacaaaatagcggctacagatactgttggaacttttatcatatttagcaatcgtacggaagctaacactaccgctatgacgaagacagtgtcatactgttatcgtaactacgggcatagtttctacttcactcattacaaatacgactattttcctagtgggattagttatatggcaaaacttggcgatgccaccgtcaaccatacggacttacctcactttaggaacaacaaacggctaacaacgcaagaactcaatgccttccaacatccaattgtcgagtttcagtaa

SEQ ID NO: 76241 - DNA, 483 bp, Saccharomyces pastorianus
atgactgaattgtgtcctgtctacgcccctttctttggtgccattggttgtgcctctgcaattatcttcacctcattaggtgctgcttacggtactgctaagtctggtgttggtatctgtgccacttgtgtgttgagaccagacctattattcaagaacattgttcctgttattatggctggtatcattgccatttacggtttagttgtttccgttttggtttgttattcgttgggtcaaaagcaagctttgtacaccggtttcatccaattgggtgccggtctatcagtcggtttgagtggtctagctgctggtttcgctattggtattgtcggtgatgcaggtgttagaggttcctctcaacaaccaagattattcgtcggtatgattttgattttgatttttgctgaagttttgggtctatacggtttgattgttgctttgttgttgaactccagggctactcaagatgttgtctgttaa

SEQ ID NO: 76242 - DNA, 381 bp, Saccharomyces pastorianus
atgtctgccccaaacccaaaggctttcccattagccgatgctgcattaacccaacaaatcttggatgtcgttcaacaggctgctaacttgagacaattgaagaaaggtgccaacgaagctaccaaaactttgaaccgtggtatctccgaattcatcattatggctgctgactgtgaacctattgaaatcctattgcatttaccattactatgtgaagacaagaatgttccatatgtctttgttccatctagagttgctttaggtagagcttgtggtgtttctagaccagttattgctgcttctattaccaccaacgatgcttctgctatcaagacccaaatctacgctgtcaaggacaagattgaaactttattaatttaa

SEQ ID NO: 76243 - DNA, 648 bp, Saccharomyces pastorianus
atgttaggaataagatcatctgtcaagacctgcttcaagccaatgtctttaacttccaaaagactgatttctcaatctttggtggctagcaaatccacgtacaggaccccaaattttgatgacgttttaaaggaaaataacgatgctgataaaggccgttcttatgcttactttatggtcggtgctatgggtcttttgtcatctgcaggtgccaaatcaaccgtagaaacctttatttcatctatgaccgctactgccgatgttttggctatggctaaagttgaagttaatttagcggctatcccattgggtaagaacgttgttgtcaaatggcaaggtaagcctgtgttcattagacacagaactcctcatgagattcaggaagccaacagtgtggatatgtccgctttgaaggacccacagaccgatgctgacagagtcaaagaccctcaatggttaattatgctgggtatttgtactcacttaggttgtgttccaattggtgaagccggtgattttggtggttggttctgtccttgccatggttcacattatgatatttccggtagaatcagaaagggacctgcccccttaaacttagaaattcctgcttatgaattcgatggtgataaggtcattgttggttag

SEQ ID NO: 76244 - DNA, 2049 bp, Saccharomyces pastorianus
atggatagcttcaattatattcatggaaaatataaaaaaaatgggacgggaggcgacagaagtataaatccatcctcacattcatcgtctggcaagaatatcattctttgttttgatggaacaagagaaaattttggacctcagccattcactaatattttaaaattgtacaaccttcttgagaacggtgatagttctgaacaaatttgttattaccaacctggaattggttcagttggatttgacgctgttgttgatgtcagaagacggttaactatttctcacttacaaaatttattagattctatgttcgcattcagtttagacaatcacatatgttctgcatatctttttttgatgaagtattttgaaccaggagatagaatttatatgtttggcttttctagaggagcttttattgcaagagttcttgctggaatgattgaaagagtcggacttttgagtaaaggtttggaagaaatggttaaaatggcatggcaaatctatgaaaaatgggaatacgattcgcagcctaatgaattacagtacacaagtaccttggctgaagaattcaagaaaacattctctagggattacgaggtaaagatacattttcaaggcttattcgattctgtgaactcagttggaatattaagggacaggttgtttccttgcacccagagaagcaatatcgttgagcatgttcgacattgcgtatccttggatgaaagacgtggaaaattcaagcagttatgtttcactccgatgccgtacattccgaaactattttcattgacatattgtaatcatataactgaccagtgttcgccggtgccaacttctaatgcattaatgcgtgatctaaccccggaaaatcctttgataaaatacactttaaaaagtggcgcacattctattagtaatccttctccactcattcctgataaccctggaaggttgttatcgagcaaaagcgaggaaactacagagttgttgttggacctgaactcattcttagaaggtaattcatacgcgagagatacagaatgttcaacaagaggaattgaagccattttccaacttcaatctattcaaggcagcggtacatcaagtagaatgactatgacacccgacttgattgaaaaatggtttccaggtgatcattctgacgttggtggaggttgggcgcctgactgtgagacagaagagaacttgtcaaatttaacgctgcgatggattttagcagaggcaatcaaatttggtgttaaattcaaacctggtgcaatacatgatttcgctaccaaacacacttcgattggatctttattcgcagacacacatgattaccttagtttcaactcaccaaagaaatgttccctactaggagtgagtgataatgaggatggagcccgagaggataaatctggcagaaatgagagaatggaagattgtctaaaaaatataaaagagactagattgagcttgaaagacgaaaaagaaaaagtgaaggatgcttttactcttaaatgtggacatgcaaataaattcatgagattggtgtggtgggtattggaactgctccccattggaatacgaatggaaaataaagaaggaaagtggcaaaattttcatacacctaacctcggaagatctcgttatgtacccgaatatgtcagtttacattggtcagtctattggagaattaagtttgatcgtaggtatagaccggacaatatgccggaatatgtaaggcaattgttccaagatttggaaggtattgatttaaaaagtaataaagtttcgaataaatatgataagcaagataatagcaacgggagtgaaatcaatgggggcttttttgataatgaggaagggcaggaactccacatgggtcaaaaagcaagttattttgcaacgacatacaattcaagattatttgacagtaaatactcccaattaaaaaagaaattcatggactgggatagtaattcctggacagatattccagatgatttaaaaatatacctacagcaagatgaatcgctttag

SEQ ID NO: 76245 - DNA, 804 bp, Saccharomyces pastorianus
atgtcgaaagctacatataaggaacgtgctgctactcatcctagtcctgttgctgccaagctatttaatatcatgcacgaaaagcaaacaaacttgtgtgcttcattggatgttcgtaccaccaaggaattactggagttagttgaagcattaggtcccaaaatttgtttactaaaaacacatgtggatatcttgactgatttttccatggagggcacagttaagccgctaaaggcattatccgccaagtacaattttttactcttcgaagacagaaaatttgctgacattggtaatacagtcaaattgcagtactctgcgggtgtatacagaatagcagaatgggcagacattacgaatgcacacggtgtggtgggcccaggtattgttagcggtttgaagcaggcggcggaagaagtaacaaaggaacctagaggccttttgatgttagcagaattgtcatgcaagggctccctagctactggagaatatactaagggtactgttgacattgcgaagagcgacaaagattttgttatcggctttattgctcaaagagacatgggtggaagagatgaaggttacgattggttgattatgacacccggtgtgggtttagatgacaagggagacgcattgggtcaacagtatagaaccgtggatgatgtggtctctacaggatctgacattattattgttggaagaggactatttgcaaagggaagggatgctaaggtagagggtgaacgttacagaaaagcaggctgggaagcatatttgagaagatgcggccagcaaaactaa

SEQ ID NO: 76246 - DNA, 198 bp, Saccharomyces pastorianus
atgatgcatgtttgttccttattggttagctttgatgttgtgaagtcattgacacagtctgtgaaacatctttctaccagattagagtacaaacgcatgaaatccttcatttgcttttgttccactactttttggaactcttgttgttctttggagttcaatgcgtccatctttacagtcctgtcttattgttcttga

SEQ ID NO: 76247 - DNA, 264 bp, Saccharomyces pastorianus
atggacgcattgaactccaaagaacaacaagagttccaaaaagtagtggaacaaaagcaaatgaaggatttcatgcgtttgtactctaatctggtagaaagatgtttcacagactgtgtcaatgacttcacaacatcaaagctaaccaataaggaacaaacatgcatcatgaagtgctcagaaaagttcttgaagcatagcgaacgtgtagggcagcgtttccaagaacaaaacgctgccttgggacaaggcttgggccgataa

SEQ ID NO: 76248 - DNA, 804 bp, Saccharomyces pastorianus
atggccttgaacgataatcctatacccaagtcagttcctctacacccaaaatcaggtaagtacttccataatttacatgcccgagacttatcaaatatatatcaacaatgctacaaacaaattgatgagaccataaatcaattagtggattctacatctccttccaccatcggcattgaagagcaggtcgcagatattactagcacctacaaactcctctcgacgtacgaatcggaatccaactcatttgacgaacatattaaagatttgaaaaaaaatttcaaacaatcctcagatgcctgtccgcaaatcgacctttctacctgggataaatatcgtaccggagaactcaccgctcccaaattatctgaattatatctaaatatgcccacaccagagccagcaaccatggttaataacacagatacattcaagatactaaaagtgttgccgtacatatggaatgatccaacttgtgtaataccggatctgcaaaaccccgcagatgaagacgatctacaaatagaaggtggtaaaattgaattgacttgtcctatcacctgcaaaccttacgaagcaccattgatatcaagaaaatgtaatcacgtcttcgatagagacggcattcaaaactatttgcaaggatacacgacaagagattgcccgcaagcagcgtgttctcaagtcgtttcaatgagggattttgtaagagaccctattatggaactaaggtgtaagatcgccaagatgaaagaatctcaggaacaggataaaagaagtagtcaagccatcgatgttttatga

SEQ ID NO: 76249 - DNA, 534 bp, Saccharomyces pastorianus
atgtgtggcgtagtcgtagttatagtagcactggtaccagcagatccacttttgccagcatttgcatgtggttgcagttgcgatgcaccggtctttataccgttcttcaatatctcatcctccatcatccttatttgttcgacctgcgttttcttgaatcgatcgtacttttcgtcaaggagcttctcgatatcatgcatttccaaaccgtgtagactaagttgtccatcgtttagtgttgttctgtactctgggaataaattcttaactatggtcaggatatcgttgatgcccagtttcctgtttccatttgccacgttgctttgccttcttaaatttgtcagctcgttgattagcaaattgttttgtatttcgttagtcaacttgactagcgatattcgaagattattcccaatcatgttgattcctcccccgttcctaaccagttcttcattcttgttggaaattaaagtgtgtattagctgcaacactaccaattcacttacctctttatccatctatgcgttcctttga

SEQ ID NO: 76250 - DNA, 840 bp, Saccharomyces pastorianus
atggataaagaggtaagtgaattggtagtgttgcagctaatacacactttaatttccaacaagaatgaagaactggttaggaacgggggaggaatcaacatgattgggaataatcttcgaatatcgctagtcaagttgactaacgaaatacaaaacaatttgctaatcaacgagctgacaaatttaagaaggcaaagcaacgtggcaaatggaaacaggaaactgggcatcaacgatatcctgaccatagttaagaatttattcccagagtacagaacaacactaaacgatggacaacttagtctacacggtttggaaatgcatgatatcgagaagctccttgacgaaaagtacgatcgattcaagaaaacgcaggtcgaacaaataaggatgatggaggatgagatattgaagaacggtataaagaccggtgcatcgcaactgcaaccacatgcaaatgctggcaaaagtggatctgctggtaccagtgctactataactacgactacgccacacatggcgcattcaatggacccaaaaagagaaaaactattgaaattatacagagataccgttctgaataaattggaaagtaaaactgggaattttcagaagctattcaagagtcccgatggtagcattatcaagaatgagataaattacgaagacataaagaatgaaacgcccggcagcgttcatgaactgcagctgattcttcaaaagagcataacggacggtgtaatgcgaaaggtcattggcacggacgactggaaattggctagacaagtgcagtttgaattggatgatacggtgcagttcatgagaagagcactagagtaa

SEQ ID NO: 76251 - DNA, 132 bp, Saccharomyces pastorianus
atgttgatgagcacgttaccaggtggtgttatcttagtttttattctagtcggtttggcttgtatcgccatcatttctaccattatctacagaaaatggcaagctagacaaagaggtttacaaagattctaa

SEQ ID NO: 76252 - DNA, 1017 bp, Saccharomyces pastorianus
atgccgaccaagtcaacttttagtcgctggaagaaggcggacctaattgacctggccaacaagctggaaattgacggcttccccaattatgccaagaagagtgatatgatcgattacctcgaatcgcacttgaatcatcttgagaaacctgtggattttaaagacgactacccggaactaaggtccttttatgagtcgatgacagtggaccagtcaaaggatgaacggaacgaatacggatccggatctggaaacgggtctgggtctggatcctgtgacaccgccacaaatgattccgatctggagaaagcgtacatcaaagaggatgatgatgagaaaccgcaatcaggcgatgaaacaagcgcgacaaagccgctttccagcaggaatgcaaattcaaacgccaaaacgaacttcaatttgttggattttagcacagataacgactcgtccacctctgcgtttactaagttcaagtttaactttcaggaatacctctccgatattagataccaaacgcagaaattgaatgaaaatgttcaggattatctttccactatttccgccgtcgatacgattttttccttgttggaattctcttttctggtgagaaacatattagccgccgggcagccaacttcttcttcttcttcgctcgcatcgtcgctggaagccgccgttgccgcccataataaatatcaatacacgctcgatttctgtttaccaatactcacgtggctgctcttctttaggggtattccaacgttagtgtcatactacatcaacttcatccgctacgacctaaacatcgagttggacccgatgactttcaatctcacgaaattcttgatttctttggcaattttcaaaacttgtaataataaaaacatagatttccattcttttcgatgtgttaaccaactatggacacaactctgtacagtgaaccgttcccttggtatggtacctctagtattctccatggttagttgtctcctcactctatacgtattatag

SEQ ID NO: 76253 - DNA, 1482 bp, Saccharomyces pastorianus
atgcttcttttcgagcaacctgttgaccttgaaaaaaataatgaagatgatacgaacataaaacctttcgcaatatcacgacattttttattgaaacttttgctttgcggtataatactcattgagttgcttttatattcgaagtgctcgaaacctattgataatggcccccggacaattgcgaatagatcaaatacttacttcaacggcacacatgatttcaagacgttaacgatattgatatctatcgatgggttccatccgagattgatagatgcaaaatacacgccatttctttacaacttgcacaatttgcggtccccgtacgatatgaatatcacgactgcaccgtatatgatcccaagttttcccactcagacatttcccaaccactggagcatggtaacgggaaaatatcccattgagcacggtattgtttccaatatattctgggataatttttcgagtagcgaatttagaccaaataacctcgacgcaagaatttggagcaacacggctgaccccatttggcaactactgcaaactgaatcgcaaggcgaatataaagtggccacgcatatgtggcctggaagtgaggttgtgtatgaggaccacggggatgtacctagggaaagaatgccattttattttgcgaaattcaatcaatgggaaaaacttcaagataaattagctcaaattttccgatacatagatatgcctcagcttaaagataggccagaattggtcataagttatatactcaatgttgattcgtacggacacagttttggatacgatttacgagataagcggctacaaaagctgatcggtgaagtcgatggattctttcacgatttgattgaaggcctgcaaaaaagaaacttgttgaaaattagcaatgttatgattgttagtgaccatggcatgagcaatgtcaacacgaatgacggtgagcatgttgttgtgtgggaaagggtgttcccggccgacgcaatgaccgcatttatatcgcatctttataacgagggccccatgatgatggtatgtttgaaaaaccctcgagacaagcaatggattcgtgacttgattgaagctcagttagagaaagcatatggagatgaaatatcgaggaagtttcacgtgatcctgaaagaagatttcgacccgagctggaaatatttccaatacgataacagaaagcacagatatgacgatagggtcggcgatatctggattctcgcagatgaacactacgccattgtaaaagaaatgggtgatgtgcctatcggcattatgggcacacatggatacaactttaacaactgtagtgatatggcatctatattcattggaatgggtccgatgttcaacaatgaagtcgtacctccatttgaaaacatcgaagtatacaatatgctgatcaaggcaagtgcgcttttgggagaagaaaaggcaaagaaggagaagagtttattacaataa

SEQ ID NO: 76254 - DNA, 303 bp, Saccharomyces pastorianus
atgacagcactattctgccttgaattgagaactaatatatttctaataatgaatgattgtattattatcaattactggaaagggttcattttttctttccactcgtatttttttccttttcgttttgagtcctccttaagggctcattacccgggaaagagaaattattcagatttttctgttataccgttaccttatatagatgttcgcagttttcatatttgtgagagccaacacattattgcattaccgctacagatcccacttccttaccgtatgcttatacgtatgtatccagtttag

SEQ ID NO: 76255 - DNA, 1737 bp, Saccharomyces pastorianus
atgggttcatgttgtagttgcttgaaagattcttcagacgaggccagtgtctcaccaattgccgataatgaaagagaagcggtgactttattactagggtatttggaggataaagaccaattagacttctactctggtggtccactaaaggccctaactactttggtgtattcagataatctaaatttgcaaaggagcgccgctctggcattcgcagaaattactgaaaaatacgtccgtcaggtctctagagaggtactggaacccatcttaatattattacaaagtcaagatccacagattcaagtggccgcttgtgcagccttgggtaatttggccgttaataatgaaaataaattattaattgtggaaatgggaggcttagagccattaataaaccaaatgatgggtgacaatgtagaagttcaatgtaatgctgttggatgcattaccaatttagctacaagggatgacaataaacataagattgctacttccggtgctttaattccattgactaagctagctaaatccaaacatataagagttcagagaaatgctacaggtgcattattaaatatgacacattctgaggaaaatagaaaagaattggttaatgcaggtgctgtgcctgtattggtatctttactgtcgtctaccgatcctgatgttcagtactattgtactactgctttatcgaatatagcagtggatgaagccaatcgcaagaagttggctcaaactgagccaagattggtttccaaattggttagtctgatggattctccatcttcaagggtaaagtgtcaagctactttggctttacgaaacctagcgtccgatacaagctaccaattagaaattgtaagggctggtgggttgcctcatttggtaaagttgattcaaagtgattctataccactggttttggctagtgtggcatgcattagaaacatttctattcaccctctaaatgaaggtttaattgttgatgcaggtttcttaaaaccattagtaagattgttggactataaggattcagaagaaattcaatgtcacgccgtatctactttgagaaatttggctgcatcatctgaaaaaaacagaaaagagttcttcgaaagtggtgctgtcgaaaaatgtaaggaactggctctagattcacctgttagtgttcaaagtgaaatttccgcatgttttgctattttagccctagcagatgtctccaaattggatctactggaagcaaatatcttagatgctttaatccctatgactttttctcagaaccaagaagtttctggtaatgctgctgctgctttggcaaatctatgttcaagagtgaataactatacaaaaattattgaagcatgggatcgtccgaatgaaggcattcgtggatttctgattagatttttgaaaagtgactatgctacctttgaacacattgcgctatggacaattttacaattgctagaaagtcataatgataaagtggaagatttggttaaaaatgatgacgacatcattaacggagtgagaaaaatggcagatgcgacctttgagcgtttacaaagatcaggaattgatgttaaaaatccggggagcaacaacaatccaagctcgaatgataacaacagtaataacaatgacacaggatctgaacatcaacctgtagaggatgcaagtttggaattgtataatattactcaacagattttacaatttttacattga

SEQ ID NO: 76256 - DNA, 2115 bp, Saccharomyces pastorianus
atgtacaacattccagataatgtcaaaggggctgtagaatttgatccatggttgaaaccgtttgccgatgtactttctgaaagaagatacctagctgacaagtggttgtacgacataactcatgctacgcctgatggttcgtatcagtcactcagtaagtttgctagagattcatacaagtcatatgggttgcatgccaatccggaaaccaaagaaatcacttacaaagagtgggcacccaatgcggaacgtgcatttctagtgggagatttcaataactgggataccacatctcatgagctcaagaacaaggacgaatttggaaattttacaatcacacttcatcctttacctaacggcgatttcgccatccctcatgattcgaagattaaagtcatgtttattttgccagatggttccaagatctttcgtttacctgcgtggattacaagggctacacagccttctaaggcaacttctaaacagttcgggcccgcatatgaaggtaggttttggaatccagagaacccctacaaatttgtacatccaaggccaaagtttagtgaatctgtagattccttaaggatttatgaagcccacgtcggtatttcgagtccagaaccaaagataaccacatataaagaatttactgagaaggtcttacccagaatcaaatatcttggctacgatgcaattcaattaatggctattatggaacatgcttattatgcatcatttggctaccaagtgaccaatttttttgcggcgagctcccgtttcggcacccctgaggaattaaaggagctgattgatactgcacattctatgggcatcctagttttattggatgtagttcatagccatgcttctaaaaacgtcgaggatgggttgaacatgtttgacggttctgatcatcagtatttccattctataagctccggtaggggtgagcatccgctgtgggattcccgtctttttaattacggaaaatttgaagtgcagcgattcttattagcaaacctggcattttatgttgacgtttatcagtttgatgggtttagattcgatggtgtcacatcaatgttatacgttcatcatggtgttggtgccggtgggtcttttagcggtgactataacgaatatctttctcgtgacaggtccttcgtcgatcatgaagccttagcttatttaatgttagccaatgatttggttcacgaaatgttgccaaatctggctgtaactgttgcagaagatgtctctggttatccaactttatgtttaccccgctccataggtggtactggtttcgactacagattagcaatggctttgcctgatatgtggatcaaactaatcaaggagaagaaagatgatgaatgggagatgggaagtattgtatacactttaactaatagacgatatggtgaaaaagtggttgcttattgtgagtcgcacgaccaagctttagttggtgataagacattagcgttttggttgatggatgccgctatgtacaccgatatgactgtattgaaggaaccatccatcgttattgaccgtggtattgctctacacaagatgattaggctgatcactcactcgctgggaggcgaggcttatttgaacttcgaaggtaatgagttcggtcatccagaatggttggatttccctaatgttaacaatggcgatagctacaagtatgctcgtaggcagtttaatttggctgatgatcccttactgcgttaccagaatttaaatgagtttgatagatcaatgcaattatgtgagaaaaggcataagtggctgaacacgaaacaggcttatgtttcattaaaacatgaaggtgacaaaatgattgtgtttgaaagaaataatctgttgtttattttcaacttccatcctacaaacagctacagcgattatagagttggtgtcgaaaaagctggtacttatcacatcgtgttgaactcagatcgtgctgaatttggtggacataacagaatcaacgaaagttccgaattctttaccaccgatttggaatggaacaacaggaagaacttcctccaagtttatattcctagtagagtcgctttggtgcttgccttaaaagaatga

SEQ ID NO: 76257 - DNA, 348 bp, Saccharomyces pastorianus
atggggaaatattcatcatgtagaatttcaaatattttcattgtaatttctaaaattaatgaggaaaattcgatatatctggtatcactttattatttcttcagcacgaaatgtcgagcgatctcgatgcaggaaccaggaataagtagcgatagtaaatttttttctctctttttaataatgcggaaagtctcagttgcgagtgattgcagacagttgtatgaatgtaataaagtaatgaaaacatttgggagtattcaaacggaggttagagacgaggcttcgagcttttctattattttaagtgctgtgtttccggacgtgctcttcactttcttattttcttga

SEQ ID NO: 76258 - DNA, 846 bp, Saccharomyces pastorianus
atgtccgaatatcagccaagtttatttgctttaaatccaatgggtttctcaccattggatggttctaaatcaaccaacgaaaatgtatctgcttccacttctaccgccaaaccaatggttggccaattgatttttgataaattcatcaagactgaagaggatccaattatcaaacaggataccccttcgaaccttgattttgattttgctcttccacaaacggcaactgcacctgatgccaagaccgttttgccaattccggagctagatgccgctgtagtggaatctttcttttcgtcaagcactgattcaactccaatgtttgagtatgaaaacctagaagacaactctaaagaatggacatccttgtttgacaatgacattccagttaccactgacgatgtttcattggctgataaggcaattgaatccactgaagaagtttctctggtaccatccaatctggaagtctcgacaacttcattcttacccacgcctgttctagaagatgctaaactgactcaaacaagaaaggttaagaaaccaaattcagtcgttaagaagtcacatcatgttggaaaggatgaagaatcgagactggatcatctaggtgttgttgcttacaaccgcaaacagcgttcgattccactttctccaattgtgcccgaatccagtgatcctgctgctctaaaacgtgctagaaacactgaagccgccaggcgttctcgtgcgagaaagttgcaaagaatgaaacaacttgaagacaaggttgaagaattgctttcgaaaaattatcacttggaaaatgaggttgccagattaaagaaattagttggcgaacgctga

SEQ ID NO: 76259 - DNA, 381 bp, Saccharomyces pastorianus
atgctcatgcactttattccccgaagatcttcgaaagcagttcaatttaattggctggagattggcgtttggagaggcggtgtgtatgtcaagaaaggcattgtcaacgcccggacaaataattctaatttttacaagatgccggtggtgttcggcattgtaaaaggtatgggtgctttgtgcgtccatgcatggggtatggggtatgggggcatcatcgattgttctccggtaacggaacacggcaatatttctgttctacagcttgaatacatgccgtggatctgtttatcaaagataatgtcatgtagcgtggcaagtcgacacagcaacgtgtggataatggatgagacgatagcgccactggttggttgtttgtaa

SEQ ID NO: 76260 - DNA, 93 bp, Saccharomyces pastorianus
atgacattatctttgataaacagatccacggcatgtattcaagctgtagaacagaaatattgccgtgttccgttaccggagaacaatcgatga

SEQ ID NO: 76261 - DNA, 1008 bp, Saccharomyces pastorianus
atgaataatggagacaataaaacgacattagaaaactcaaaaaatgcgtcactagctaatggaaattatgcgattcccacaaaactaaataggctgaaaaagaatgctgaccctagagttgctgcaatttcaggtgctttatctggtgcactatccgcaatgctggtctgtccttttgacgttgcgaaaacaaggttacaagcacaaggtctccaaaacatgacacaccaaagtcaacattataaggggttttttggtacatttgctactattttcaaggatgaaggtgctgctgggctttataaaggtctacagccgacggttttaggttatattcctactttgatgatttacttttccgtctatgatttctgtagaaaatattcggtcgatattttcccacatagtccgtttctctcaaacgcttcttctgcaattactgcaggtgccatctctacagttgcgacaaatccgatttgggtagtaaaaacaagacttatgctgcaaacaggtatcggtaaatattccacccattataagggtaccatagacacatttagaaagatcattcaacaagagggtgctaaggctctttatgccggcttagtaccagccctgctggggatgctgaacgttgctatacagtttcctttatatgaaaatttaaaaataaggttcggatattcagaatcgactgacgtatcgacagatgtgacgagctcaaactttcaaaaattaatattggcctctatgctatctaaaatggtagcatctaccgtgacttatcctcacgaaatacttcgaactcgaatgcaactgaaatccgatcttccaaatactgttcaacgccatctccttccattgattaaaattacgtataggcaagagggcttcgccggcttttactctgggtttgcaactaatttggtaaggacagtacctgctgctgtggtaacactagtatcgtttgaatattctaaaaagtatttaactactttttttcaataa

SEQ ID NO: 76262 - DNA, 849 bp, Saccharomyces pastorianus
atggtagcagacttaactaaaggtatactgaaatggaaatcaagaatagaatttgatgccgttggaagcagttcctattacgaagagttaaagggcttacctccccttgcatcccataaaaaattaacacaggctgctatcttcaatagcacgaagtatgagttattacaagtaaaaaaagacattctgtccatctatgaagttgtaagtagggacattgacgaggaacgcaatcagatgcagcaaattgaacttcaacttaaaaagtcgttaaaaaaggtagaacatagttacaaaaacgtcttaaagcaaagggcttctactaattgtatcaatggaaatgatcgtctattggccaatgcggaaaaaaaaattggctcgttaaatgaagaactcgcatgtgtcaatgatattgtttcagatattgttaacaatttgaccgcattgaatgcaaacctcccgaagaaggcacaattattgaaggatgactcaataaatgtggcacattatccacttctttttgatttcctgcataaatcttgcccgaagagtattatcgctactagtgaagctagcattcacgaaaatgcctcgccctctcctcttttagaacacgatgaattaccagcagagagcataaatagtttttacggggagaacgagctacagagtgattctttagctccacttcaaactcatgacgataacatatctagttgcaaaaaaatactacccccaaaattcaacacaacaagtggcccttcaattgaaactaattttgaaaatattagcgcagatggcctcacatacaccaaatgttctttaaaaaactcaatatctttgacttaa

SEQ ID NO: 76263 - DNA, 1029 bp, Saccharomyces pastorianus
atgtggaactcactaaaagcattcgctctagtgttcggaggttgttgctccaatgttattacatttgaaaccttaatgagcaacgaaacaggcagcattaataatctcattactttttgtcaatttttatttgttacatgtcagggactccccgaatttctggatgttcatcaacctttcccttacttcaagcctctgaaaactccacttcacgtttatgtcattactgtcgttttattttatatttcatctacgacgaataataacgtatttaaatacaacatatccattccgattcatatcgttttcagatgcttcggaaccgtaataaccatgtttacatgctggctattaaatggtaggaaatatacaaagattcagattttatcaacactatttttaaccattggagctataattgcctcattattcaaagatgctgattttcggtaccaagatttgaaactgcaagcgtggaaaattggaagtgaccaatctgtagatctcacttttatttttggcatttgtatactagtactttcatcattcacatcatctttactttcagcatacaatgaacgtacgtatcaaaaatatggaaagcattggaaggagaatatcttttacagtcattttttatcattacctctctttctatttagtcgaaagcagttaattcacgaatatcgagtgatgagaaagtctgaaagaatattgtgtttaaattttggagggaagattctagtcccgcgagaagaaactctccttcttttcaatgtgttaacacaatatttttgcgtcaagggtgttaatatcctcgccagtaaaacaaacgctctgacactttccataacattacttgtaagaaaatttataagtcttttactgagcgtccgacttttcgataataacttgtcatatactggctacatcggggtctacctagtcttttttggtgcctttatatactcgctgggatcaattcaccccaggcaaaatgacaagggggcgataaagaaaagtaaatga

SEQ ID NO: 76264 - DNA, 372 bp, Saccharomyces pastorianus
atgcatgtagccaattttatcttactaacaatctttgtgttttctctgtgtatagtctttcaagcaaaatataatgaatacaaacaaattttggaagaattgcaaacaaaaatcatagaattaggtcatgacaaagatgaacacactatagtcataaaaacactgaaagacgctgagccgacgagaaaatgttacaggatgataggtggcgcacttgttgaaagtgatgttcaaacgagtttgcctattcttgaaaccaagaaggaaaacatagaaggtacaataagtaaaatgaaagaaaccttaatacaaactgcaaaagagtttgaaaaatggaaaaaagacaataagattcaagtcgttaaaaactaa

SEQ ID NO: 76265 - DNA, 696 bp, Saccharomyces pastorianus
atgacatccgttagaaaaagaaagatgaatagatcttctgttgggaaagcaaccaggagaaacaaagacaaacaaagaaagattaacatccagtctaatccgattattgcagcaaattgggactattcactgacaatggcacaaaactataagaaattagggctaagggctaaattacaaacaccagcaggaggcaaagaggccgatttaagtaaagtagttaaaagaattccattaacgaagcctgtgttggatgaagatgaagatgaagatgaaggtgaggacgagcaaaatgattataatgcggctaccgtggagctcgatgaaaatgagataccagaaggtgaggcaaggatacagcgtgataagaatggtgatgttgtaagagttgtttacggtaagaaaaagaactttgatgctgatgaggatgttaacgaaataaaagctagggatactaccgaggagaccgaagtggttaagaaattagaagaacttgcgtctagaccagttatcagaaaggaacgtagccaaagtgaaagggaagaagaatggttggaaaaattatataagaaacacggtgatgattataaaaaaatgtttttcgataagaagctgaacatctaccagcaatctgagggtgacttgaaaagaaggttattaaggtggaaaaaaagaaacggtattgcatcaaaataa

SEQ ID NO: 76266 - DNA, 696 bp, Saccharomyces pastorianus
atgaatgggttggtattaggcgctacaggtttatgcggaggcggatttctgaggcacgcacaggaggcaccccagttctctaaggtatacgcgatcttgagaagggaattgccctttccggccactgataaagttgtggccatagtagaaagggataattcaaagtggtcacaattgatcaccaatgaaatgaatccgcaggtgctattcaccgcactggcaacgacaagagcagctgcaggcggtttggacaagcaatacaagatcgatcatgatttaaacttacaattggcccgggctgccaaggaaaaaggatgtgaaacgatcgttctcgtttcttccgctggtgctcatccggactccaggttcggctacatgaagatgaagggcgagattgaacgcgatgttatcgctcttgattttaagcacactataattttacgcccaggccctctcctaggtgaacggacaaattctaaacaaagcggatttggcggcaatctgactgctgctttgggcactcgcgtgtaccgttctagattccagaggttgctaggctatccagtttatggcgatgaggtaggaaaagttggtgttcatttggcgttgaatccttctgggaaagacaaggttcagtttgtctccagcaaggacattcttgacatctcagcttctctggagaagattgctacctaa

SEQ ID NO: 76267 - DNA, 1893 bp, Saccharomyces pastorianus
atgctcatagaaaacactaatgatcggtttggtatcgtcatagatgcagggtcttcgggttcgagaatccatgtgtttaagtggcaggacacggaatcgcttcttcatgcaacaaaccaggactcacagtccatattacaatcagtacctcatattcatcaagaaaaagactggactttcaagctgaatccaggcttgtcgagttttgaaaaaaaacctcaagatgcgtacaaatctcacatcaagccgttactagattttgctaagaatattatccctgaatcacattggtcgagttgtcccgtttttattcaagcaaccgcgggcatgcgccttttacctcaagacatacaatcttccatcttggatggtttgtgtcaggggctcaaacaccctgcagaatttttggttgaggattgctcagcacaaattcaagtcattgatggtgaaaccgaaggtttatatggctggcttggcttaaactatctatatggacactttaatgactataatccagaggtctctgaccattttacatttgggtttatggacatgggcggcgcctctactcagattgcgtttgcaccgcatgattcaggagaaatagctagacatagagatgacatcgccaccatcttcttaaggagtgttaacggagatttgcagaaatgggacgtttttgttagtacgtggttagggtttggtgccaatcaggctagaagaaggtacttggctcagttgatcaatacccttccagaaaacacaaatgattacgaaaatgatgacttctctacaaggaacttgaatgatccatgtatgccgcgaggaagcagcacggattttgaatttaaagataccatatttcacattgcgggttctgggaattacgaacaatgtacaaaatctatttatccgttacttttaaagaacatgccttgtgatgacgagccgtgcttgtttaatggtgttcatgctcctcgaatagactttgccaatgacaaatttataggtacttctgagtactggtacactgccaacgacgtattcaaacttgggggcgaatacaactttgacaaatttagcaaaagcctaagggagttttgcaattccaattggacgcaaatattagcgaacagtgataaaggcgtgtataattctattccggagaattttttgaaagatgcatgctttaagggcaattgggtccttaatatactacatgaagggtttgatatgcctcgaatagatgtcgacgcagaaaatgtcaatgacaggcccttatttcaaagtgtggaaaaagttgaagaacgagagttatcgtggacactaggcagaattttactttatgcctcaggtagcatattggcaggtaatgatgacttcatggtgggtattgcgcccagtgaaagaagaactaagctcactggtaagaaattcatacctggcaagttactggagcctgatcaactacgcaagcaaagttccagcctttctaataaaggatttttgatgtggttcgcaattatttgttgcatattttacttgatctttcataggtcacacataatcagaagacgtttttccggtctgtacaacattaccaaggactttaagacaggcataaggagaaggttgaaatttctaaggagatcagatccattttccagattggaggaaggtgaacttggaacagacgtagacagcttcaaagatgtgtacaggatgaagagtagcagtatgtttgatcttggtaagagttcagccacaatgcaaagggagcacgaaccacaaaggacagcaagtcagtccgctaatctcgctccgtcaaacttacgacctgcgttttctatggctgatttttccaaatttaaggacagtaggctatatgattga

SEQ ID NO: 76268 - DNA, 1563 bp, Saccharomyces pastorianus
atgagagtcagaaagcgccaatctagaagaacatctaccaagttgaaggaaggtattaagaagaaggcttctgcccatagaaaaaaggaaaagaagatggctaagaaggacgttacttggagatcaaggtctaagaaagaccctggtattccttctaactttccttataaggctaagatcttagaagaaatagaagccaaaaaaatgaaggacttagaggaaagagagcttgccaaacaacaacgattggaggctaggaaagctgccaaggaacaaggcgttgatgcaatggatgaagacatgatagaagacgatgaaaatggattagcagctttggttgagtctgctcagcaagcagctgctgaatatgagggcacaccctctaatgatgcagatgttcgtgatgatgaattggacgtcattgattataacattgatttctacggtgaagatgtagaaggcgagtcagaacttgaaaaatctaggaaagcttatgacaagattttcaaatccgttattgatgcttctgatgtcatcctatatgttttggatgccagagatccagagggtacaagatcaagaaaggtggaagaagccgtcttacaaagtcagggtaaaaggctgattttaatactgaacaaagttgatttaattcccccacatgtattggaacaatggttaaattacttaaagtctagttttcctacaatcccattaagagcttcttctggtgcagtcaacggcacttctttcaacagaaagctaagccaaaccactactgcaagtgcactgctagagtcgctgaaaacttactctaataacagcaatttgaagagatctattgtagtgggtgttatcggttatccaaatgttggtaaatcatctgttatcaacgctcttttggcgcgccgtggaggtcaatcaaaggcttgcccagtcggtaatgaagcaggtgttactacctctctgagagagatcaaaatcgacaacaagttgaagattctagattctcctggtatatgtttcccaagcgaaaataagaaaagatcgaaagttgaacatgaagctgaattagctcttctaaatgctctaccggcaaaacacattgttgatccgtatccagctgtcttaatgttggtaaagagactagctaaatcagatgaaatgacagagagctttaaaaagctgtatgaaattcctcctattcctgctaatgatgcagatacgtttacaaaacatttcttaattcacgtcgctcgtaaaagaggtagattagggaaaggcggtattccaaatcttgccagtgctggtctttcggtacttaatgactggagggatggtaaaattcttggttgggttttaccaaatgcatcggcagctgcatctcaacaagataaacaaaatctaagtactataaacactggcactaaacaagctccaattgcagcaaatgaatccaccattgtatccgagtggtccaaagaatttgatttggatggattgtttagctctcttgacaaggccatagatgctagcaaagatcaagatacaatgatggaataa

SEQ ID NO: 76269 - DNA, 318 bp, Saccharomyces pastorianus
atgttttccccggctgtgatcgtcccattccaccccataagcttttaccgaaggccacggcttaataacacctatgaatttgatggtgcaaaaatatccaccaatcttgagtctgtccccaatttcataagtcatgctatctctgcaattcgttttgcattttgtattttgtatatcttatatatgaaacataataaaagttggaactttttaatgatttctttgtccaaagagcaaaaaggcagtaaaactaaaaaaaataagatgtatagtaatgagtttaaaagcacacctataatttacagtaatgttatttga

SEQ ID NO: 76270 - DNA, 1557 bp, Saccharomyces pastorianus
atgacttatgaaattggggacagactcaagattggtggatatttttgcaccatcaaattcataggtgttattaagccgtggccttcggtaaaagcttatggggtggaatgggacgatcacagccggggaaaacattctggaacaatagatgacatacactattttgacgttcaaattcctaattcaggatcatttttgaaggagtctaagattaaatctccaggtgtacgcagaattacgttttacgaagcattgtcagaaaagtatggaggctcgagtaataacattaatgacctatctataggtaacaaaagggttgagggtttgggattcgatgaactaaatgcgagaaataagaattataagaagttaagaaaaatagctttgcgagattccgatgtcgctatattgtttcaaaatcaagatgagttaaaccgtgtaatacaaaattgtgtgaacgtcaaggaccttgatttatcgcttaatctattcacgaatatcaactctttatgtgagttcatagaacctttgaagaacttggagagccttaatatatctcaaaataaacttttaagcggttgggacaacttgaaagaatatgacctatcacacatcaaaactttacgtctgtcttcctgtggtttaagttataaacatattggtaagctgctcaaaagcttcaggacactgaaaatgttggatttaagctataacaacttgaccagtgcgggaatccaaaattttgagaatgaaataccgtgtactttagaggaactgaatattagcggaaataatcttatatcgtttccattgtttccaaaaaatttgacattgaaaggtttaaatgtctccaataatcaaatttctagagcaccaagtattgctatttattctgttgaatccttggatataacagataacaaatttaaggaaagaagtttgatagatgatttgaataagacatttccctctttgaaaaatatccatctgagtggcaacgaattcaactacaacggaaatgatattaacgtcgaagaacaggctactttttatgaagtactggctaggtttgatcgtgtgatggtattgaatggatcaatatgtgatgtaaaaacaagaagagaggctgagatgttttttgtttccaaggtaatgaataacgaattgagctatgacaccaatctgccgcgttggtcaagcctcataaagtcgtatgaaatcgatatgagtaagctaagtttcaacaatgaaagagaaacacggcaatctcttgtcttaaaaataaagataagagctggcaagaagccgagtagtgatttagattattgggtccttcccagttttacagtaaggtacgttaagagtgtaatatgtcgaaagctaaactttgacatactaaatgttaagttatttcatgaaaattctgaagggatgataaacgaaataaagtataattttcgccccatttcagattttaatgttgtgaacggagatattattcatgtttcgtctccagtaaataacaagagcattcagaaggttaacagcccatcgtaa

SEQ ID NO: 76271 - DNA, 378 bp, Saccharomyces pastorianus
atgtctctcgactttaacactttggcccaaaacttcacccagttttactataatcaatttgataccgatagaagccaattgggtaacttgtacagaaatgaatctatgctaacattcgagactagtcaattgcaaggtgcaaaggacattgttgagaaattagtatctttgccatttcaaaaggtccaacatcgtatcactactttggatgcgcaacctgcttccccaaatggcgatgtcttagtcatgatcactggtgatctgttgattgacgaagaacaaaatccacagcgtttctctcaagtgttccatttgattcctgatggaaactcttactacgtgtttaacgatatcttccgtttgaattactctgcttaa

SEQ ID NO: 76272 - DNA, 705 bp, Saccharomyces pastorianus
atgtcagatcttcaaaagttacagaggttctcaacctgtgatatttcggacggattgttgaatgtttataacattccaacgggtggttatttccctaatctaacagcaatttctccaccgcaaaatagctccatagtaggcactgcatacacagtactgtttgcacccattgatgatccaagacctgccgtgaactatatagactctgtccctcccaactcaatactcgtcctcgcactggagccccatttgcaaagtcagttccacccatttattaaaattacgcaagcgctgtacggggggctgatgagtaccagagcacaatatttgaaatcgaatgggacagtagtctttggacgcataagagatgtggatgaacaccggactttaaaccatcccgtttttgcttacggtgttggatcttgcgctccaaaggctgtcgttaaagccgtaggcactaacgtacagttgaaaatcttaacgagtgatggcgtaacccaaacaatatgtcctggtgattatattgcaggtgacaataatggaatagtacgcattcctgttcaagagactgacatttcaaaattagttacctatatcgaaaagtcaattgaagtggatttacttgtctctgaagatattaagaatggtattcccgccaaacaagctcaaaatgatcgaagatcagtattaaagaaatacatttaa

SEQ ID NO: 76273 - DNA, 711 bp, Saccharomyces pastorianus
atggcttacactaagatcgctttattcgctgctattgctgctttggcttccgctcaaacccaagatcaaattaacgaattgaacgttattttgaacgatgtcaaatctcacttacaagagtacatgagtttggctcaagatccttcctctggattttccttaagcagtatgccagctggtgttttggatatcggtatggctttagcttccgccactgacgactcctacactactttgtactctgaggtcgactttgctggtgttagcaagatcttgaccatggttccatggtactcctctagattggaaccagctttaaagtctttggatggtgatgctacttctaccgctgccccaagctcttctgctgctccaacttcttctgctgctccaacttcttctgctgccccaagctcttctgaagctaagtcttcctctgctgccccaagctcttctgaagctaagtcttcctctgctgccccaagctcttctgaagctaagtcttcttctgctgctccaagctccactgaagctaagacaacttctgctgctccaagctccactggtgccaagacctctgccatctctcaaattaccgatggtcaaatccaagctaccaaggctgtttctgagcaaactgaaaacggtgctgctaaggcctttgttggtatgggtgctggtgttgtcgcagctgccgctatgttgttataa

SEQ ID NO: 76274 - DNA, 597 bp, Saccharomyces pastorianus
atggatattattctgggcatccgtgtacaggattctgtcattctagcgtcttctaaggcagtcacaagaggtatttctgttttaaaagattctgatgataaaacgagacaattatcgccacatacattgatgagttttgccggtgaagctggtgacaccgttcaattcgccgagtacattcaagccaatatccaattatactccattagagaagattatgagctctctccacaagcagtatctagttttgttaggcaagaattagccaagtcaattaggtcgagaagaccataccaagtcaacgtattgattggaggctatgacaaaaagaagaacaaaccggaactatatcaaattgactacttgggtactaaagtcgaattaccctatggtgctcatggttactcggggttttacacattctctttactagatcatcattatagacctggcatgactactgaggagggtttagatttattaaaactatgtgtacaagagcttgaaaaaagaatgccaatggacttcaagggcgtcattgttaaaatcgtggataaagatggcataagacaagtagatgacttccaggcacagtga

SEQ ID NO: 76275 - DNA, 1620 bp, Saccharomyces pastorianus
atgttattaccattaacaaagctaaaaccgagagcaaaagttgctgttgtagggggtggcgtttctggactatgttttacttattttttaagcaagttgagaccggatgttgaaatcacactgttcgaatcgcagaacagaactgggggttggatatattcttgtaacacaagagatatgagtgggaacccaattatgttggagaagggacccagaacattgaggggcgtatcagacgggaccgttctgattatggatacccttaaagacttgggcaaggaagcagttattcaaagcattgataaaggttgcattgcagacaaaaagtttctactagaccccagtgataaactcgtgcaggttcctaattcgatatctacaacagtaaaatttctgctgaatccgttgggaaaaggactcatcacgggtatgatgggagaatggttcagaaaaaaatctccacatcctggccaagacgaaagtgtcgaatccatttgtgacagaaggtttgggaataactacatatcaaacaatatgatcagtgccttactaagaggtatctatggggatgacgtttccctattaagtgccaagagaacgtttaagaaaatatactacaatgaactaaagcacggatctaacacacaagctatgattgataatatgcgcggaaagtcaagaagtaaaaaaactgagaacctgcaccaatctttaactggctgccttaacgactactcaaatgcgtttggaaaagacaggtcaaagttattagacttatccaacacgctaaagaaatatcccatgttgggtcttgctgggggactagaaacgtttcccaagatagtcagaaatgctttgaacgaatttaaaaacgtcaaaatagttactgggaacccggttacgcaaataatgaaacgccctgctaacgaaacgacaatcggattgaaagcgaaatctggcgaccaatacgaaacatttgaccatttaagacttacgataacacctcccaaaatcgctaaattgctaccgaaggatcaaaattcattatccaagttattagatgagatacaatcaaacacaataattttagttaattattatttgccaaacaaagatgtaatagatgccgatctacaaggctttggatacttggttcccaaatccaataagaatccagggaaattgcttggtgtaattttcgattctgttatcgaaaggaatttcaaaccactttttgacaaactctccacaaacccaaacgccctcaacaaatatacaaaagtgactgcgatgataggaggttgtatgctcaatgaacacggtgttcctgtagtgccatccagggaggtaaccattagtgcagtcaaggatgcgctgaacaaccacctcggcatcagtaacaaggatctggaagctggtcagtgggaattcactatcgccgatagatgtctgccaagatttcatgtaggttatgacgcatggcaagaaagagctgaaaggaagttgcaagaatcttacggccaaacagtttctgtggggggaatgggattttctagaagtcccggtgtccctgacgttattgtagacggctttaacgacgccttacagctaagcaaataa

SEQ ID NO: 76276 - DNA, 2235 bp, Saccharomyces pastorianus
atggccgctccagattatgcacttaccgatttaattgaatcggatcctcgtttcgaaagtttgaagacaagattagccggttacaccaaaggctctgatgaatatattgaagagctatactctcaattaccactgaccagctatcccaggtacaaaacatttttaaagaaacaggcggttgccatttcgaatccggataatgaagctggttttagctcgatttataggagttctctttcttctgaaaatctagtgagctgtgtggataaaaacttaagaactgcatacgatcacttcatgttttctgcaaggagatggcctcaacgtgactgtttaggttcaaggccaattgataaagccacaggcacctgggaggaaacattccgtttcgagtcgtactccacggtatctaaaagatgtcataatatcggaagtggtatattgtctttggtaaacacgaaaaggaaacgtcctttggaagccaatgattttgttgttgctatcttatcacacaacaaccctgaatggatcctaacagatttggcctgtcaggcctattctctaactaacacggctttgcacgaaacattaggtccaaacacctccgagtacatattgaatttaaccgaggcccccattctgatttttgcaaaatcaaatatgtatcatgtattgaagatggtgcctgatatgaaatttgttaatactttggtttgtatggatgaattaactcatgacgagctccgtatgctaaatgaatcgttgctacccgttaagtgcaactctctcaatgaaaaaatcacatttttttcattggagcaggtagaacaagttggttgctttaacaaaattcctgcaattccacctaccccagattccttgtatactatttcgtttacttctggtactacaggtttacctaaaggtgtggaaatgtctcacagaaacattgcgtctgggatagcatttgctttttctaccttcagaataccgccagataaaagaaaccaacagttatatgatatgtgttttttgccattggctcatatttttgaaagaatggttattgcgtatgatctagccatcgggtttggaataggcttcttacataaaccagacccaactgtattggtagaggatttgaagattttgaaaccttacgcggttgccctggttcctagaatattaacacggtttgaagccggtataaaaaacgctttggataaatcgactgtccagaggaacgtagcaaatactatattggattctaaatcggccagatttaccgcaagaggtggtccagataaatcgattatgaattttctagtttatcatcgcgtattgattgataaaatcagagactctttaggtttgtccaataactcgtttataattaccggatcagctcccatatctaaagataccttactatttttaagaagtgccttggatattggtataagacagggctacggcttaactgaaacttttgctggtgtctgtttaagcgaaccgtttgaaaaagatgtcggatcttgtggtgccataggtatttctgcagaatgtagattgaagtctgttccagaaatgggttaccatgccgacaaggatttaaaaggtgaactgcaaattcgtggcccacaggtttttgaaagatattttaaaaatccgaatgaaacttcaaaagccgttgaccaagatggttggttttccacgggagatgttgcatttatcgatggaaaaggtcgcatcagcgtcattgatcgagtcaagaactttttcaagctagcacatggtgaatatgttgctccagagaaaatcgaaaatatttatttatcatcatgcccctatatcacgcaaatatttgtctttggagatcctttaaagacatttttagttggcatcgttggtgttgatgttgatgcagcgcaaccgattttagctgccaagcacccagaggtgaaaacgtggactaaggaagtgctagtagaaaacttaaatcgtaataaaaaactaaggaaggaatttttaaacaaaattaataaatgcaccgatgggctacaaggattcgaaaaattgcataacatcaaagtcggacttgagcctttaactctcgaggatgatgttgtgacgccaacttttaaaataaagcgtgccaaagcatcaaaattcttcaaagatacattagaccaactatacgccgaaggttcactagtcaagacagaaaagctttag

SEQ ID NO: 76277 - DNA, 1035 bp, Saccharomyces pastorianus
atgagtgcgggtatcggagaatcacgtacagagttgcttacatggttgaatggcctccttaacttgaattacaaaaaaattgaggaatgtgggacgggagcagcatattgtcaaataatggattcaatttatggagacttgccgatgaacagggtaaagttcaatgccacggccaaatatgagtttcaaaccaactataaaattttacagagttgctttagcagacatggaattgagaaaacagtgtacgttgataagttaatcagatgtaaatttcaagataatttagagttcttgcagtggttaaagaaacattggattcgacataaagatgaaagcgtgtatgatccagatgcaaggcgcaagtatcgtcccattataacgaataatagtgcaaccaaaccccgtacagtatccaaccctaccactgcaaagaggtcatcaagcacaggcactgggagtgccatgtcaggaggattagcaacaagacattcttcgctgggaataaacggtagcagaaaaaccagtgttacccaaggtcagttggtagcgatacaagcggaattaactaaatcgcaggaaacgatcggttcattgaatgaagagatagaacaatacaaaggaacagtaagtactttagagattgaaagagaattttacttcaacaaactacgcgacatagaaatcctggtccataccactcaagatttaataaatgaaggtgtttataaatttaatgatgagaccatcaccggccatggtaatggaaatgggggagcattattacggttcgtcaagaaggtggaaagtattttatatgctactgcagaaggatttgaaatgaatgatggtgaggatgaattgaatgataaaaatctgggtgaacatggaactgtgccgaatcagggcggctatgcgaacagcaatggcgaggtcaatggtaacgaaggtagtaaccatgatgtgataatgcagaacgacgaaggtgaggttggcgtgagcaacaacttgatcatcgacgaggaaactttttaa

SEQ ID NO: 76278 - DNA, 666 bp, Saccharomyces pastorianus
atggccagcatagacgcattttcggaccttgagcgccggatggacgggttccaaaaggacgtggcccaggtactggcacgtcagcaaaaccacgcgcgccaacagctgcaacagttccaagcggaaatgcgtcaattacataaccaacaccaacatctcatagatgaactgcaacggcttgccacccagcgcaccgctctgcagcaacaaatacatgcggcccaacaagctacaaataccaccagagcgcagtggagaagctatcacgagcgtgaatctgagttatctagacggcagtcgaccttagcagcccaatcgcgcgagctggactcgctgctgcaacagcgtggtaaagagtgtgtccaattacgcgcacgttgggctgcgcagtcgggtaacgatgccgcagaggtcgcactgtacgaacggctgttgcagcttcgtgtactacccggagccagcgatgtgcatgacgtacgtttcgtattcggcgatgattcacgctgctggatcgaagtcgcgatgcacggagaccacgtgatcggaaactctcacccggagctggaccccaagagtcgggcaacacttgagcacgtgcttaccgtccagggcgacctcgcggcatttttagtcgtggcccgcgatatgcttctggcatctttataa

SEQ ID NO: 76279 - DNA, 1434 bp, Saccharomyces pastorianus
atgtacaacagaaaagacagagatgttcacgagaggaaggaagatggtcaatctgagtttgaagcactgaacgggaccaacgcaattatgtccgataatagtaaagcgtattccataaagtttctgaccttcaatacatgggggttaaaatacgtctccaaacaccgtaaagaaagactcagagcaattgctgataaattggcgggccactcaacgcttacgccaatatctgacgagttgttgcccaatggtggagatagcaatgaaaacgaagattacgacgtgattgccttacaagaaatctggtgtgtggaagactggaagtatctagcttctgcgtgtgcctccaagtatccgtatcagcgtttgttccattctggtattctgacggggcctgggttggccatactgtccaaggtcccgatagagtcgacctttctttaccggttcccgataaacggtagaccgagtgcggtgttccgtggcgactggtacgtagggaaatctatagcaatcaccgtattgaacacaggaacccgccccattgcaataatgatcagtcacatgcacgccccatacgccaagcagggtgatgccgcctacttgtgccacagatcttgtcaggcctgggatttcagcaggctcattaagctttacaggcaggccggttatgcggtgattgtggtgggtgacttaaactccagaccgggctcactgccccacaaattcctcacgcaggaggccggcctggtcgactcctgggagcaattgcatgggaagcaagacttggcggtgatcgctcgtctgtctccattgcaacaattgctcaagggctgtaccacgtgcgattcgctgctcaacacatggagggcccaaagacagcccgatgaggcatgcaggttggattatgctcttatcgaccctgatttcttgcaaacagtagacgcaggtgtcaggttcactgaacggatccctcacctggactgcagtgtctctgaccattttgcatactcatgcacccttaacatcgtcccacagggcacagagtcccgtccatccacctccgttaagcgtgcgaaaactcatgatagagagctgatcttgcagagatactccaactacgaaaccatgatagaatgcatccacacgtacttgaagacagcccaaagacagaaatttttccgtggcctacatttctgggcctcaatacttctcctaatagcgtcgttggtcgtgacaacgtttactgcaaacaaggcaggctggtcctccatcttctgggtccttttcgctattgctgtctcaatctcgggcaccatcgacggtgccatctccttcttgtttggcaggtctgaaatcagagccctcatcgaagtcgaacaagaggttctggacgcggagcaccacctgcaaactttcttgagcgagaaatga

SEQ ID NO: 76280 - DNA, 267 bp, Saccharomyces pastorianus
atggcagcttcagttccaccaggaggtcagcgtatcttgcagaagagaagacaggcacaatccattaaggaaaagcaagcaaaacaaacgcccacttccaccagacaggctggttacggtgggtcttcaagctcaattttgaagttatatacggacgaagccaatggattcagagtcgactcccttgtcgtattgttcctatctgtcggtttcatcttctccgtgattgctttgcatctattgacgaaatttacacacattatataa

SEQ ID NO: 76281 - DNA, 1350 bp, Saccharomyces pastorianus
atgggtctctgcgcatcttcagaaaagaacggcagcactcctgacacgcagaccgccagcgctggtagtgacaacgttggcaaagcgaaggtaccaccaaagcaagagccacagaagactgtgagaacagtcaacacagcaaatcaacaagaaaagcaacaacagaggcagcaacagccgtctccgcataatgttaaggagcgcaaggagcaaaacgggagcattaataacgcgatatctcccacggctacggcaaacacaagcggatcgcagcagatcaatatcgactctgccctgagagacaggtcgagtaacgttgcagcacaaccatcattgtcggacgcttcaagtggcagcaacggcaaagaactgaaagtgctactgctgggtgccggtgaaagtggtaagtccacggtattgcagcagttgaagattttacaccagaacgggtttagcgagcaggaaattaaagagtacatccccttgatctatcagaatctattggaaattggcaggaacctcatccaggcgagaacaaggtttaacgtcaacttggaaccggagtgtgaactgacgcagcaagacctgtcgagaaccgtgtcctatgaaatgcccaataactacatgggccaattcccggaagatatcgcgggcgtaatatcgacgttgtgggccttgccctcaacacaagatttagtcaatgggcctaacgcatcgaagttctatctaatggactcgactccttacttcatggaaaatttcaccaggatcacttcgcccaattacagacccacccagcaggacatactaagatcgagacagatgacgtcagggatttttgacaccgtcattgatatggggtcggatatcaagatgcatatttacgacgtgggtggacagcgttccgaaagaagaaaatggatacactgcttcgacaatgtcactctggtcatattttgcgtttctctatcggagtacgaccagacgctgatggaggacaagaaccagaacaggtttcaggagtcgctggtgcttttcgataatattgtcaacagtagatggttcgcgcgcacgtctgtcgtactctttctgaataaaatcgatctttttgctgaaaaactaagcaaagtgcctatggaaaattacttcccagactacgccggcgggtcagacatcaacaaggccgccaagtacatactctggaggtttgttcagttgaacagagcgaatctaagcatatatcctcacgtgacacaggccacagacacgtcgaatataagattagtatttgccgccatcaaagaaacaattttggaaaatacattgaaagactctggagtgttacaatga

SEQ ID NO: 76282 - DNA, 861 bp, Saccharomyces pastorianus
atgacttacacattggcaattttaggctgcggtgttatgggccaagcacttctttccgccatttataatgctccaaaggcggctgatgaaactgctgctgcattttacccttccaaaattatcacatgtaaccatgatgaacctagtgcacatcaagttaccgatctagttgagacattcgacgaatctcctaacggtattaaagtcgaaagcacttacggtcacaacgtgagcgctgtcgaagaagcttctgtagttcttcttggtaccaagccatttttggccgaagaagtgttgaatggtgtgaagagcgtcattgggggaaagctacttatttccctggctgctggctggacaattgaccaattgagtcaatacactagcactgtttgtcgtgttatgacgaacacacctgccaagtacggatatggttgtgcggtggtgtcctactcagctgatgtttccaaagagcaaaagccactggtcaacgaattgattagccaagtgggtaaatacgttgagcttccagaaaagaacatggatgctgctacggctttagtcggttcaggccccgcttttgttctcttgatgttagaatccttgatggagagtgggttgaaattgggaatcccattacaagagagtaaggaatgtgccatgaaagttctagaaggaacagtgaagatggttgagaaaagcggtgctcatccatccgttttaaagcatcaagtttgcacaccaggtggtacaactattgccgggttgtgcgtaatggaagaaaagggcgtcaagagcggtattattaatggtgttgaagaggcagcccgtgttgcgtcacaattaggccaaaagaagaaatag

SEQ ID NO: 76283 - DNA, 213 bp, Saccharomyces pastorianus
atggcacattccttactctcttgtaatgggattcccaatttcaacccactctccatcaaggattctaacatcaagagaacaaaagcggggcctgaaccgactaaagccgtagcagcatccatgttcttttctggaagctcaacgtatttacccacttggctaatcaattcgttgaccagtggcttttgctctttggaaacatcagctgagtag

SEQ ID NO: 76284 - DNA, 2772 bp, Saccharomyces pastorianus
atgtcaagcggcagtactattgtttcgtctgacaagtcggagcgaacatttaagcatgaggaagaactacccaagttaccattacctaaactccgtgacactttgcagcgtctgaaggagagcttagagccattgtattatgctgatggttactatcaacatcctttagatccagaacaaattgagaagctgtcatccataataagagattttgaagagaatcccgtaagtgagaagctgcaatctaaactacagagctaccatgacactagggattgctaccttgatgaattacacttagacatcaataaccagacctccactagggagattcaggacgatgtcctacccaggaatcccttcttggttctcgcagatgacgctttgccaaacatcactcaagctgataggtcagccgtcctagtgcactctgcggccaggtttatttctgctttgaaacaagatttgttgccaccagatatcaatgccaccaatggcaaaccactgtcaatggctccatttctgaacttgttcggtactactcgtagtcctgtttttcagcgcggtgaggttgaaaattttgatttgaacaaaccttacacagcatctgatttagaagaccctgattattcaagcgatgaggacgataacgacgaacccacccaaaaagactttgatgaccgtaaaagaaaacacgaagaagacatattcgctggcaatggtataactataaaaagacatccggatagcaaacacatcttgatcatctccaggggccaatactatacactggaagtacttgattcgacgaataaaattatatacactgctgcagaattaaccacaattttcaaccatataataaaagattcttctggcattgaaaaatcaactgcgttaggtagtttgacctctcactcttttagaaactggaaatatgcaaggaagagactacagaaaaggtatcctaatgaattacatcgcatagactctgctctgttcgtgttagtgctggacgagtcacaagaagaaaccaccaatgatggtgatgataccgctgatatcagtcaaatgtttaacaggaccatcactgagcgagacaagaaatgtacttccgccaattgtaagagagtgttttacggtacttctataataaatagcaaaggccatcaagtgggttcatgtgtttctcgttggtatgataaattacagttagttgtcactgcagatgcaaaagccacagtgatttgggattccttcacatgtgacgggtcagtcgtgcttcggtttacttctgaaatttatacagaatcagtcttgagattagctagagacgttaacgccggtgacccacagttttcactctggcctaacgtgacacaaatggatcctgaaactaaaaaactgatgacggcgaccataagtgccgacggcggaggcccttctgaaattgaccctaagttggttgtaaataaaatcgattggtctttcagtaacatcctgaacacacatgtccatttgtcagaaaccaaactagctgatctgatttccaagtatgatattgttcgcgcttctattccattgggcagaaggtcagctcaaagattaggagtcaagcccgattcgatggttcaagtagctttacaaatagctcactatgctttgtatggaagaatggtgtttggattagaaccagtatccacacgtggtttcaaaaactcgagatcatcttttattaacattcaaagtcaagcgctgttggaactatgtcaattgtttatttctagctccattgatgggacaggtaaattagacaaatttatccaaacctgcgaaacacataataacatggttaaacatgcaaagtctggggtaggctatgaaaaacacttcaatgcattgaagtatctcttcaaatttcatgaccattttggtatccacttaagtggtgatgaatcatctgctgcgaaagatcttttcgaaaatccacttgttttacctttctcacagcctgagttgattgttgccaactgtggtaatgctgctaccacgacatttggtataactcctgctgtacctcatggctttggaatagggtacatcattaaagatgatcaagtagatttgaccgtgacatcgcaatttcgacagggtgacaggttaatgtttatgttaagttgggtgttaggcgaaattcgttcctactggaggatgtcacgcggcacttctcataataaaactggcgtgaagatcagtccagtggtcgataaattgtatgaaatggacaatgcagtcaataatcctccgaaacgtaacggtcatacagtcaatggttcccgcaaaacatcttcttcatcacaggtaaatttgaacaggtatggcgggtttttcgatttggaaggccacattgacagtaggaatatatctaaaacaccatcgatgaagaatttgcagaaaaccttcaatggcttgaccatgagcgcagacaatgatcattcaagttccgcagtttccgttcccacagaaaaggaaaaattaaatacaggccatgaaattttacagatccaaccgcgggaagtggcaagtaatgggttggaagcagatgatgagacagatattgaaatagttgctggcaatgctgatggcacatcctcttcggcatcttcagctacatctctaaattccaagaaacgtaacgtcatcaactcaagattcgatattgattttgaccgcagtcgtgtgggtagaaaggtggcgaccttagatcaataa

SEQ ID NO: 76285 - DNA, 1584 bp, Saccharomyces pastorianus
atgagtgacttacaagaccaagaacctagcattattatcaacggtaatttggaaccagttggtgaaccagatatcgttgaagaaacggaagttgtagctcaagaaacacaagaaacacaagatgctgataagccaaagaagaaagtcgccttcactggcttggaagaagacggggaaactgaagaagaaaaaaggaaaagggaatttgaagaaggtggtggtttgcccgaacaaccattaaaccctgatttttcaaaattaaacccactatccgccgaaattatcaacaggcaagctacaataaacatcggtaccatcggtcatgtcgcccacggtaaatccacagtagttagggctatttcaggtgtccaaacagtccgttttaaggatgaattagaacgtaacattactattaagttaggttacgctaatgctaaaatttataaatgtcaagagcctacatgtcccgaacctgattgttatagatcattcaaatctgataaagaaatcagtcctaaatgtcaaagaccaggttgtccggggcgttacaaattggtccgtcacgtttcttttgttgactgtcccggtcacgatatcttaatgagtactatgttatcaggtgctgctgttatggatgctgcgttactgttgattgcaggtaatgaatcttgtccacaacctcaaacctcagagcatttagctgccattgaaatcatgaaattaaagcacgtcatcatcttacagaataaggtcgatttaatgcgtgaagaaagtgccttagaacaccaaaaatccatcttgaagttcatcagaggtaccattgctgacggtgctcctattgtaccaatatccgctcagttgaagtataacatcgacgcagttaatgaatttattgtcaagactattcccgtaccaccaagagattttatgatttctccaaggttaattgttattcgttcatttgatgttaataagccaggtgctgaaatcgaggacctgaaaggtggtgttgccggtggttctatcttgaatggtgtcttcaaattaggtgatgaaattgagattagaccaggtattgtcaccaaggatgataagggtaaaattcaatgtaaaccaatcttttctaacattgtctccttatttgccgaacaaaatgacttaaagtttgctgttcccggtggtctgattggtgttggtactaaagttgatcctaccttgtgtagagctgatcgtcttgtcggtcaagtcgtcggtgctaagggtcatttgccaaacatttatactgatatcgaaatcaactactttttgctacgtcgtctattaggtgtcaaaacagatggtcaaaagcaagccaaagtcagaaaattagagccaaatgaagttcttatggtcaacattggttctaccgctacgggtgctcgtgtggttgccgttaaagctgatatggcaagattacagttaacgtcgcccgcttgtactgaaattaacgagaagattgctttgtcgagacgtatcgaaaagcattggcgtttgattggttgggcaaccattaaaaagggtactacattggaacccatcgcttaa

SEQ ID NO: 76286 - DNA, 831 bp, Saccharomyces pastorianus
atggttgaatcagatgaagatttcacacctcaagaattcccacacacggacacagacgttatcgtaaatgaacacagagacgaaaatgatgggtatgcctcagatgaagttggtggcacattaagcagaagagcctcaagtatattttctataaatacaactccattggctccccctaatgctactgatatccaaaaatttacaagtgacgaacatcatttcagcatgatgaggaatttgcatatggcagattacattactatgctgaatggattttctgggttttactctattgtaagttgtctgagatttacgcttacaggtaaacctcattacgtccagcgtgcccatttctttattttattgggtatgtgtttcgatttccttgacgggagagtagcacgtctgagaaataggtcttccttaatgggtcaggaactggactctttggccgacttggtttcctttggtgtggctccggctgcaattgcttttgccattggattccaaactacattcgatgtcatgattttatctttctttgtcctttgcggcttagcgagattagcaaggtttaatgtcaccgttgctcaattacccaaagattctagcacaggtaaatctaaatattttgaggggttgcctatgccaactactctagctttggtgttgggtatggcatattgtgtcagaaagggtttcatttttgataacatcccattcggcatttttagagaagaccaaatattggaatttcatccaattatcctagtattttttatccatgggtgtggaatgatttcgaagagcttgaaaattccaaagccatag

SEQ ID NO: 76287 - DNA, 591 bp, Saccharomyces pastorianus
atgagcaaaatacaggtggcacatagcagccgactagccaaccttattgattataagctgagggttctcactcaagatggccgcgtttacatcgggcaattaatggcatttgataaacatatgaatttagtgttgaatgagtgtatagaagagagggtacccaaaactcaactagataaattaagaccgagaaaagattcaaaagatggaaccactttgaacatcaaggtagaaaaaagagtgttgggactgactatactaagaggagaacagatcctatccacagtggtggaggataagccgctactatccaagaaggaaagactagtgagagataaaaaggaaaagaaacaagcgcaaaagcagacgaaactaagaaaagagaaagagaaaaagccgggaaagatcgctaaacctaacacggccaatgcgaagcatactagtagcaattctagggagattgcccaaccatcgtcgagcagatacaatggtggcaacgataatatcggcgcaaataggtcgaggtttaataatgaagcgccccctcaaacaaggaagtttcagcccccaccaggttttaaaagaaaataa

SEQ ID NO: 76288 - DNA, 3231 bp, Saccharomyces pastorianus
atgcggtctttcataaaagcccataagaagtccacgtcgtttgatgaaagccccaagcgacatagcaacttcagtggcaatattaataatagttctcaaaggtcaagtgatgactccttagactttctaccatctacaccatcacaaatgaattacgatagcattccaccacccgcgaaacactcacctggatttgagtctttccatcgtttggctaacaagacttcaaagttgttcaagaaaacttcaaactcaaacttaaactcgcatttagcttcaactccaaccacaagcacaaatcagactacttcaaattcatttgttctccaaaatccacccacaaaaaatactggacctccgccgccattaccaccgccgctctttccttcctcttctacctcttccttttcacgtcatgacaatgaaagtgaatatactgcatataaaaaaacttctcctgcaaaagattttaatagaaccacagactctctgcctgctattaagggcacaattactcattcgtggggagattccaaggtcgaatcgcacgtaataatattaaacgatcctgcttccccagcatcaaacacatctgaagcgacttcttctaaacaattcaaaacccctatcattggcaatgaaaatctaacttcaactgcatcaccatctaacctggaacctgccataagaatattgaacaagaacaagggtaaacagcaggaaaatatcgacgatgctgaggacgggtcatctaagaaggaacatcatgtttataaagcattagcgcttgccaaaaatagaaacagacaagcaagaattcattctcatgatgatataataaatttgggaaaggcttctcaaatggatatgagtctactagccgctgcgttttccggaaattcaaccaccaccattaataatgaccaatcttctaatgaacaaaccgatgagaaaatattagacatcgaaagagtgaccactacttccactttaacctcttccgaaaccacatcaccaataaacaagtcaccttgtttttatagtcaaacactttccctctcaccaaagatacgacacagcgacttacaatcatcaccttcaaaagtgaacaaaaacgatagtcaaaacgagaccttgaacaagaaaaaagtaaggattagtcttaatagaaaagaagaaaaaaaggtgtattccctcaacaacaattccgatgaatactctgtcaatgaaaaagaaacccataaagccaacgattgtaatgacgaatcttctgaaaacggtgatggcgataatgatcatgatgatgattatgatgacgatgatgatgacgatgatgatgatgatgagtcggaattttcgtttgaatatgccggcataaacgtaaggacatcatctgtaaagtattactccaaaccggaaccggcggcaaatgtatacatagacgatctatatgaggatgagaactttgatgacgatatgaattgtatagaagatgatgagagtggtaatgagggaaacgaaatatgcggtttatcgactcgattcgaagaaacatccttgaaaagcaataaagtcaaaaagttcaatgatctttttaacttgagcgatgatgatgaggaggaggatggtaaagataacagtaacaatggagatgaaaatgagagtgataatctttatcaaaaacgattagaaaacgggaaagaaacttttaatggtaaccatggcggacaccatgatgatgcatctcttggagaaacggttgacaacaaagagcagtttctaataaacgataatgtcaagaagcctattcaaaaatacaatgaccttttcgatttgtctgatgaggacgataacgacgacaaagagatgtcagaagctgagtcttatatgttttccgatgaagctcctagtatagaaagtggaccagcaaatgcaaaatcaacacgggggatctatagtcaatctaacaaaaatatcatacgtgatggaaagccgaactatagtttctctctcaaaaggaataattcggatgatgaaacggagcacacttctgcaataaaggcttcccttacaggtactactggctctaccaagcctacagtaaagtcgttttcagatatatttaatgttgatgatagtgcaagtgacgctgaaagtgattctgggacaggagggaacaattctaacggcttagtatccaatgattcagaaaggcaggtctccctgcaaagttctttgtatgaaaccaaatcagaatcccatcctcccaatcatcctcattcgcagattcttcaaacaccggctaagattgtaataactccaagcgtttctgatgcgcaatcacaagcccttgcaatcaccgatgatgatggtgaagatgatgatgatgacactagtagcatactaggaactccgtttcaacttattgattcctctcattcacagcagccgcactatgcgagcccacagtatacggctgtactcaatagcccccctcttccgccgccagctaggtctcaatcactaaaatatcatgacttaaattgcgatttagattcagaagtccccagaccaatgagtaatctctttttcattgatgaagctgaggaagacgaatacaatcagaaaagtaagttttttgatttcgaccactacgacatcgatgaaattaatggcatcccagaggattttaacttctctgattctgaaagagatgatcttaatcgtcgtacactgaaatctcctttacggggcggctccaagaatagagaagtctctcctttttcatctgtgtcatcgtctttcagaagtacgcatagttttaatgggaaattaacgatcaaccaaggggctaaagaattagctccgatgaaaaataagattgaacttacaaacaagactgtcaccttctttaacagtaataattggaatacttatgactgcaattcactctcccgaaaaacttcatcccaaatgagagatagtaaatatcaaaatcataatgttggtcaaaacgtagaaccttcaagtgttcgttcgccacaacatcaaatatcgaatggtttagatggaaaatgcaatgataactacgtaatctcaccaaatttaccgacaactatcacaccaactaattcatttactaaacccacaccggagttctcaaatgactactcattaagccctattcaggagacaccatcttctgttcaaagctcgccaaagagagcgtga

SEQ ID NO: 76289 - DNA, 438 bp, Saccharomyces pastorianus
atgggttccgagacaaaacattctgcaaaagtcaagattgtcacaagggaaagtcctccttccgccaaggagcacatgcgccccactaaaactcaaatattagttccaccgacgcagagtttgcccaatggcaagaaaccaaacttcggtaagtctacaaaacagcggcgagaacctagggaacgcacctcgaagacgggacacgaggacgataaggcaacgatggtcactgttaacatagatgccttcctacatgataaggcccctaaaaaaaaatcgtgcaaatacaagaagaagaaaacgagacagtaccaggatagggcggcggcgtcgatcgattcgaaaccgcacgtagctggtcatacggcctttgccggtgcttcgttcacaacagatatcccacatgaggcagcgctacccaaacctagttttgtttga

SEQ ID NO: 76290 - DNA, 966 bp, Saccharomyces pastorianus
atgactatcgctaaagattacagaacaatttatagaaaccaaatcaaagatcagatacgactaaatcaggagcatttgcaaagcttgacacatctaggctcacaaatcaatttcgaggtggatcctcccaaattaccggatccggatcctgctcgaaaagtatttttctttgatatcgataacactttgtacagaaaatctacgaaggtacaattgctcatgcaacaatcattatcaaatttctttaaatacgaattggggtttgacgacgatgaggcagaacgcctaatcgaatcgtattatcaagaatatggattatccgtgaaaggtttaataaagaataaacaaattgatgacgtcctacaatataatacattcatcgatgattccttacctttgcaagactatttaaagcctgattggaagttaagggagctgctgatcaatttaaagaaaaagaagctcggcaaatttgacaaactatggctgtttacaaactcgtacaaaaatcatgccatcagatgtgttaaaatattaggtattgctgatctatttgacggcataacctattgccactacgatagacccatcgaggaagaatttatttgcaaaccagatccaaaattcttcgaaacagctaaattgcaaagtgggttgtcgagctttgcaaatgcctggtttattgatgacaacgtaagcaatgtgcggagcgcgttgagcatggggatggtccatgttatccatttgatagaggattaccaatatgagtcagaaaatattgttactaaggaccacaaaaataagcaacaattttccatattgaaagatatccttgagattccattgataatggacgttgaagtttaccgtccatcctctattgccataaaggaaatggaagagttggaagaggaaggggaagcagtcaactggtcaaatcaacagatcaatgttcagtcatcatga

SEQ ID NO: 76291 - DNA, 1395 bp, Saccharomyces pastorianus
atgggaagcgtgaactcatcaccgaatgaagagtttgaaactgtgccagattcacaaatttcagggtttgattctcctttgataccgactagtgtgggaagttactttcgcgatgacgatgacgatgagaaggtgcatcccaactttattagtgatcctgagaacgacagtttgaatagcgacgaagagttttctagcctagagaacagcgatttgaatctttctggtgccaaggcggagtctggagacgattttgatccaatcttaaaaagaaccatcatttccaaaagaaaggcaccaagtaataacgaggatgaggagattgtcaagacacccagaaaattagtcaattacgtgcctttaaaaattttcaatctaggtgatagcttcgacgatacgatcactactacagtggccaagctacaagacttgaaaaaagaaatattggattcacctagaagcaacaaaagcatagttattactagtaacactgtagccaaaagtgagttacaaaaaagcataaagttttctgggtctatcccagaaatttatttggatgtggttaccaaggaaaccatatcagataaatataaagattggcatttcatctctaaaaactgccattacgagcaattgatggatttggaaatgaaagatacggcgtattcattcctgtttggtagtagtagatcgcaaggaaaagttcctgaatttgttcacttgaaatgcccaagcatcacgaatttactggtcttatttggcgtcaatcaagaaaagtgtaactcgttaaaaatcaactacgagaaaaaggaaaattctagatatgataatttatgcacaattttccccgttaacaaaatgctcaaattcctaatgtatttttatagtgatgatgataatgatgatgttagagaattctttctgaaagccttcatatgtttaatcttggatagaaaggtttttaacgctatggaatcggaccatagactgtgttttaaggtcctggaattatttaatgaggcacatttcataaattcatatttcgaaattgtggacaagaacgacttttttttacattataggctactacaaatcttccctcatttacaaagcgccttgctcaggagacgctttagtgaaaagcaaggtcggactgaaactatacagcaaaatataatcaaagagtttaacgaattttttgattgtaaaaactataaaaatctactatattttattttaacgatgtatggctcgaaatttattccttttggtcccaaatgtcaagtaacagaatatttcaaagattgtattttggatatttctaatgaaacgacaaatgatgttgaaatttctatcctgaagggaatattaaatttgttttctaaaatcagataa

SEQ ID NO: 76292 - DNA, 381 bp, Saccharomyces pastorianus
atgtactacttctcaagagtagctgctagaactttttgctgttgtatctttttctgtttagccacagcgtacagcaggccagacagaaatcctagaaagatagaaaagaaggacaaaaagttttttggagcgtcaaagaacaccaatcccgccaacgctatgggcaatttgttcaaagcaccaaccatagaatacgttgtagaggaagttacacgaacacaccagccggaacagtacgatatccccacggacatgagcccactgatgaccattgctgccagtgagtcggcggacaagttcacagacaaactctttgtggaccaatcttccataatgaaggaaaagactagcagcaaaggcaatgccagaacgttgttataa

SEQ ID NO: 76293 - DNA, 555 bp, Saccharomyces pastorianus
atgtcgtcgcttatttcaaaaaccattaagtatgatccagccaaggataaattaatcacattagcatgtggatgtttttggggtacagaacatatgtataggaagtatttgaatgaccgtatagtggattgtaaagtaggttacgctaatggagaagagtctaaaaaggatagcccctctagtgtctcttataagagagtttgtggtggtgacacagattttgcggaggttttacaagtatcctataatcccaaagtgataactttgagagaattaactgatttcttttttagaatccatgatcctactacatctaattcacaaggacctgataaaggtacacagtatcgcagtggattgttcgcccattcagatgctgatttaaaagaattagccaaaataaaggaagaatggcaaccaaaatggggtaataagattgccacagttattgaaccaatcaagaacttttacgatgctgaagaataccaccagttatatttagataagaatccacagggatatgcatgccctactcattatctgagagaaatgtag

SEQ ID NO: 76294 - DNA, 1350 bp, Saccharomyces pastorianus
atgtctgctccagctcaaaactacaaaatcgctgatatctctttggctgccttcggtagaaaggaaatcgaattggctgaacatgaaatgccaggtttgatggccatcagaaaggcttacggtgacgtccaacctttgaaaggcgcccgtattgctggttgtttgcacatgaccattcaaactgctgttttaattgaaactttagttgctttgggtgccgaagttacctggtcctcttgtaacatctattcgactcaagatcatgccgccgctgctattgccgcttccggtgttccagtttttgcctggaagggtgaaactgaagaagagtatttgtggtgtattgaacaacaattgtttgccttcaaggacaacaagaaattgaacttgatcttagatgatggtggtgatttaaccactttagttcatgaaaagcaccctgaaatgttggaagactgctttggtctttccgaagaaactaccaccggtgttcaccacttatacagaatggtcaaagaaggcaagttaaaggttcctgccattaacgttaacgactccgtcactaagtccaagtttgacaacttgtacggctgtagagaatccttagtcgacggtattaagagagccactgatgtcatgttggctggtaaggttgccgttgttgctggttacggtgatgtcggtaagggttgtgctgctgccttaagaggaatgggtgctcgtgtcttggttaccgaaattgacccaatcaacgctttacaagctgccatggaaggctaccaagttgttaccatggaagatgcatcccacattggtcaagttttcgttaccaccactggttgtagagatattatcaacggtgaacatttcatcaacatgccagaagatgccattgtttgtaacattggccatttcgatatcgaaattgatgtcgcctggttaaaggctaacgctaaagaatgtattaacatcaaaccacaagtcgaccgttacttgttgtcttctggtagacacgtcatcttgttggctaacggtagattagttaacttgggttgtgctactggtcactcatctttcgttatgtcttgttccttctctaaccaagtcttagctcaaattgctttgttcaagtctaacgataagtctttcagagaaaagcacattgaattccaaaagacaggcccattcgaagttggtgtccacgttttgccaaagatcttggatgaagctgtcgctaagttccacttgggcaacttgggtgttagattgactaaattgagtaaagtccaatctgaatacttgggtattccagaagaaggtccattcaaggccgaccactacagatactga

SEQ ID NO: 76295 - DNA, 447 bp, Saccharomyces pastorianus
atgttcagcctacaagacgtaataactacaaccaagaccaccttggcagcaatgccaaaaggttacttaccaaaatggttacttttcatttccattgtatcagtcttcaattctatccagacttacgtttctggtttagaattgacacgtaaagtctacgaaagaaaacccactgaaacaacccatttgagtgcaagaactttcggtacttggacctttatttcctgtgttatcagattctatggggctatgtacttgaatgaaccacacattttcgaattggtcttcatgtcttatatggttgccctattccacttcggctctgaattattgatctttagaacttgtaagttgggaaagggattcatgggtccattggttgtctcaaccacctctttggtttggatgtacaaacaaagagaatactacactggtgttgcttggtaa

SEQ ID NO: 76296 - DNA, 1470 bp, Saccharomyces pastorianus
atggactataagcataattttgctacaagtccagattctttcctagatggaaggcagaacccactcttatatacagattttctatcttcaaacaaggagcttatatacaaacaaccatcgggtcctggtcctgtggattctgcttacaattttcatcaccaaaacagtttgcatgaccgtagcgtgcaagaaaacctgggtccaatgtttcaaccctttggcgtcgacatcagccatcttcccatcaccaaccctcccatttttcaaagttctttaccagcgtttgatcagcccgtgtacaaaagacgcatatctatctccaatggtcagattagccaattaggcgaagacttagaaacggttgaaaatctttacaactgtcagcctccgattctatcgtctaaggcgcaacagaattccaatcctcaacaggtggcaaatctaagcgcagccacatacccaagctttagctcgaacgaattgcaaaacgtgccacaaccacacgaacaagctacagtcatacccgaagctgcacctcaaacaggtagcaagaatatctacgctgcaatgaccccgtatgatagcaatataaagcttaacatacccgcagtagcagccacttgtgacattccttctgccacgccttctatcccatctggcgattccacaatgaatcaggcttacatcaacatgcaactccgattacaagctcaaatgcaaactaaggcatggaaaaacgctcaattgaatgtgcatccatgtactccagcttctaattcttccgtttcctcttcttcttcctgccaaaacattaatgatcataatatcgaaaatcaatccgtccattcttcaatttcccatggcgttaatcaccacactgttaataattcctgccaaaatgccaagttgaatatttcaagcagccttccatacgaatcgaaatgccctgatgtcaatttaacacatgccaactcaaaaccacaatacaaggatgccacttctgcactgaaaaacaatattaatagtgagaaagacgtacataccgcgcccttctcttctatgcacactacagcaaccttccaaataaagcaggaagctagaccccaaaaaatagagaacaatactgcaggattgaaagacggtgctaaagcttggaagcgtgcaaggctactagaacgaaacagaattgccacttccaagtgtcgacagagaaagaaaatgtcacaattacaacttcaaagggaatttgaccaaataagcaaagaaaacacaatgatgaagaaaaaaattgaaaattacgaaaaattggttcaaaaaatgaagaaaatttcgaggttgcacatgcaagaatgcacaattaatggtggtaataatagttatcaaagccttgaaaacaaggatcgtgatgttaacgggtttctgaaaatgattgaagaaatgatacgcagctccagtctatatgatgagtaa

SEQ ID NO: 76297 - DNA, 432 bp, Saccharomyces pastorianus
atgggcaaaaaccatttcttgaaggatttctctgctttaccggaggacgtactcatagaaaacgagagaggcataactttacttggttacccactattttctcccaagattttactgccccacgttgacccaccacaatttcaaagactaaacactgaaaatggctcgttgattgccctgtcgaaaaatactgtatcgaacttcatagaactgtatcctatcgatctgagtactgaacgcactgcaggcagtagcagttcacagatgacaaaatggttcgtactgatggattacaaggaaaagtacgatattgacgatcaaggatggtgttatagctggaatttcaataactctaggtggaaatcgaaaaatggcttggtgagaagaagggtctgggtaagactacctacgaccagtcatggattagattag

SEQ ID NO: 76298 - DNA, 285 bp, Saccharomyces pastorianus
atgcctggatttacagctccaacaagaaggcaggtgttgtctttatacaaggaattcatcaagaatgctaatcaattcaataattacaacttcagggaatactttttaagtaaaacaaggactactttcagaaataacatgaatcagcaagacccaaaagtgttaatgaacctatttaaggaagctaagaacgacttaggtgtcttgaaaagacagtctgttatttctcagatgtacacatttgacaggctggtcgtagaaccattgcaaggaagaaaacactaa

SEQ ID NO: 76299 - DNA, 1935 bp, Saccharomyces pastorianus
atgaagagaaaaactgctgaagttaaaggtgagaaggagagaaattccaaacaaatttccctcgaagaggacaagataaagggtatgttcaaccctaaaatctgggacaagactttccaggatggcttgaaaaaggaaattgaagactctcagccttacaactggggtactattcatgaattggttaatgacgatctactacgtgctgttcgtaaagaaatagaaactgagatccatttcactaaaaaagaaaccgatatctatagagtcaaccaaagtggtgacttggccaatttgtctggtctggactgggatgacttgtcccgtttgcctaatttgttcaaactgcgccagattctgtattccaagcaatatagagatttttttggctacgtcaccaaagctggtaaattgtctggttctaagaccgacatgagcatcaacacttacacaaagggatgtcacttgttgactcatgatgacgttattggctctagaaggattagtttcattttatacctaccagatcccgacagaaaatggaaatcgcattatggtggtggtctaagactttttccaagtattttaccaaacgttccacattccgatccatctgctaaactagttccacagttcaatcaaattgcttttttcaaagttttaccgggtttctctttccacgatgtcgaagaagtcaaagttgataagcacagattatctattcaaggatggtaccatattccacaagttggcgaagaaggttacatacctggtgaagaagaagcgtgggtccgtaacaacacatccactttggcgcagattgaatctaatgtcctagaagattttgaatttccaaaggacgagagaaatattttatcatttcatgaagtgaagcactttgaaaaaatgctcaagggcgctgctggcgcaaaaactgataacacacctaaagaatctatgactagtgtgatttctgattcggttaagttgtctgaagccgagttcacctatctatctcaatacatctctcctgaacatttaagctcgaaaggtatcgaaaaactacaaaagcagtttgttgagaactcttctctacaaattgagtcgtttttaaatgacgataaatcagaattgttaaagaaggttatcaaacaaaaagagttggaacaggaatgtccttatcattcaaaagatgtgaaagctccgtggaaaacggctattcctccacacaaagcccgttatttgtacatcgacggtaaggaataccgtaatttccaaacagaagctgatattcttgaggcgctgaataacaatgatttgccaaactttcagtttactaaggacgcaattaaaattatctccgatgcttccggaaatagtagggaaaacaattttgatgcagaattagcgttgattgacctagctgtatttcacaagagcacaattttcaagaaatacctagctcttctaacttctttgtgcccagtcagtgagcaaatccttattagaaggtttaggccaggaatggatttcacattggccaccaaatgtcgctttaatgaacttttgaaaagcaatccagatataatcgatgctgtcttggaaggtactttgtgcttgacaccttctgccggttgggaatccggagagcttggtggttacgaattgtacatgatggacgacgacgaagataataagcaatacttaaaggaagacgttgaagacgcttctgtttatcgtgcggatgacagtggtgattcagtattgattaatgatccacctgcttggaatactttcaatttggtcttgagagatgaaagtgttttggagtttgttaagtacgtcagctggagcgctaaatctagtagatgggatgtcaaaatgaagtgggatgtcaaatcatgtgatgaagatggtcaggaagatgaagcgtaa

SEQ ID NO: 76300 - DNA, 1479 bp, Saccharomyces pastorianus
atgcaagatcccaatatttgccagcattgccagttgaaggataatccaggcgcattaatttgggtgaagtgtgatagttgcccgcagtgggtccacgtgaaatgcgtgcctttgaaacgcattcactattcaaatcttacaagttctgaagttctgtcttatccaaattctgcgaagcaaatcaagagctaccgttgtcctaatcataaggaaggagaatatcttaccgcatacgctctcatcacacaaaaaggaaagcggcaaaggaataaagaaaaccctgaagatagtcatataaataagcggtataatttcagaaagaagaaattacttgactatatcgctttgaatgagggtgaatcgaaaagggataaaatgaatcaccctcataaggagagtttcatgaaatcttttgaaaaatggaaaaatggctcaaatattataaacgccgctgactttgctgaaaagtttgataatatagatgtgccgtacaagatcatcgatccactgaatagcggagtatatgtaccgaatgtgggcacagacaatggatgcctcacagttaattatatcaccgaaatgataggcgaggattatcatgttgatgtaatggacgttcaatcacaaatgaatgaaaattggaacttgggatcttggaatgaatattttacaaatattgaaccagacaagagggatcgaataaggaatgttatatcattagaagtctctaatatagagggattagaactagagaggcccactgcagttaggcagaatgatcttgttgataaaatttggagtttcaatggacatttagaaaaagtcaatggggaaaaggcggaggagaatgaccccaagccaaaagtgaccaaatatattttgatgtctgtaaaggatgcttatacggattttcatttggattttgccggtacctctgtttattataacgttatctcaggacagaagaagtttttattatttccacctacccaatcaaacatagataagtatattgagtggtctttaaaagaagaccaaaatagtgttttcctcggtgatattcttgaggatggtattgcgatggaattagatgctggtgatttgtttatgattccagctggatatattcatgcagtttatacaccagtagactctttggtatttggaggcaactttttaaccatccgtgatttggagacacaccttaaaattgtggaaattgaaaagttaacaaaggttcctagaagatttaccttcccgaagtttgatcaagtgatgggtaaattatgcgagtatcttgcgcttgataaaaataaaatcactagtgatgtcagtgatggggatttgctttccaggaccactaattgcgcaattcaatcacttcatgcatacgttataaaacctgaagttaagtacaagccgttaaatttcacttcaaagaagcatttagcgaaagctttagccgatcttatttcgtaa

SEQ ID NO: 76301 - DNA, 1584 bp, Saccharomyces pastorianus
atgccaatggatttccaacctacatcaagtccttcgaactgggtcgtgcaaaagttcggtggtacatctgtcggtaaatttcccgtccaaatagtggatgacattgtgaagcactattctaaacctgacggcccaaacaataatgtcgctgtcgtttgttccgcccgttcttcatacaccaaggctgaaggtaccacttctcgtcttttgaaatgttgtgatttggcttcgcaagaatctgaatttcaagacattatcgaagttatcagacaagaccatatcgataatgccgaccgcttcattctcaatcctgccttgcaagccaagttagtggatgataccaataaagaacttgaactggtcaagaaatatttaaatgcttcaaaagttttgggtgaagtgagttcacgtacagtagatctggtgatgtcatgtggtgagaagttgagttgtttgttcatgactgctttatgtaatgaccgtggctgtaaggccaaatatgtggatttgagccacattgttccctctgatttcagtgccagcgctttggataacagtttctacactttcctggttcaagcattgaaagaaaaattggccccctttgtaagtgctaaagagcgtatcgttccagtctttacagggttttttggtttagttccaactggtcttctgaatggtgttggtcgtggctataccgatttatgtgccgctttgatagcagttgctgtaaatgctgatgaactacaagtttggaaggaagttgatggtatatttactgctgatcctcgtaaggttcctgaagcacgtttgctagacagtgttactccagaagaagcttctgaattaacatattatggttccgaagttatacatccttttacgatggaacaagttattagggctaagattcctattagaatcaagaatgttcaaaatccattaggtaacggtaccatcatctacccagataatgtagcaaagaagggtgaatctactccaccacatcctcctgagaacttatcctcatctttctatgaaaagagaaagagaggtgccactgctatcaccaccaaaaatgacattttcgtcatcaacattcattccaataagaaaaccctatcccatggtttcctagctcaaatattcaccatcctggataagtacaagttagtcgtagatttaatatctacttctgaagttcatgtttcgatggctttgcccattccagatgcagactcattaaaatctctgagacaagctgaggaaaaattgagaattttaggttctgttgatatcacaaagaagttgtctattgtttcattagttggtaaacatatgaaacaatacatcggcattgctggtaccatgtttactactcttgctgaagaaggcatcaacattgaaatgatttctcaaggggcaaatgaaataaacatatcctgcgttatcaatgaatctgactccataaaagcgctacaatgtattcatgccaagttactaagtgagcggacaaatacttcaaaccaatttgaacatgccattgatgaacgtttagaacaattgaaaagacttggaatttga

SEQ ID NO: 76302 - DNA, 903 bp, Saccharomyces pastorianus
atggagtccaataaacaaccacgtaaaatccaattatatacgaaagagttttatgccacatgtaccttaggtggtataattgcgtgcggtccaacacattcttcgatcactccactagatcttgtcaaatgtaggctacaggtcaatcccaagttgtatacttcaaacttacaagggttccgtaagattatagctaatgaaggctggaagaaagtatacactgggtttggtgctacattcgtcggatattcgctacaaggtgcaggtaagtatggtggttatgagtatttcaagcatttgtattctagttggttaagtcctggtgtcactgtgtacttgatggcctcagcgaccgctgaattcctcgctgatatcatgttgtgcccatttgaagctattaaagtgaaacagcagactactatgccgcccttttgcaataacgttgttgatggatggaaaaaaatgtatgcagaaagtggaggtatgaaagcattttataaaggtattgttcccctatggtgcagacagattccttacacaatgtgtaagtttacctcattcgaaaaaattgttcaaaaaatatacagtgttttacctaaaaagaaagaagaaatgaacgcattacagcaaatatcagtcagttttgtaggtggttatctggcaggtatattatgtgctgcagtctcacatcctgcagacgttatggtttccaagatcaatagcgaaagaaaggccaacgagtccatgtctgtagcctctaaaagaatatatcataaaattggctttactgggttgtggaatgggttaatggtgagaattgtcatgatcggtactttgacaagtttccaatggctaatttacgattcgttcaaggcttatgtaggcttaccaaccaccggttag

SEQ ID NO: 76303 - DNA, 114 bp, Saccharomyces pastorianus
atgcaagatttagagatttttttgagtattttcgctttcattttcgttttctactttggtgctcatagaacagtcatgaacagaaacaagagcgatgttccttacttgcagtga

SEQ ID NO: 76304 - DNA, 894 bp, Saccharomyces pastorianus
atggatttggtgaaccatctaaccgatagactactgtttgcaatcccaaagaaaggtcgtttatattctaaaagtgtttctattttgaatggtgccgatattacctttcaccgctctcaaagattagacattgcactaagcacaagcttacctgtagcgttgatctttctgcccgctgcagatattccaacttttgttggtgaaggtaaatgtgatcttggtataactggtgttgaccaagttcgtgaatctgacgtcgacgtagacttagcaatcgatttgcaatttggtaactgtaaattgcaggtacaagtccccgtaaatggcgagtataaaaagccagaacagttaattggcaaaaccattgttaccagtttcgtgaaacttgctgaaaaatactttgccgatttggaaggtactactgttgaaaaaatgaccacaaggataaagtttgtcagtggttccgtggaggcatcatgtgctctgggaattggtgatgctattgtagatcttgtagagagtggtgagacaatgagggcagcaggtttagttgatattgccaccgtcctcagcacaagtgcctacctaatagaatcaaagaacccaaagagcgataagagtttgattgctactatcaaatcaagaattgaaggtgtcatgaccgctcaaaggttcgtttcatgtatttataacgcacctgaagacaagctgcctgaactgttgaaggtgacgcctggccgtagagcaccaaccatttccaaaattgacgatgaaggatgggttgctgttagttccatgattgagagaaaaacgaagggtgttgttttagatgaattgaaaagactcggcgcatctgatatcatggttttcgaaatttctaattgtcgtgtataa

SEQ ID NO: 76305 - DNA, 390 bp, Saccharomyces pastorianus
atggtcaccacgctaactcccgttatttgtgaatccgctccagctgctgcggcttcatactcccatgccatgaaagtgaacaatttgattttcctttctggccaaattccagtgaccccagacaacaagttagttgaaggttccattgctgataaggctgaacaggtgattcaaaacattaagaatgttctagaagcaagcaattcctcattggacagggtcgtaaaagttaacattttcttggcagatatcaatcactttgctgagtttaactccgtttacgccaagtacttcaatactcacaaacctgccagatcatgcgttgctgttgcagcattgccattaggcgttgacatggaaatggaagccattgctgccgaaagagattaa

SEQ ID NO: 76306 - DNA, 324 bp, Saccharomyces pastorianus
atgagtagggctagcaagataacgtttgcagcttcctgtctgataacggcagcgacggtagtgggcgtgcattatgtgcaagaaatggaaagggaaactttgcatcagggtccgataaaagatgctaaacgagtcgaagaaaagaggttgagaaagacaaacggagctgcatcattagatcccacaaaagaaaggaaaaggtacttcaatatgagtgaacacgaggaacaaaaagagttgcgaaagaagtatgagactatgcaaccgcttagtggagaagttgtgaccaaagatggagaggtggttaaagaatctaagaaataa

SEQ ID NO: 76307 - DNA, 1263 bp, Saccharomyces pastorianus
atgtctatcaaaggtgattccccctcatcaacaaatgccagtagtagtctgaagtctacatattcaatacaatcggatgataaagcaaaccttggcagtggtaacgtcgatatacgtacagataattcacaacaggacagtaataatagacgcgatattgtggtagtgacgagggtagcttctgaagagactttagaatcacaatcatctacttcatcaatgggaattagaccagaatcatcttttaactatgaggatgcttctaaccaagctagggtcgaaatgaataacagggtacatggctcaaatatgaacacaattaacaaatattatccagtacgattcccaaagaataacgaaaggcaattgagcgacacaaataatttaaatgagaaagtgcaaggcacacatacagttcaatcatccacccaggaagacaaaatactcgacggtgacacaagcaactcacaagtaaccccgtctttgaacattgcagagtttcccacagacaagcttcttaaaatgctgacagcgttactaactaaaattattaagtcaaatgataggacggcagcgacaaatcctagtttgacacaagagattgagaatggtaggtgtcttgctttaagtgacaatgaaaagaaatacttaagccccgttctggggtttagagggaagcacgtaccacaaattggtcttgaccaatatttccagaggatccagaaatattgccccacaacgaatgatgtatttttatcgctcctcgtgtactttgatagaatatccaagagatgcaatagtgtcactacgacccctaaaactaatactgcaaaacatgaatctccctcaaatgaaagctctctagataaagctaacaggggcgctgacaaaatgtccgcatgtaacagtaacgaaaataatgaaaatgacgattcagatgatgaaaatacaggagttcaaagggattcaagggctcatcctcaaatgttcgtaatggattcacataatattcacagattaatcatagcaggtattactgtcagtacgaagtttctgagcgatttcttctatagcaattcaagatactcaagggtaggagggatatctttacaagaactcaaccatttggaactgcagtttctagttttgtgtgattttgaacttttgatatcagtcaatgaattgcagagatacgcggacttactatacaggttttggaacaacgcaaaagctcaatcgcaagcactagttacgggcatgtag

SEQ ID NO: 76308 - DNA, 1587 bp, Saccharomyces pastorianus
atgcctcaaacgcacgaaatgtccctgaacggcactcaatacttaaaatatgaacttaaagaccttgagtctcgagctcacgatgcaaagactccttcaacaaatgaattctatgatgatgtagaattgcacggaacagaagaattagttgaagctaaactgtcgtttttgaacagaattgctgctggtttaagtgccgagacaaagggtattgaaccgattacagaagatgaaaaaactgatgattctatactgaacgctgcatctatgtggttttcagcaaatatggttctgcccgcttatgccattggcgccctagggcctatgatgtttgatctaaatttcggccaaagcgttttcgttattattttctttaacctcttaggcttggtatcagttgctttcttttctgttttcggtgcagagctgggcctaagacagatgattttgtctagatatttagttggcaatatcgcagccaggatcttctctttcatcaattttattgcctgtatcggttggggtatcgttaataccgtagcaagctcgcaagtcctgaatatggttaaccccggtcatcaatgtcctctctgggctggttgtatagttattatcggtgctactgtaattgtaacttttttcggctatggagtcattcatgcttacgagaaatgggcgtgggtaccaaattttgccgtttttttggtaataattgctcgtttggcaaggtctaaaaaatttgtccttggggagtggacatctggtcctactacagcaggtaacgtgctttcatttggatcaacagtttatgggtttgctgcaggctggacaacatatgcggctgactataccgtttatatgccaaggaaaacgaacaagtataaaatttttttctcgcttgtagttgggttagcaacaccattatattttactatgatacttggtgcagctgtagcaatggcagctatcggcgatccagcctggaagacgtattatgacgaaaattccataggtggtttaacttttgccgttcttgtccctaattctgttcacggattcggtcagttctgttgcgtgttattgtctctgtccactatcgctaataatgttcccaacatgtatactattgctttatcggtgcaagccacgtgggaacctcttgcgaaagtcccaagagttatttggactttattaggcaatgcggccgcactgggtattgccattcctgcctgctactatttttctgccttcatgaattacttcatggattccataggttattatttggctatttatattgccattgcatgttcagagcattttatttataggcgttccttcagtgcttacaatgttgatgattgggatagttgggaacgtctacctatcggcattgcaggtactgctgccttaattgttggtgcctttggcgtagcgttgggtatgtgccaaacttattgggttggcgagatcagccgtttgatcggagactacggtggtgatattggattcgagttaggactaagttgggcatttatagtttacaacattgctagaccctttgagctcaaatatttcggtcgatga

SEQ ID NO: 76309 - DNA, 1329 bp, Saccharomyces pastorianus
atgtcaagaagagtggttatcacaggattgggctgtgtaacgccgttgggaagatcattaagtgagtcatgggggaatctgctctcttccataaatggactcacaccaatcacatctttgcccaactataatgaggactacaaactcagagaaaaaagtatcccatcaacgataacagtggggaagattccagagaattttcaaaacgaaaattcagccatcaataaactgctgttcactagccaggatgagagaagaacctcaagctttatcaagctagcactacgtacaacttatgaagcgcttcacaatgctggtctcttgaacccaaatgatataaccatcaatacatctctgtgcaatctggatcactttggttgcctgataggttctggtataggatccattcaagacatataccaaacttctctacaattccataacgacaataaaagaataaatccatatttcgtccctaaaatccttacaaatatggcagctggtaatgtttccatcaagtttaaccttagaggattatcccatagtgtttccacagcatgcgcaacaggtaataactccattggcgatgcattcaattttattcggttaggcatgcaagacatctgtgtcgccggtgcaagtgaaacgagtttgcatccgttaagtttagcaggtttcatcagagcaaagtcgattactacaaacgggatctctagaccctttgatacacaacgttctggattcgtacttggtgaaggatgcggaatgattgtcatggaatcgctagaacatgctcaaaagagaaatgcaaacataatttctgagctcgtgggctatggtttaagcagtgatgcctgccatattacctcccctcctgctgatggaaatggtgccaaaagagcaatagagatggctctaaaaatggctagattagaaccaactgatgttgactacgtcaatgcacatgctacatcaactttactaggcgataaagcagagtgtctggcagtagcctcagcactcttaccaggaagatccaaaagcaagccactgtacatatccagtaacaaaggtgcaattggccatcttttaggtgcagctggcgccgtagaaagtatatttacaatttgttccttgaaggatgataagatgccgcataccttaaacctggacaatgttctgactctagaaaataacgaggccgataagctacatttcataagagacaaacctattgtgggagctaatccgaagtacgcattatgcaacagcttcggatttggaggagttaacacatctcttctcttcaagaaatgggaagggagttaa

SEQ ID NO: 76310 - DNA, 753 bp, Saccharomyces pastorianus
atgggattgactactaaacctctatctttgaaagttaacgccgctttgttcgacgtcgacggtaccattatcatctctcaaccagccattgctgcattctggagggatttcggtaaggacaaaccttatttcgatgctgaacacgttatccaagtctcgcatggttggagaacgtttgatgccattgctaagttcgctccagactttgccaatgaagagtatgttaacaaattagaagctgaaattccggtcaagtacggtgaaaaatccattgaagtcccaggtgcagttaagctgtgcaacgctttgaacgctctaccaaaagagaaatgggctgtggcaacttccggtacccgtgatatggcacaaaaatggttcgagcatctgggaatcaggagaccaaagtacttcattaccgctaatgatgtcaaacagggtaagcctcatccagaaccatatctgaagggcaggaatggcttaggatatccgatcaatgagcaagacccttccaaatctaaggtagtagtatttgaagacgctccagcaggtattgccgccggaaaagccgccggttgtaagatcattggtattgccactactttcgacttggacttcctaaaggaaaaaggctgtgacatcattgtcaaaaaccacgaatccatcagagttggcggctacaatgccgaaacagacgaagttgaattcatttttgacgactacttatatgctaaggacgatctgttgaaatggtaa

SEQ ID NO: 76311 - DNA, 657 bp, Saccharomyces pastorianus
atggcagattattcttcccttactgttgttcaattgaaagatttactgaccaagagaaatctgtctgtaggcggattgaagaatgaactagttcaaagactgataaaggacgatgaagaatcaaagggtgaaagtgaagtttctccacaggaacaaaaccaggaacaagggtcagaacctgcggcgatagaagaaccagcctcccagaacattactgaaaaaaaggaagtttcaagcgagcctaaagaaacaaacgaacccaaggaggaaaataaggacgttcaaaagccctctgatggaccttctgctactgcttcagagaacgaacaagctgctgcttccactgctgctcccgctttgtcaccagaagaaattaaggccaaagcattggatcttttaaataagaaactgcaccgcgctaacaaattcggtcaagatcaagcggatattgactctttacaaagacagataaatcgtgtggagaagtttggtgttgacttgaatagcaagttggctgaagaactgggccttgtcagtaggaaaaatgaacctgaaagtggcaataacggtaaatttaaaaatagaaacaaaaatgcaaacaaccgctccagagtaagtaaaaacaggagaggcaaccgctctggttacagaagataa

SEQ ID NO: 76312 - DNA, 1518 bp, Saccharomyces pastorianus
atgattgacgatactgagaactccaaaattcatttggaaggtagccataaaacaggaaagtatacgggctatggtactacacataaaatcagagctcagttaaactttaatgatgaaaagaaatggaagaagttttctagcagaagactagaactcattgactcatttggcttgagccagcacaaagcaagtgaacaagatgataatataagacaaatagccaccatattaaggagtgaatttgagtaccctgatacgttttcggcagaatttgaaaagttggttaccgctgctgttcaatcggtgagaagaaacaggaaacgttccaagaaaaaattattagactccaagaagaaaatagcccgtggtaaagttcaaaaaattcctttgtctccccccagctcaagttatatggggtcttgttcagcttccaatgcatcaagctctgacgaagaagccagcgtgaaggaagaacctgctgagcacgctcttccttctcttaatactataacatcacaaaaattgttaccttatccgaatggccgcactcttccacctgtaccaactcaagttcgctctttacttaagaagaacgcatctcttcttcgtgatccatcggcaccgtatgcgcacggcggcgatgaaaaattacaaaagtttgatatagaagatcagcctctagaaagtgaccaagaatacgactttattgccaaatcaataattgttgaaattgtaaataatgctattccactacctgaacaaattcaaagagataagttcattagaccaaatttaacggaaaaaaaagggtgccaaagcaaagttgtaatatccaacaacttgagaaaactcatcctgtcaaagatacataactcaaggacgtgcttggagatgtctaaggatgaaagaaatttggattcttttgctaatctagaaacgctgggcaaaaattcactaatggcttccatttcccttgtggtagaaaacagcttttcacatttaccgtcttctactaagcaatatcttactgaacggctgtcatcaatcgaatttttgactattctatcgcaaaggctatttatgcccgctacacgtcaactattcgctgacctatcacaagaaaaaattcaggtgagagtgctgaatctaatactgggatctcttgtcaaagattatgggtttgatgcatctttggcaccaatcaacgaaattatctatcacatgacactccatcaatatcccttggtttgtagtaataaacagtccaatccaatgaggccacactccacatctgaggtcttgagtgcacattcttcaacgaaagatgcaagcactcccggtaaagaagagcctcgagtgacgaggtcaagcacatcggcagatagcactatcattacattgccttcaattgaagtcccaaatacgtacgatgatgacaggttaaagatgttgagcgcgatatcgttgcagattgaaaattccaccttttccaaaccattcagtactatttcaaaataa

SEQ ID NO: 76313 - DNA, 1674 bp, Saccharomyces pastorianus
atgcctatccccgttggaaatacgaagaacgattttgcagctttacaagcagaactagatgcagatgctgccgaaattgagaaatggtggtctgactcacgttggagtaagactaagagaaattattcagccagagatattgctgttagacgtgggacattcccaccaatcgaatacccatcttcggtcatggccagaaaattattcaaggtattagagaagcatcacaatgagggtacagtctctaaaactttcggtgccctagatcctgtccagatttctcaaatggcaaaatacttagacacaatctatatttctggttggcagtgttcatcaactgcttccacctcaaatgaacctggtccagacttagctgattatccaatggacaccgttccaaacaaagtggaacatttgttcaaggcccaattgtttcacgacagaaaacaactagaggcacggtcaaaggctaaatctcaggaagaactcgatgagatgggtgccccaattgactacctaacaccgattgtcgctgatgcagacgcaggccacggcggtttaaccgcagtcttcaaattgaccaagatgttcattgagcgtggtgctgctgggatccacatggaagaccagacatctacaaataagaaatgtgggcatatggcaggaagatgtgttatacccgttcaggaacatgttaacagattggtgactattagaatgtgtgctgatatcatgcattctgacttaattgtcgttgctaggactgattcagaagcagccactttgattagctcaaccatcgataccagagatcattatttcattgtcggtgccaccaatccaaatatcgagccatttgccgaagttttaaatgatgccatcatgagtggtgcatcaggacaagaactagctgacattgaacaaaaatggtgtagagacgctggactcaagttattccatgaagccgtcattgatgaaattgaaagatcagccctgtcaaataagcaagaattgattaagaaattcacctctaaagtgggtccattgactgaaacatcccacagagaagccaagaagctcgctaaagaaattcttggccacgaaattttcttcgactgggagctaccacgcgtaagggaagggttgtaccgttacagaggtgggacgcaatgttctatcatgagggcccgtgcatttgctccatatgctgatttggtatggatggaatctaactacccagacttccaacaggccaaggagtttgcagaaggtgttaaagagaaattccctgaccaatggctagcttacaacttgtctccatcctttaactggccaaaagccatgtccgttgatgaacaacacaccttcatccaaaggctgggtgatctaggttacatctggcaatttatcacattggccggtttacacactaacgctttagctgtccataacttctctcgtgactttgccaaggatgggatgaaagcttatgcccagaatgttcagcagagggaaatggacgatggtgttgatgtgttgaaacatcaaaaatggtctggtgcggagtacatcgatgggttattgaagttagctcaaggtggtgttagcgcaacagctgctatgggaaccggtgtcacagaagatcaattcaaagaaaatggcgtaaagaaatag

SEQ ID NO: 76314 - DNA, 501 bp, Saccharomyces pastorianus
atgatcgaaatcatcatcttcagtttcattggcaatgaaagtttcaaaaccctgcaggtcttcaaaaactttcacggtttcaccatcctccgtggtaaccgtttgaacttttacttccttcttatccttctttgtcatttaaagtggagacgaaaacagtcgatacctaatttatatgttctatgggcaattattagaatacaatgcagaacttgtccctttatgaaatgttttgaccaaagaaatttgaacgtggaagaacaaaagattcaaatatacgctagaaatcttttgccttatatatgtgcacacaatcaagtaaagacacttgtatttttccacccagcaataccccttaagaacgctgcccctttcattctatatttaattaaccatacagtaacttataatacccctgattacaggatgcatttgttatggaagtcaattgccgagagccgtccacattatgctggttgcctcgaggatattattttttag

SEQ ID NO: 76315 - DNA, 486 bp, Saccharomyces pastorianus
atgacaaagaaggataagaaggaagtaaaagttcaaacggttaccacggaggatggtgaaaccgtgaaagtttttgaagacctgcagggttttgaaactttcattgccaatgaaactgaagatgatgatttcgatcatttgcactgtaaattaaattactacccaccatttgtgctacacgagtcgcacgaggaccctgaaaaaattagtgatgctgcaaattctcattctaagaagttcgtgcgtcacctgcaccagcatattgaaaagcatcttttgaaagatattaagcaagccgttaggaaacctgagcttaaatttcacgaaaaatcgaaggaagagacatttgataaaatcacctggcattacggtgaggaaactgaataccatggtagacctttcaagatagacgttcaagtagtttgcacacatgaagatgctatggtatttgtcgattacaaaacacatcctgtaggcgcaaattaa

SEQ ID NO: 76316 - DNA, 324 bp, Saccharomyces pastorianus
atgacacaacctttaatttgcgcctacaggatgtgttttgtaatcgacaaataccatagcatcttcatgtgtgcaaactacttgaacgtctatcttgaaaggtctaccatggtattcagtttcctcaccgtaatgccaggtgattttatcaaatgtctcttccttcgatttttcgtgaaatttaagctcaggtttcctaacggcttgcttaatatctttcaaaagatgcttttcaatatgctggtgcaggtgacgcacgaacttcttagaatgagaatttgcagcatcactaattttttcagggtcctcgtgcgactcgtgtag

SEQ ID NO: 76317 - DNA, 1764 bp, Saccharomyces pastorianus
atgatgaatccacacgttcaagaaaatttgcaagcaatccacaacgccttaagcaattttgatacgtcatttttatcggaggatgaagaagattattgccctctttgtattgaaccaatggatattactgataaaaatttttttccttgtccctgtggttatcaaatttgtcaattttgctacaataatatcagacaaaatccagaattaaatggccgttgcccagcatgtcgtcgtaaatatgatgacgagaacgtcagatacgtcacattatctccggaggagttaaaaatggagagagccaagctcgctaggaaggagaaagaaagaaagcatagagaaaaagaacgtaaagagaatgaatatacgaataggaaacatttatctggtaccagagttatccaaaagaatttagtgtacgttgttggcatcaatcctcctgttccatacgaggaagttgcgcccactctgaaatctgaaaaatattttggccaatatggtaagataaataagattgtggttaatagaaaaacaccccattctaacaacacaaccagcgagcattatcaccatcattcaccaggatatggcgtttacataaccttcggatccaaggacgatgctgcaagatgtatagctcaggtagacgggacgtatatggatggccgcctgatcaaagctgcctacggtactactaaatactgttcttcttatttaagaggattgccatgcccaaatcccaactgtatgtttttgcatgaacctggtgaagaagctgattcttttaataaaagagaactccacaataaacaacaagcgcaacagcaaagtggcggaactgcattcactagatctggaatacacaacaatatatctaccagtaccgctggttcaaataccaatttactaagtgaacatttcacaggcacaccttcaccggcggcgatgagggctcagttacatcatgacagccatacaaacgctggaacaccggtattaacacctgctccggtccctgcagggtcaaatccttggggagttactcaatcagcaacacctgtagcctctatcaatctctctaaaaacagcagctccataaacttgccaacattaaatgattctctgggccatcatactacccccacaacagagaataccatcacaagtacgacaactactaccaataccaatgctacaagtcactcccatggtagcaagaagaagcaatctcttgctgcagaggaatacaaagatccttatgacgcactagggaatgctgttgactttttggatgcaagactacattctctatcaaattatcagaagcgccctatatctatcaaatccaatattattgacgaagaaacttataaaaagtatccgtctttgttttcttgggacaagattgaggcctcaaagaaaagtgacaatacattagccaacaaacttgtggagatcctggctataaagccaatagactacactgcttctgtcgttcaattcttgcagagtgtcaatgttggtgtaaatgacaatattacaatcacagataatacgaaaactcccacccaaccaacaagactgcaaaccgtctcacagcaaatccaaccaccattaaacgtcagtacccctccaccgggtatctttggtccacaacataaggtgcctattcagcagcaacaaatgggtgatacaagctcaagaaattcctctgatttactaaatcaactaatcaacggaaggaaaattatcgccggtaattaa

SEQ ID NO: 76318 - DNA, 432 bp, Saccharomyces pastorianus
atggcaccacccaccttgatcacagcaaattgttgttgtgagacggaagtgaaatatttcaaatattgttcaacctctctttttgtgctgatattgttcaacagttggatcacagtggatctagtagctgaaaagccgttagtagatgaaacatacctctttgagtatccgactttctttctcgtaaatgcaacggatggtggagctctcaagggtacagatgcaaatcctgctatggtggatttgtttaatgaaggcgcaaatttttggaatttggaagcgttaagtctctttgtcgagacgagtaagctagcagatggcataatgatgcagacttatttctcacttcagatctctctttcttttgcctttagtggtatatgtgttaagtatattacgggtctgaaaaataatatccaaaaatgttcctaa

SEQ ID NO: 76319 - DNA, 2592 bp, Saccharomyces pastorianus
atgccatctgctagcttactcgtctcgacaaagagacttaacgcttccaaattccaaaaatttgcgccttcattaaacaaatccaccatagcaggatttgcatctgtacccttgagagctccaccatccgttgcatttacgagaaagaaagtcggatactcaaagaggtatgtttcatctactaacggcttttcagctactagatccactgtgatccaactgttgaacaatatcagcacaaaaagagaggttgaacaatatttgaaatatttcacttccgtctcacaacaacaatttgctgtgatcaaggtgggtggtgccattatcagcgacaatctacacgaactcgcttcctgcttggcatttttgtatcatgttggtctatatccaatagttttacatggtaccggtcctcaggttaatggaaggctagaagcgcagggaattgagccagactatattgatggtattagaatcacggatgagcacacaatggccgtagttagaaaatgttttttggaacaaaatcttaagctagttactgcattagaacagctaggggtccgtgcaagacccattacttctggtgtttttactgctgactatttggataaggacaaatacaagctagtgggcaatattaaaagtgtcacgaaagagccaattgaagcatctattaaggcaggtgccctaccaatcttgacctctttagccgaaactgcttctggtcaaatgttgaacgtcaacgccgacgtagctgctggtgaattagcccgtgtttttgagcctttgaagatcgtttacctgaatgagaaagggggtattatcaatggctccacgggagaaaaaatttcgatgatcaatttggatgaagagtatgacgatttaatgaagcaaagttgggtgaagtatggtaccaaattaaaaattagagaaattaaagagcttttggactatcttcctcgttcttcttcagttgcaatcattaacgttcaagatctacaaaaagaactgttcactgattctggtgcgggtactatgatcaggagaggttacaaattagtgaagagatcctccattggcgaatttccatccgctgatgctctaagaaaagctcttcaaagggacgctggcattagttccggtaaagaatctgttgcttcttatttaagatatttggaaaactctgattttgtctcttatgctgatgaacctcttgaagcagtggccattgtaaagaaagatacgaacgttcccacactagacaaatttgtctgttctgacgcagcctggttgaataacgtcacagataatgtattcaatgttttgcgccgtgattttcctgctttacaatgggtagtcagtgaaaatgatgctaacattgcatggcattttgataagtctcaaggttcatatctaaaaggcggaaaagttttgttctggtatggtatcgatgatataaatacaatatccgagctcgttgaaaattttgtgaagtcgtgtgacactgcttctaccctcaactcatcagcaagtagtggagtatttgctaacaaaaaatcagctaggtcgtactcaactagatccactcctcgtcccgagggagttaacaccaaccctggtcgtgtcgcgcttattggtgctagaggttacacaggtaaaaatttggtatctttgatcaacggccacccatatttagaagtggcccatgtttcttctcgtgaattgaaaggtcaaaagctgcaagattatacaaaatccgaaattatatatgaaagtttgcaaatacaggatattaggaaactggaagaacaaaatgctgtggacttttgggttatggcattacccaacaaagtctgtgaacctttcgttgagacaatccaaagtgttcatggtaagtctaaaattattgatctgtccgctgatcacaggtttgtatcagaatcagactgggcttacggtttgccagaattgaatgatagagcaaaaattgcaaacgctgccaaaattgctaatcccggttgttatgctactggttcgcaattaactatttctccgttaacaaagtatatcaatggtcttccaactgtgtttggtgtttcagggtattcaggcgcggggacgaagccttctccaaaaaacgatcccaaattcttgaacaataacttaattccttacgctttaagtgatcatatacacgaacgcgaaatctcagctcgcattgggcacaatgttgcattcatgccccatgttgggcagtggtttcaaggtatctctttgaccgtctctattccaataaaaaaaggttccttgtctattgatgagatcaggaaattatacagaaatttttacgaagacgaaaagctagtacatgtcatcgatgatatcccactggttaaagatattgagggcacccatggtgtagttattggtggtttcaagctgaatgatgctgaagatcgtgtagttgtttgcgcaaccatcgataacttacttaaaggcgccgctactcaatgtctgcaaaatattaatcttgctatgggttatggagagtatgctggtatccctgaaaataaaattattggtgtctga

SEQ ID NO: 76320 - DNA, 2667 bp, Saccharomyces pastorianus
atgtacgtttataaaagagacggtcgtaaagaacctgtccaattcgataagattaccgctcgtatatcacgcttatgctatggtttagatccaaaacatatcgacgccgttaaggtcacccaacgtatcatttctggtgtctatgaaggtgtcacaacaatcgaactagacaacttagccgctgaaacatgcgcttatatgactactgttcatccagattacgccaccctagcggccagaattgccatttctaatttacataaacaaaccacaaaacaattttctaaggttgtcgaagatctttatagatacgtcaatgctgctactggtaagcccgctcccatgatctctgatgatgtctacaatattgtcatggaaaacaaggataaattgaactccgcaattgtctatgacagagattttcagtacagttattttggttttaaaactttggaacgttcttatttactaagaatcaacggtcaagtggccgaacgtccacaacatttaattatgagagtcgcactaggcatccacggtagagatatcgaggctgctttagaaacgtataacttgatgtctctaaaatattttactcacgcctctccaacgttgttcaatgccggtactccaaaacctcaaatgtcctcttgtttcttggttgccatgaaggaggactctatcgaggggatttacgacaccttgaaggaatgtgctttgatttccaaaactgctggtggtattggtctacatatccataacattcgttcaactggttcttacattgctggtacaaacggtacttctaacggtttaattcctatgattcgtgttttcaataacactgcccgttatgttgaccagggtggtaataaaagacctggtgcgtttgccctttacctggaaccatggcatgctgatatatttgattttattgatattaggaagaaccacggtaaagaggaaattcgtgcaagagatttgttccctgctctatggattcctgatcttttcatgaagcgtgtcgaagaaaatgggacctggacattattctctccaacatcagctcctggtttaagcgattgttacggtgacgagtttgaggctctatatacccgctacgagaaagaaggtcgtggtaagactatcaaagcccaaaaattatggtattccattttggaagctcaaactgaaactggtacacctttcgttgtttacaaggatgcttgtaacagaaaatctaatcaaaaaaacttaggtgtcatcaagtcatcaaacttatgctgtgaaattgttgaatactcagctccagatgaaactgctgtttgtaacttggcttccgttgccttaccagcattcattgaaacttctgaggatggtaagacttccacatacaacttcaaaaaattacatgaaattgctaaagttgttactcgtaatttaaacagagtcattgatcgtaattactaccctgttgaagaagcgagaaaatccaatatgagacatagaccaattgctttgggtgttcaaggtctcgctgacactttcatgctgttacgtttgccatttgattctgaggaagcccgtttgctaaatatccaaatctttgaaactatttatcatgcctccatggaagcttcttgtgaactagctcagaaggacggtccatacgaaactttccaaggatctcctgcttctcaaggtatactacagtttgatatgtgggaccaaaaaccctacggcatgtgggattgggacaccttaagaaaagatatcatgaagcatggtattagaaattccttgaccatggcaccaatgcctactgcatccacatcccaaatattgggttataatgaatgtttcgaaccagtcacttccaatatgtactcccgtcgtgtcttatccggtgaattccaggttgtgaacccttacttactgcgtgacttggttgatttaggtatttgggatgagggtatgaaacagtatctgattacacaaaatggctccattcaaggcttaccaaatgttccacaagaattgaaggacttatacaagactgtttgggaaatttcacaaaagactatcattaacatggcagccgatcgttctgtctatattgatcaatctcattctttgaatttgttcttacgtgccccaactatgggtaaactaacaagtatgcatttttacggatggaagaagggattgaagaccggtatgtactatttgagaacccaagctgcatctgctgcaattcaatttactattgatcagaagattgcggatcaagctacagaaaacgttgctgatatttccaacttgaagcgtccatcatatatgccttccagtgcaagctacgctgccagcgatttcgtgcccgcagctgtgactgcaaacgcaactattccatctctagatagctcctcggaagcttcaagagaggcatctccagctccaacaggtagccactcattaactaaaggaatggcagaattaaacgttcaagagtctaaggtagcagttcctgaagtacctgccccaactaagaatgaagaaaaagctgcccccatcgttgatgatgaggaaaccgagttcgacatttacaactctaaggttatagcatgtgctattgataacccagaagcttgtgaaatgtgttcgggttaa

SEQ ID NO: 76321 - DNA, 381 bp, Saccharomyces pastorianus
atgagtatgcagattgaaataaaggatggaaggagtgataactctcctctgcccgaaagaaaactagttacgttaattcaagaaagttatgatagtttaaaagatgacaatgaaatcaatttatcgaccgaatcaacttccaaccttcttataaaactggtcctagaaaaacttgaaaagcactcttctttgtataaatatattgcctcggtaacgacgttgaacattgaaggactcaacgaagaaaacgctaatttctcattgaagaacgatataggcgcatcctgggaatctaaaaaagatggtatattcaactataaactagaagacaaaaatagtaatgagtgctatttaattacaattctttggcttcacaagtag

SEQ ID NO: 76322 - DNA, 390 bp, Saccharomyces pastorianus
atgtcttcagcaccattattacaaagaacacctgggaaaaagatcgctttgcccacacgagttgagccaaaagtgttctttgccaatgagcgtacctttttgtcgtggttgaactttacagttatgctgggaggccttggtgtaggtttactgaattttggtgacaagataggtagggtcagtgcaggactatttacttttgttgccatgggtacaatgatatacgcgcttgtaacataccactggagagctgctgcgattagacgtagaggatcaggtccttatgatgacagattggggcccactttgttgtgctttttcttattggttgctgtcattatcaactttatattaagattgaagtacaatgacgctaacactaagttatga

SEQ ID NO: 76323 - DNA, 1563 bp, Saccharomyces pastorianus
atgctttctcgcacaagagctgcagctccgaattccagaatattcactagaagcttgttacgtctttattctcaagcaccattacgcgttccaattactcttccaaatggtttcacctacgaacagccaacagggttattcatcaatggtgaatttgttgcctcgaagcaaaagaaaacgtttgacgtgatcaatccatctaacgaagaaaagataacaactgtatacaaggctatggaagatgatgttgatgaagccgttgcagcggctaaaaaagcttttgaaacgaagtggtctattgtagagccggaggttcgcgctaaagctttattcaatctcgctgacttggttgagaaacaccaagaaacactggctgccattgagtcaatggataatggtaagtcattgttttgtgcgcgcggtgacgtcgctttagtatctaaatacttgcgttcttgcggtggttgggcagataaaatctacggtaacgttattgacacaggtaaaaaccattttacctactcaattaaggaaccattaggcgtttgcggccaaataatcccttggaacttccctttattgatgtggtcatggaaaattgggcctgctctggctacaggtaacaccgtcgtattgaaacccgctgaaacaacacctttatctgcccttttcgcttcccagttgtgtcaggaagcaggcatacccgctggtgtagtcaatatccttccgggttccggtagagttgttggagaaagattgagtgcacacccagacgtgaagaagattgcttttacaggctctactgccaccggccgccatattatgaaggtcgctgccgatactgtcaagaaagtcactttggagctgggaggtaaatcaccaaatattgtgtttgctgacgctgatctagataaagccgtcaagaacattgccttcggtattttttacaactctggtgaagtttgctgcgctggttccagaatatacattcaagatacagtatacgaggaggtgttgcaaaaactaaaggattacaccgagtcactaaaggtcggtgacccatttgatgaggaagttttccaaggtgctcaaacatctgacaaacagctgcataaaattttagactatgtcgatgtagcagaatcagagggggctcgtcttgtgactggaggggccagacatggcagtaaaggttattttgtcaagccaacagtgtttgctgatgtcaaagaagatatgagaattgttaaggaggaagtgtttggtcccattgtaactgtatccaagttttctactgttgatgaagtgattgctatggcaaatgattctcaatatgggttagccgcaggtattcacactaacgatattaacaaggctgttgatgtgtccaaaagagtgaaagctggtactgtttggataaatacctataacaacttccaccaaaatgttcctttcggtggcttcggccagtcaggtattggccgtgaaatgggtgaggctgctttaagtaactacactcaaacaaaatctgtcagaattgccattgacaagccaattcgttga

SEQ ID NO: 76324 - DNA, 2787 bp, Saccharomyces pastorianus
atgaaggacagtgtagactgcccaagcattctacccaccgaccgcacttcagtgctttccgagactagcactttggtcggatcgagttcgcatgtatattcgaggcatgctcctatgaacagttatcataacagcatgaacagcaacatataccacagccccaaagccagtagccctttggtgagctataagacatcttcgccggtgttattgaagagggcgaccgctcctgtcctgccaagcttcaagcccaaggaacagcgatataataagccgcagggttgttcgctaattactgctgtagaactgggcaagattattgaaaccttaccagatgaaaaggtgctcttacttgatgttaggccgtttaccgaacatgccaaatccattatcacaaactccattcatgtatgtttgccttccacgctgctgaggaggaaaaatttcaccttttccaaactcttggacaacttaactcctagcgagcaaagcgtgttgaaatctaaactggccatcgataaccttcggattatcatttatgatagcaccgcaaatcaaacggaaagttctgtttctttaccttgttatggaatagcgtccaagctaatagagtttgatactaatgttaaaaaaaccgtgtctatactaatgtgtggttttcctcaattcaaaattctatttccagaccatataaacaccaacacatttaactcagattgcattagttcggctgaacctaaaagccccaagacaaaccttatgaacagtctacacaacacagcgccgcatatgacggcgacaacaccactatcgtctccgcaaatgaaccttaagttgaaagttcctgacgatagtaggtcagatcattcaaacttttccagttctccctctccgcgtaacgtcctatcagattctcccatgtcttcttcttcccccatatctgccttatttaagttccagctgcctgcaccacaaacaaacataaaccaaatgttcaaattttcgcaaaatgaagaaataatggctttagagacgtatttgagtgcagtcaacatcaaagaagaacatgaaagatggtataataacgattctgccaaaaaatctttacaaaacttccaattcccaaagaaccaaaattctctagaaaaggacactaataaagacaaactagggtttcagatcagatacgaaaacctgagcaaaaattacgaaaaggaggtcattgactccgttatacctgaatggttccagcatctgatgtcaatacccaagatcgagttggtttctcagtttcaaaaattagattttttggaaaaaaggcgcttgaaccattctgtctctttcaggaagaaggaaaactcgtttatacttgaaaagccatcatcatatcctgaacagttaacatcaacttcttcttcaacaatcatgcctccaaaatttcctgacgtgaacaaagtacaaaagaggtcgcattctcagccaatcttcactcaatacagtaaatataaatcgatgctcagccttgaatcagattccgattcggagtcagatgacgttataatatcatcaggcgttgaattaggagccaagaacaggtacaaggatatttttccctacgagcattcgagagtgattctaaaaaaaggtttgcaatcatcaaaaggtatcaagcattcacattctacttccgatggtggcatcctcgacaattatatcaacgcaaactatttgtctctgccaaggttttctgtagagcaaaattcgtcatttcaaacaactacaaccacaacaagaagagtgcgctatatagcgacgcaagctccaatgccctccactgtacatgacttttatacatgcatattgaataatggcgttccgttggttctctcattgacaaatgatttcgaaaatggcattgagaaatgttatcgatattggcaagaaggtaattataacggtattcacgttaaattgttagaaaaaaaaatattaaagatgcctagcactactagcatgaggaaaaatactatgggaacacaaaatagtagtttatattcagctggtgttcagggaaatagtagtaactatagtactgataatgataatgataatgacaacaataataataacaataacaatagtaatattgctgttactgctgctgcttgtgatgatgatgatgatgatgatgatgacgcaattctcataagaaaaattctgctaacatatcatgatcaagagaaaccttatgaattgttacagattcaggtgaaaaattggcctgatttgggcactttactcaatcctatctcaatcttacaagcaatcaatgtcaagaatcacataatagatacactatttgccagaaattactatcaaaacgaccaacttcctaccattttggttcattgttccgcaggttgtggaaggactggtactttgtgtaccattgattccattctatccaatttcgaaatgtttgaaatgttgcagaaagagtttgttaaattaaaatacccggcaaagttattcgatccaatttcatggacaattaatatttttagaaagcaacgaatatccatggtccagaacattaatcaatttattttcatttatgactgcttgctattttactttagattacgtcttgatgacataacagagagaacggatggtgatggaagtaacaaggacaatatatcattaagtgcattaattgaacaaatcgaaaaattagagatcttgcagacattcgtggatgataagttgaaagaattgccacaatag

SEQ ID NO: 76325 - DNA, 2067 bp, Saccharomyces pastorianus
atgggtctaaaaattacaaaaggacagctgagaaccaaggatctgaatcaatcatcctcaaagtcatcgcagtcttcaagaataggtgtagacacttgtatatttactagaatgctaccccgaataaacactgcaattaatctcacagagcatctgctgagaagatcttttcattcactgacaaatctacagaaaactcaagtaaaagaaagactacatgagctagaacgtcacggtttcatattaaataaaacatccaaacaattggaaaggataaattctaagaaaagaagacaattgaaaaaactgcaaaagacagcataccccaaggatcaagcttttcatattcttcgaaaatttcataaaataaataatgaggcattagcagatacaaaactggggccaactagccaaagcgacttgaaggtcctatccttaaccaaagataagagactcttttataccatactaggcgtcaatggagaacagttacgtgattccaaattaatcgccaatgatgttcaaaaatttttgaaaagaggacaactggaaaaagctgtctttttggctaggctagctaaaaagaaaggcgtcgttgggatgaatttgattatgaaatattatttcgaagttgtgcagtcccaacaaagtgctgtagatatcttcaattggcgaaaaaaatggggagtccctattgatcaacattccatcacaatcctctttaatgggctctcaaaacaagaaaatttggtctcaaaaaaatacggagaacttgttttgaagactatagatagtttgtgtgacaaaaatgagctcacggaaatagaatataataccgctttggcggcactgataaattgtaccgatgaaacactagtgttcaaacttcttaataaaaagtgcccaggtttgaaaaaggatagtattacatataccttaatgataagatcttgtaccaggattgccgatgagaaacgttttatggtggtactcaatgatttgatgaataaaataccagactattgtgtcgattctaaattgttatttgagtactgtgaagtaatatgtagccagaagtcaccaaagattgagaagcaaggaatgggactatgggccctctgtgaatattttcaatttgataagaccattttcaagaagtatttgacacaaagcgattttcctacgttagttccactaagtcattggaacatcaataagccatttcctctcaacaaacatgttgtgggattgtttatgaattactgtttgaaaaacaaggaatatgatcttgctatggaaatatttaagacattagaggcacagaacaaccaaatgttagatcagagcatataccacaaatacatggaaactgtcataacaacgaggcccatcacttgcggcgacgagtgtctggacatttatgaacgggtagcctcgtcggcacaaatctcaataaccaggaggatgttaattttggtgtacaacgcattccaaagacaaagtctcaaggccgttataaacaaagatgcatcaaatgctgaagctactttgcacaagattcgggggtttatagatagcgtagaggccacatactcatcaaagttgaacggcaaagtttacaggtttaattcatggaagttcctgtttcctatcgttaaaaatctgaacatgaatgataaagtgtctacagtggaactgaaaagtatactagatgaatacttgaaatctttattgaatggtgagctcgggaaggaatttaaagcgagcatagaagacaagcggtttgttacgttggagggaattcgtttagtcaaggttttaaccgagagaatcaagcttccgtcactggacagtgaggaaatagccagtttaaaaggcacggaaagaaagaagtttcttgccagaaggcaccttttgaggctgaagcaaatattactggaagatttagcggacattgaaggcaactcaagaaggaagggtgatagcgaaaatacaagtaccagtgaagagcgcatcatggaggacttggccgagctgatacttgaaaccagctatgacaagttttaa

SEQ ID NO: 76326 - DNA, 1536 bp, Saccharomyces pastorianus
atgttaaataggataaacccagtacggttttctgtgcaatcttgccaaagatacttctcgaggttggtatcgccattggaacagcataaaagtaatacttttactaatagagtcagaatccccattgaggcaggccaaccactgcatgagacaaggccgttccttataaagtcgggcgagttgacaccaggcatttcagccttggaatactatgaaagaagaattaggttggcggaaacattgcctcccaaaagttgtgtgattttagctggtaacgatatccaatttgcatctggagcagtattttatccgttccaacaggaaaatgacctgttttatcttagtggttggaatgaacctaattcggtcatgattttagaaaagccaacggatagtttaagtgatacgattttccacatgctggttccgccaaaggatgcgtttgctgaaaagtgggaaggatttaggtctggggtttatggtgttcaagaaattttcaatgccgatgaatctgcttccattaacgatttgtctaaatatttgcccaaaataattaacaggaatgagtttatctattttgatatgctatcaacttctaatccgagttcgtccaattttaaacacatcaagagcctgttagatggcagtgggaatagcaatcgatcattgaattccattgcgaataagaccatcaaacccatcagtaaaagaattgcagagttccgtaagatcaagtcccctcaagagttgagaattatgaggagagctggccaaatatcaggaagatccttcaatcaagcctttgctaaaagatttaggaatgagagaactttagattcctttcttcattacaagtttatatccggtggttgcgataaggacgcatatatccccgtggtcgctactggttcgaattctttgtgtattcattacacaagaaacgatgatgtgatgtttgacgacgaaatggttcttgtagacgccgctggctccttgggtggttattgtgctgatatttcgagaacgtggcccaatagtgggaaattcactgatgcacaaagagatctctacgaagctgtattaaatgttcagcgtgattgcattaagttatgtaaagctagcaataactattccctccacgacatccatgaaaagagtatcacactcatgaaacaggaattgaaaaacttgggcatagataaagtctccggttggaatgttgaaaaattgtatccgcactatattggacacaatttaggtctagatgttcacgatgtgcctaaagtttccaggtacgaaccactaaaggttggacaagttattactattgaaccgggtttatatattcctaacgaggaatcatttccatcttactttagaaacgtcggaataagaattgaagatgacatagccattggtgaagatacttacactaatttaactgttgaagcagtgaaagaaattgacgatttagaaaatgtcatgcaaaatggcttatctacaaaattcgaggaggaccaagtggcaccactgtaa

SEQ ID NO: 76327 - DNA, 165 bp, Saccharomyces pastorianus
atggtgcggctttcgtatctgcgtctcatccttcccccttgccgcttgtcagaactctctagcttggcgattctctatcaacctgttattccaattcttatatctaccattaccttccagcattttttcaaacgtgttcacacgccctgtaacgtttatatataa

SEQ ID NO: 76328 - DNA, 633 bp, Saccharomyces pastorianus
atgcctgattcatcacattcaataagctcaaaagatgttgcatctgccatctctctctatgatcagtccatttacactaataacaggtctactaacctggacttagatcagagatcaatgagcccttccaatattgcctctggtgaagataggataacgagaacgaactcaggttgctccatcacatcaggtgcctccatgattgccacgaaggatggtattcaggggattaatgtcaaaagagatgggattccgaaatattcacttaatttattgaattccatggttcgaaaacaatatgatcacaataatggaacaaagtctcctaccccgaagactagcaatatggtagaccctaagaacaaaaagaagaacaaaaaaaagaagaatgacaaggatgacaaatacaaggtatcgcatgatcaaaccgaaaagttttacaaactcaacaccacttccaactccaatctcacctctgattctactacttcgttatcggaccagttttatttccagaaaagtaacgctgattctgctccattagacaatgcaaattacccactctccgaccattccccctccctgaactctatggataatactacaaagcatagcagcaatgtgcacacttga

SEQ ID NO: 76329 - DNA, 339 bp, Saccharomyces pastorianus
atgtcattgagaatgcgatttaaaccttcaatcgaaaacttcgtgaatcttttttccttttcttgcttatcatttttaagccatgagccccacgtatatttgaaaaaggcatctctctttggatcattgtcattcgttagcttggtaaaaacttcgtttggcttattggagataaatctcttggtggcggcgacggtgatacatttaattgcacccactcttttcgaagctcctactacacaccttctggaatggccagcaacagtgtacctaatcatgcttggtcttcgtattgctgtcttgcttgctaaacagcttttgctacttcttcttcgctga

SEQ ID NO: 76330 - DNA, 1884 bp, Saccharomyces pastorianus
atgattaggtacactgttgctggccattccagaaggtgtgtagtaggagcttcgaaaagagtgggtgcaattaaatgtatcaccgtcgccgccaccaagagatttatctccaataagccaaacgaagtttttaccaagctaacgaatgacaatgatccaaagagagatgcctttttcaaatatacgtggggctcatggcttaaaaatgataagcaagaaaaggaaaaaagattcacgaagttttcgattgaaggtttaaatcgcattctcaatgacatctacattcaatctaatgaaatggctaaggcccccgacggtaagatcttaccaccagtgtttaacaagaacttgaccgtttcattggtcaataacgttgtaccaaagaatataggtaaaatcaacccaaatgaaaaagttcaagtaaccacattatctagtattcacgaaggtaaacatcacagaatatacaaggtcgacacgaatttgaacaaggcatttatcttgaggattccttatccgctggaaaatgaaaacactctatcctacagaataagaagtgaagtagcaaccatggattttgctgacttgaagttgggcatcaaagttcccaagattttttgttatggtgtcaattctttgaaccctgtaaggcagccttttgtcttacaagaatttatcgaaggagaactcttgatgaaagattgggatccattgattgaagacggttcctccaatcaaaaaaaatatgacaatgttattaaacaagtttctgattttcagtcgaagttagtgtcattgaaattaaatgcatttggatccatatattttaacaatgacttaaaagacggaaatgagaaggagtttgttaaggaagacatatacgatggggaaactaatccggatctacaaaacagatggaaaattgggccatccgtggaaagatgtctctggagacataaatctcacttggattttcataaacaaatgaaaccttttttgggaccatggccaaagaagtctccaatggatataattaaaaatactggcctattggaagctgaaaatgctaaaactagaatagccatgaaagaggcaggaagttcagctgaattgatgtatcctcgaactttgaaggagcaaataactacctatgaaaatttagctaagattgccccggatttattcaacgtcaaaacaaaggccattccaaatatgcaggaactattgtcaccacgtttgtttcatcctgatctagaccccatgaatattattgttaacaaagaagcacaagaagcctatctattagattttgaaggagcatgcacaaaacctttcattttacagaattcgccacaattcatcgcctatgatgggcccaagatttatgacttaaaggaggacataaccgattttgacaaattatctgaggcggaaaaggcgcaatatcagttcatgtacaagcgcacccgtaatcaacatcaatgggagaaaaaattaaatgacaataatcctaaattaattactgcagttgccccacctgttaagctactgagaagcccatatattgcagctgtcgaaagaaaaacggaagaagagtatttacttattgatgaatcactattgcaattgaaggaagtttgggacatctttgcccagaatgatttagtgaatcagaaaaagtttcctctaaactatagtaaagaagatattgaaagacatgttgaggatttgcaaaaattacacgaaaagctaatctctacaccatttgctgccactcaagggtggattcctcaagatatgtttgatcaactattaaattccggcagtattgttaagcaagagaacggagactacaccgtgaagcaacctgaagctaccaaataa

SEQ ID NO: 76331 - DNA, 1410 bp, Saccharomyces pastorianus
atgacaagcattgacattaacaacttacaaaatacctttcaacaagctatgaatatgagcggctccccaggcgctgtttgtacttcacctacgcaatctttcatgaataccgttccacagcgcttgaatgctgtaaagcacccaaaaattttgaagcctttctcaacgggtgatatgaagattttactattagaaaacgttaatcaaactgctattacaatcttcgaagagcaaggttaccaagtcgaattctataaatcttcattgcccgaggaagagttgatcgaaaagatcaaggacgttcatgctattggtatcagatcaaagactagattaacttcaaatgtcttacaacatgcgaagaatctggtttgtattggttgtttctgtatcggtaccaaccaagttgacttagactacgctaccagcagaggtattgctgttttcaactcgcctttctccaactcaagatcagtagcagaattggtcatcgctgaaatcattagtttagcaagacaactaggtgatagatctatcgaattacataccggtacatggaataaggttgctgctagatgttgggaggtaagaggaaaaactcttggtattattgggtacggtcacattggttcccaattatcagttcttgcagaagctatgggtttgcatgtgttgtactacgatattgtaactatcatggccttgggtactgccagacaagtttctacattagatgaattgttgaataaatctgattttgtgacactacatgtaccagctactcctgaaactgaaaaaatgttatctgccccacaatttgctgctatgaaggatggcgcttatgttattaatgcttcaagaggtactgtcgtggacattccatctttgatccaagccgtgaaagccaacaaaattgcaggtgctgctttggatgtttatccacatgaaccagctaagaacggtgaaggttcatttaacgatgagctaaatagctggacttctgaattagtttcattaccaaatatcatcttgacaccacacattggtggctctaccgaagaagcccaaagctcaatcggtattgaagtggctaccgcattgtccaaatacatcaatgaaggtaactctgtcggttcagtcaacttcccagaagtggcattgaaatcattgtcttacgaccaagagaacactgtgcgtgtgttatacattcaccaaaatgtaccaggtgttttgaagaccgtcaatgatattttatcgaaccataacatcgaaaagcaattttccgattcaaatggtgaaattgcttatttaatggctgatatctcttctgttgaccaaagcgatattaaagatatttatgaacaactaaatcaaacctctgctaagatctcaattagattgctatattaa

SEQ ID NO: 76332 - DNA, 1665 bp, Saccharomyces pastorianus
atgggtcacaagaagaacggtcacagacgccagataaaagaaagagaaaaccagaataaatttgaacgttccacatatactaataatgctaaaaataatcatactcaaacaaaggataaaaaactaagagcaggcttgaaaaaaatagacgagcaatataaaaaggcggtatcttctgctgcggcaacagattaccttttacccgagtccaatggttatttggaacctgagaatgagctagaaaagactttcaaagtgcaacaatcggaaatcaaatcgagtgtggatgtcagtactgcaaacaaagctttggatttatctttgaaggaattcggcccttatcatataaaatatgcaaaaaacggtacgcatcttttgattactggccgcaaaggtcacgtagcatctatggactggagaaagggacaacttcgtgctgagctgtttttgaatgaaacctgtcactcagcgacatatttgcaaaacgaacaatactttgctgtagcgcaaaaaaaatatacatttatttatgatcacgaaggtacagaattacatcgtttgaaacaacatattgaggcaagacatttagattttctaccatatcattacctgctcgtaactgccggtgagacaggttggttgaagtaccgcgatgtttccactggccagttggtctctgaattgaggaccaaagctgggccaactatggcaatggcacaaaacccatggaatgctgtgatgcatctaggtcattcaaacggtacagtatccctctggtcaccatccatgcctgaaccattagtaaaattactttctgccagaggaccagtgaacagcattgctatcgatagaagcgggtattacatggcaaccacaggggctgataggtcgatgaaaatttgggatatcagaaacttcaagcaactacattctgtggaaagcttaccgacgccaggaacaaacgtttccatttcagatactggtctattggcattatctaggggccctcacgttacgttgtggaaggacgctttaaaattaagtggagacagtaaaccgtgcttcgggtccatgggagggaacccacatagaaacaccccttacatgtcacatttgtttgccggaaacaaagtagaaaatttgggattcgtaccatttgaagatttactaggtgtaggccatcaaacgggtattacgaatttgattgtacctggtgcaggtgaagccaattacgatgccttagaattaaacccattcgaaaccaaaaaacaaagacaggaacaggaagtcagaaccctattgaacaaactgccagcagatacaattactttagatccgaattccatcggttcagtggataaaaggtcttctaccataaggttaaacgctaaggatttggcgcaaactacaatggatgctaataataaagccaaaaccaacagcgacattccagatgtaaaacctgatgtgaaaggtaagaattcgggtttgcgttcctttttgcgtaaaaagactcaaaacgttattgatgaaagaaaattaagagtacagaaacaactggataaggagaaaaatattcgtaaaagaaaccaccaaatcaaacaaggcctaatttcagaagaccacaaggatgtcatcgaagaggcattgagcagattcggctaa

SEQ ID NO: 76333 - DNA, 924 bp, Saccharomyces pastorianus
atgatatggatatgtacaaatgagctcttccatgtttgtagcatcagcaacgtagctctaggaaatatgtctgaattaacagaggcggaaaagcgcaggttactaagggaaaggagacagaagaagtttagcaatggaggtgccagctccaggcttaataaaatcaccgggcaggcaagcagtcatttgaacgcagaatcacctttagacgctcctagcgctgcaaagaccacaccacctgccagtgtgcattcggctactccagatatcaaagaagatagcaacgtagcgccccaattggacctattgaaacagctcgctgccatgcaaggccaaggtacgggtaaaagtacccctcaggactcctctacgcccgatctactctcactactaagttctatgaatactggcatgcccagtgcagagggtacaccatcgtttggtcaagcggctcctgcagccccgatcaatcaagctgctttggactaccatgattacttgctgaacagactgaaagcctggaccattcttgtgaagtgggtctttttcctactaccctatctatacctaatcacaagaccaaattcctctgtgtggccggcctatgcatttactcaatcagcttggtttgcacctttgcggaacccatcgaatttcactagaatttttgccacgtttgagttcctttccatatccatctactaccagctattgaagaatgtggaacacaagagcaagattaaaaatttacgagataccaataaacttgtcaagttagtttcactggtgcccgagggagtaattcccgtcgccaacctgaaggggaagctaattacccttttgcaatactgggatctattgtccatgctaatcactgacatttcgtttgtgctaattgtcttaggcttattgacgtacttataa

SEQ ID NO: 76334 - DNA, 522 bp, Saccharomyces pastorianus
atgaatttcaaggagccgctagtgaattttttaaaatgcgtcttgaataacataaactcggcattttcgcataggattgatcaattgcaattgcagctgttgcgggaaacaaatatcttaagggttttgaacaggggaatagagagactgtttagcgagaatccaaggactcattctgtttcccgtatcgtggtggaaaaagatgtgggctgcagaattggacgatgtgtggaaggttctaaatatgaactggtagagtccagggcgaaagaaatacaaatatattatgaaaggatggtttttgaaataacacaagaattgaaaggggacaagcgggtgtttgccttgattgcaaatctttcccaaagatatagcgcagagaggaaagaaatacgaaatgtaaaggtgcatggtgggcggccatgtaatgagaacgaattccaggtgattccgataagattcaaacctattaatttggaaagaagagcacgactgataagaaagaagaagactattaattaa

SEQ ID NO: 76335 - DNA, 1731 bp, Saccharomyces pastorianus
atgtcagctactctactaaagcaaccattatgtacggttgttcggcaaggtaaacagtccaaagtgtctggattgaaccttttgagactaaaggctcatttgcacagacaacacctgtcaccttccttgataaaactacactctgaattgaaattggatgagctgcaaactgataacacccctgattacgtccgtttagttttaaggtcctctgtatacgatgttattaatgaatctccaatctctcaaggtgtaggtttgtcttcccgtctaaacacgaatgtcatcttgaaaagagaagatctattgcctgttttctctttcaagcttcgtggtgcctataacatgattgccaagttggacgattctcaaagaaaccagggtgttattgcctgttcagctgggaatcatgcccaaggtgtggcctttgctgctaaacacttgaaaatacctgctactatcgttatgcctgtttgtacaccatctattaagtatcaaaatgtctcgagattagggtctcaagtcgtcctatatggtaacgattttgacgaggctaaggctgaatgtgccaaattggctgaagagcgtggcttgacgaacattcctcctttcgatcatccttatgtcattgccggtcaaggtactgtagctatggaaatcctaagacaagtacgtaccgctaataagatcggtgctgtctttgttcccgtcggcggtggtggtttaattgctggtattggtgcttatttgaaaagggttgctcctcatatcaaaatcattggtgttgaaacttacgatgcggccactttacataattccttgcaacgcaaccagagaactcctttacctgtggtgggtacttttgccgatggtacgtctgtgcgtatgattggtgaagaaacatttagagtcgcccaacaagtggttgatgaagttgttcttgttaacactgacgaaatctgtgctgcagtaaaggatatttttgaagatactagaagtattgtagaaccatctggtgccctttcagtagccggtatgaagaaatacatctctaccgtacatccagaaattgaccacactaaaaacacctatgttcccatcctttctggtgctaacatgaactttgatagattaagatttgtttccgaacgtgctgttcttggtgaaggaaaggaagtcttcatgttagttactttacccgacgtccctggtgcgttcaagaaaatgcaaaagatcatccacccaagatctgttactgaattctcttaccgttacaatgaacatcgtcatgagtcctctagtgaagtgcccaaggcttacatttacacttctttcagcgtcgttgacagagaaaaggaaatcaagcaagttatgcaacagttgaatgctttaggttttgaagctgtggatatctccgataacgaattggctaaatctcatggtagatacttggttggtggtgcttctaaggttcctaatgaaagaattatttcatttgaattccctgaaagaccaggtgccttgactaggttccttggaggcctaagcgattcttggaatcttactttattccattatagaaaccatggtgccgatatcggtaaggttttagctggtatttccgttcctccaagggaaaacttaaccttccaaaaattcttggaagatttaggctacacttatcatgatgaaactgataacactgtttatcaaaaattcttgaaatattaa

SEQ ID NO: 76336 - DNA, 1731 bp, Saccharomyces pastorianus
atgttgaaatatcgtacattgtctcgatcatgtcatatttttcacccaaaatctctttcaaacaataccctgaaatctgaaactactcaggaactacttcaaactgtgggattcgtaagacgctcgcaggttgggttgttccaatggctgccacttggactcagatcacttaataaagtatcaaatgctatacggaaccgaatggatagcgatggtggagccatagaagtttcattaagtgctatctcgtcaaaagcattatggcaagcgacggatcgctggaacaacagtgaattatttaaattgaaggattctaaagggaagcagtactgcttgacagcaacatgtgaggaggacattacagatttaatgaaaaattacattgctagttataaagatatgcctatcacaatataccaaatgacaagaaaatatagggacgaaatcagacccaggggtggtatcttacgtggacgagaatttttaatgaaggatgcgtattcgtttgctagtaatgaagaggatgcgtttgccagttttcaaaagctagatgatacttacaataagatattcaaagatctgaaaatcccctttgttagtgcgtgggcagatagcggtgacattggcggtgagtttagcaaagaatttcacctgattcatgaatccggtgaggataccttgatgagttgcaaacattgcggcgatatatcaactttggatatgtcccagtcatatcctgaaaaagatggtcaatattcaggtgatgtcgattgtaagtatgctttgactaaggatcactcaacattgatatgtttctactatccaaaggatagacaattgaattggaatttagcattaaatgctatggataaagacatcgatttgacgttgaggaacaaaccaaatgatcacgtcttacaagtctacgaaaaagataacgaagatattatgttcagtaaaatattaagagttatggactgtagattgaattcaaaatccaactttcctgattttccactaaagaaatacctgaaaaataattttggtcaaatcagtgacgtttctatagtggatgcacaggaaaacgaaatctgtggcaaatgtgaggaaggaaggttagaacctctcaaaagtattgaggtaggccacatatttttgctgggtaataaatactcgaagccgttaaatgtcaagtttgtcgacaaagaaaacaaaaacgagacatttgtccatatgggttgctacggcattggagtaagcaggctagttggagcaattgctgaactagggcgtgattccaatggatttagatggcccgctataatggctccatacaaagtatcgatttgtactggaccaaataatcctgaaaactcacagaggttacaggatgttaaatcaaagctgctgaatgatcctaccatgcaaaatttacagaatgacatccttgaccagttcaatgaaaaactgggtataggtgctagaataaaattatcccatgccatgggtataccattatgtgttatcgtgggctcaaaaagttggcccaatgtggaaattgaaattcgtggcataagatggggagaaaaggacctgtggagaaagcagtttgaaaaaaaatgtagcgaactgcaatggaagtgtaccaaaaatgaacatggaattgagaaacatactgttccaatccagcatttagtggaagtcattggcgtattgctaaaggatatgtag

SEQ ID NO: 76337 - DNA, 552 bp, Saccharomyces pastorianus
atggttctttttattttggagttatatacatgtatacaagacggaaatggcttgctttgtggctacatatcctttagcaatacgccaatgacttccactaaatgctggattggaacagtatgtttctcaattccatgttcatttttggtacacttccattgcagttcgctacattttttttcaaactgctttctccacaggtccttttctccccatcttatgccacgaatttcaatttccacattgggccaactttttgagcccacgataacacataatggtatacccatggcatgggataattttattctagcacctatacccagtttttcattgaactggtcaaggatgtcattctgtaaattttgcatggtaggatcattcagcagctttgatttaacatcctgtaacctctgtgagttttcaggattatttggtccagtacaaatcgatactttgtatggagccattatagcgggccatctaaatccattggaatcacgccctagttcagcaattgctccaactagcctgcttactccaatgccgtag

SEQ ID NO: 76338 - DNA, 249 bp, Saccharomyces pastorianus
atgtcaagcccaactcctccaggtggtcaacgtactttgcaaaagagaaaacagggaagttcacaaaaagttgcggcatccgctccaaagaaaaacacgaacagcaataattcgattttgaagatttattctgatgaggctacgggactaagagtagatcccttagttgtgttgtttctagcggtcggtttcatcttttctgttgttgcattacatgttatttctaaagttgccggtaagttattttaa

SEQ ID NO: 76339 - DNA, 147 bp, Saccharomyces pastorianus
atgaaggatggaagatccttcattgcaagtgggaacggccggccttgtggtcagtgttactgtcattctcgggatgggaggaagccgggtcatggcctatggtttggagcagttgggccaaggcagactggggaagagtgtaggtga

SEQ ID NO: 76340 - DNA, 1524 bp, Saccharomyces pastorianus
atgaccgcttccatcaaaattcaaccggatattgactctctaaagcaattacagcagcaaaatgacgatagttccataaatatgtatcccgtgtatgcgtatttgccatcattggatctgactcctcacgtggcatatctaaaattggcacaattgaacaaccctgatagaaaggaatcatttctgttggaaagtgctaagacaaataatgaattagatcgttattcattcataggtatctcgccacgcaagaccatcaaaaccggtcctactgaaggcattgaaacagatcctttggaaattttggaaaaggagatgtctacctttaaagtagccgaaaatgttcctggtttaccgaaattaagtggtggtgctattggttatatttcttatgactgtgttcgttatttcgagccaaaaacaagaaggcctttgaaagatgtcctaagacttccagaggcatatttaatgctttgtgataccattattgcctttgataatgtttttcagagatttcaaatcattcataacattaataccaatgaaacttcgttggaggaaggttaccaagctgcagcacaaataatcactgatatcgtatcaaagctaaccgacgattcctcgccaataccatatccagaacaacctcctattaaattgaatcaaacttttgaatcgaatgtgggcaaggaaggttacgaaaatcacgtctccactttgaagaagcatattaagaaaggtgatattattcaaggtgtgccatcgcaaagagtggcaaggccaacttcgttacatcctttcaatatttacagacatttacgtacagtgaacccatctccttacctgttttatattgattgtttggatttccaaatcattggtgcatctccagaattgttgtgcaaatcggattccaaaaatagagtcattacccatccaattgctggtactgtcaaacgtggggctactactgaagaggatgatgctttagcggaccaattacgtggctcgttaaaagaccgtgcagaacatgttatgctggtagatttagcaagaaacgatattaacagaatttgtgacccattaacaacaagtgtcgataaactgttaactattcaaaaattttctcatgtccaacatctggtttctcaagtcagcggtgttctccgcccagaaaagacaagatttgatgcattcagatcgattttccctgcaggtactgtcagtggtgctccaaaggttagagccatggaattgattgccgaactagaaggagaaaggcgtggggtttatgcaggcgccgtaggtcattggtcatacgacggtaaaacaatggacaattgtatcgctttaaggactatggtctataaagatggcattgcttacttgcaagctggcggtggtattgtttacgattcagatgagtacgatgaatatgtcgaaaccatgaataaaatgatggccaatcacagtactattgtgcaagcagaagaattgtgggccgatatcgtaggatcagcttaa

SEQ ID NO: 76341 - DNA, 2304 bp, Saccharomyces pastorianus
atggttcaatctgctgtcttagggttcccaagaatcggtccaaacagagaattaaagaaggccactgaaggttactggaacggtaaaatcactgtcgatgaattattcaaggtcggtaaggatttgagaactcaaaactggaagttgcaaaaggaggctggtgttgatatcatcccatccaatgacttctccttttacgaccaagttttggatttgtctttgttgttcaatgtcattccagaccgttacactaagtacgatctatctccaatcgacactttgtttgctatgggtagaggtttacaaagaaaggccactgaaactgaaaaggctgtcgacgtcactgctttggaaatggttaaatggttcgactctaactaccattacgttagaccaactttctccaagaccactcaatttaagttgaacggccaaaagccagttgacgaatttttggaagccaaggagttaggtattcatactagacctgtcttgttgggtccagtttcttacttattcttgggtaaggctgacaaggattctctagatttggaaccattgtccctattggaacaattgttgcctctatacactgaaatcctatctaaattggcttctgctggtgccactgaagttcaaattgacgaacctgtcttagttttggacttgcctgccaacgcccaagccgccattaagaaggcttacacttacttcggtgaacaaagcaatctaccaaagattactttggctacttacttcggtaccgttgtccctaacttagacgccatcaagggcttgccagttgctgccttacacgttgaccttgttagagctccagaacaatttgatgaagtcgttgccgccattggtaacaaacaaaccttgtccgttggtattgttgatggtagaaacatttggaagaatgatttcaagaagtcttccgctatcgttaacaaggctattgaaaagttgggtgctgacagagtcgttgttgccacttcttcttctctattgcacacaccagttgatttgaacaacgaaaccaagttggacgctgaaatcaagggctttttctctttcgccactcaaaaattggatgaagttgttgtgatcaccaagaacgtttccggtcaagacgttgctgctgccctagaagctaacgctaaatctgttgaatccagaggtaaatccaagtttatccacgatgctgccgttaaggccagagttgcctctatcgacgaaaaaatgtctactagagcagctccatttgaacaaagattgcctgaacaacaaaaagtcttcaacttgccattgttcccaacaacaactattggttccttccctcaaaccaaggacatcagaattaacagaaacaaattcaacaagggtaccatctctgctgaagaatatgaaaaattcatcaattctgaaattgaaaaggtcatcagattccaagaagaaattggtttggatgtcttagtccacggtgaaccagaaagaaacgatatggttcaatacttcggtgaacaaatcaacggttatgctttcactgttaacggttgggttcaatcttacggttccagatatgtcagaccaccaattattgttggtgacttgtccagaccaaaggctatgtccgtcaaggaatctgtttacgctcaatccatcacttctaagccagtaaagggtatgttgactggtccaattacctgtttgagatggtctttcccaagagacgatgtcgaccaaaaaactcaagctatgcaattagctttggctttgagagatgaagtcaatgatttggaagctgccggtatcaaggttatccaagttgatgagccagctttaagagaaggtttaccattgagagaaggtactgagagatctgcttactacacctgggctgccgaagctttcagagttgctacttctggtgttgctaacaagactcaaatacactctcatttctgttactctgacttggatccaaaccatatcaaggctttggatgctgatgttgtttccatcgaattctctaagaaggacgatgctaactacattgctgaattcaaaaactatccaaaccacattggtctaggtttattcgatattcattctccaagaattccatcaaaggatgaatttatcgccaagatttcaaccatcttgaagagctacccagctgaaaagttctgggttaacccagattgtggtttgaagactagaggctgggaagaaactagattgtctttgactcatatggtcgaagccgccaagtacttccgtgaacaatacaagaattaa

SEQ ID NO: 76342 - DNA, 222 bp, Saccharomyces pastorianus
atgtgggccggtaaagggaaaaaaccagaaacgggactactatcgaactcgtttagtcgcgaacgtgcaaaaggccaatatttttcgctagagtcatcgcagtcatggcagctctttcgctctatctcccggtcgcaaaactgtggtagtcatagctcgttctgctcaattgagaactgtgaatgtgaatatggaacaaatgcgatagatgcactaatttaa

SEQ ID NO: 76343 - DNA, 378 bp, Saccharomyces pastorianus
atgcctaataaagatccagagagcgttatagacaaagaaatacggaagatatcagcaagaaatgatgagcttatcaaacaggatgggactctaaaaagggaatacactacattattgagaaaagtatcgagcgtgataacggtactgaacagtattgatgatgcagatactggttctgctgaaacggaactcccacgcttaatatctcaagcaacagtagagaaagtacccgaattgaagtggtacaatgatcagatatcattaattacagaaaagttggaggacgatgaagatattgaggttcccgaggagctaatggatgcttatactctgtacaaggaaaccccattattatataatgatacgcacacaccataa

SEQ ID NO: 76344 - DNA, 4293 bp, Saccharomyces pastorianus
atgagcatacctcacagtgcaaaacagagtagccctctctcaagtcggcgccggtcagtaactaatactactccactgttaacccctagacatagccgtgataactcgagcacccaaatatcaagcgccaagaacatcacctccagcagcccatcaaccataacgaatgaaagttccaaaagaaataaacaaaatctggtactctcgacctcatttatctccaccaagaggctagaaaatagtgcgccttcaccgaccagtcccttaatggcaagacgaacgagaagtactatgaccaaggcacttttaaatcttaaagcagaaataaacaaccaatatcaagaattagctcgattgcgcaagaaaaaagacgatatcgaacatcttcgggattctacaatatctgatatatactctggatcttactctacgaatcatttacaaaagcactcgatgaggattagagcgaatactcaacttagagaaattgacaattcaataaaaagagttgagaagcatatttttgacctcaagcaacagttcgacaagaaaaggcaaagatcactcacaacatccagctcaataaaggctgacgtggggagcatcaggaatgatgatggccaaaataacgatagtgaagatttggacgaccatgatagtttgacagatcaagttactcttgatgatgaatatcttacgactcccacttctggaactgagcgtaatagtcagcagaacttaaatcgtaatagtaccgtcaactcacggaataacgaaaatcattctacgctttccattccagatttagatggatctaataaagtaaacttaaccggtgatactgaaaaagatcttggtgatcttgaaaacgaaaatcaaatattcacatccacaacaactgaagcagcaacatggcttgtaagcgattatatgcaaagttttcaagaaaagaacgtcaaccctgatttcattgctcaaaaagcaaatggcctggtcactttattgaaagaacattcggagataagaaaagatctggttttaacttcatttatgtcatcaattcaaaatctgcttctcaatggaaacaagcttatagcagcatctgcttatagggtatgtcgttacctaataaatagcttgatttttattgatgagctgttagagctaagactggatgcattcataatcatttcccttgcgaaggataattcttttcaaatagaaagggaacatgccttaaaaatggtacgaagattcattgaatacaacaacggtgttactcaaggcattatgcaagctataataagctgtgttgaaaaacctgaagactccttaaggcacatggcattagaaactttgttggaactttgttttgtcgcccctgaaatggttaaagaatgccgtggtatgagagtgatcgagggatttttacaagattatacttctttttcactcgcatcagtaatacttgatactattttacaattgatggctacacacaagacaaggcaacattttctggaagatttcaatgtatctgtgttaaccacggtcttttcggatacaaatacaaagtcaaacgttaatgtggaaaaaatgcaaaacgcttctacacttatctcaataactttgaacagctacaatggctttatgcttttttctaacaacaatttcaaaccgttaaaacagctggtgtcattcttccaaattcctatatgcgcccaatatcttatcgacatctttcttgatgttttgaaaatcaaaccactaccatacaagccaaggggcagacattctcattctttcaaaccaatcccatctcagtactacaaagaatgcatgtctgtgaatcaacggctagccttaattgtgctaattctagaaaactcggaatttgtaccccacctccttgaacttttgaacgaagaagatagagatgatcatttggtagcaaaaggcagatatcttcttaccgaatattttaatttaagaatgaatttagtcgataaaaagtatacttcagtatcaaaaccaatttacaaggagaacttcacttacgtcaatgaaacattccagttcaagaagatcgcttataaaatgaatagaaacaggaatacaattggcatgtcgggcattgattatgctcaaaatataaaatcattttccaaaaatattaaagagaatactcttctccgcgaagtagatgatttccgatttagaagaatggtttatgactctaaagttttgcaaacgaaggattttacgcgatggaattggaacataattaacgaattacttgaaggaccattactaaataaaaagcaactagaagaattagttaaatcaaccaaattcatcagaagacttttggtgttttacagaccactcagattgagattttccaacgtcaataaaggcgcaaaactatctcaaaagtatgtacaagttggatgccagtttttcaaaacactaacggcgactccagaaggaatgaaaatccttatggatgatacaaaaattataccgcaactggcgtctttaatgtttagagcaatggagggaaatatatcaggcaacatcttcaacaagaataaactacgagaaaaaataatatttggatacttcaaattcatcggaatattgacgcagtcaaagaatggggttcatatcctaacgaggtggaatttttttaccgtaatctataagatgtttcaatttgaatcgaaactggggcttgagtttctattattaacaataccagaattagatttgaaatattcatcacattgccgcgtcattatcggcaaggcccttgtagtggccaatgagaaagttaggattgaggctacaaagcatataggcgataaactaaaagaactgttatccacgaaagaaagtgatcttaagttaaaagcgaataaagtgaaactgcagcaattcaaaatggaaatgttaacaaggcaactatacgacctgagccccagcgtagtcgccgtagcagaccaagctttatatgaatgtattgtcgcgggcaatggttctgaagaactgggcacctcatttaggatgtttttaaaccaaatggtattcattaggtctccaatacttttcgagttattaagccgcccatacgggttccagttgttgaacgaaatcaattttgtgaaggaggaaagggattcgtggttatctaaaaaaaacattgagtatgttcatattgtggaggaattcctgaagaaaaatgaatcaattaatgcaaaatccctcacatttcaacaaaagagtcgcctgccattgcatttttatgaaagtctaacgaaaacagaagacggaatattactattaagccaaacaggagatttggttactttcatgaacgttataaaaaaatacgtcaacggaaacaatatggccacagtagaaaatgccaaagaaattctcgacttaaaagcagcattatggtgtgttgggtttatcggatccacagaattggggataggtctactagataactactcattggtggaagatattattgaggtggcctacaatgccagcgtaaccagcgttaggtttacagcgttttatgttctgggattaatcagcatgacccgcgagggttgcgaaattctagacgagatgggatggaactgttgtgtcagtgtacaagatgagcctatcgggatcgcactaccaaataggctcgatagatttctatcgtataacgaacacaaatggtccgcatttagcgagtattctgatgagatgattgtttttaataaaagcgatggcgacttgatagaaaaatgcttacccatcgaatttgatttggacaaactactcaaagagaaagataccgcagagaatccattaaatgaaaaaatcattactaataaatacgacaacgatatcacaagtcaaactatcactgtttcaggtgaaaatagtagtcttttcgcaaacgaaggcctttcttctccctatgttacacaataccgcaatgacgatgactccattgagagcaaggtcctacatatagtaagtcagctaggcaatcatatcctttcaaatcacgcagtgaaggagattacagaaataaacaataaatacggtccaaggctttttgaaaacgagaaaatgttcttcaaagtatttaatatgatgtcgaagtatcggtttaagccacatgttaggaagtttctttgcggactatttattaacaatagagcgcttgaaaatgtcatcaggcacgacaacaaaagagacaaaaggccggctaattttacacgttag

SEQ ID NO: 76345 - DNA, 1203 bp, Saccharomyces pastorianus
atgtctcaagttcaagaacaacatatatcagagtcacagcttcagtacgggaacggttcgttgatgtccactgtaccagcagacctttcacagtcagtcgttgatggaaacggcaacggtggcagcgaagatattgaggccaccaacggctccggcgatggtggcggattgcaggagcaagcggaagcgcaaggtgaaatggaggatgaagcatacgatgaagctgccttaggttcgtttgtgccaatagaaaaactgcaagtgaacgggattactatggcggatgtgaaaaaactaagggagagtgggcttcacactgctgaagcggtagcatatgcccccagaaaggatttattggaaatcaaaggtatatcggaagctaaggcagataagttgctaaacgaagcggcaaggctagtgcctatgggatttgtcacggctgctgattttcatatgagaagatcggagctgatttgtttgacaacgggttctaagaatttggacactcttttgggtggtggtgtggaaactggttccattactgagcttttcggtgaattcagaacaggtaagtcccagctatgtcacactttggccgtgacatgccaaattccattggatattggtggcggtgaaggtaagtgtttgtatatcgataccgaaggtactttcaggccggtaagattggtatccatagctcagcggttcggattagacccggatgatgctttgaacaacgttgcgtatgcaagagcctataatgccgaccatcagttaagacttctggatgctgctgcccaaatgatgagcgagtctcggttttccttgattgtggtcgattctgttatggctctataccgtacggatttttctggtcgtggtgaactaagcgcaaggcaaatgcatttagccaaatttatgcgtgctttgcaaaggctggccgaccaatttggtgttgcagtcgtcgttactaaccaagtggtcgcccaagttgatggtggtatggcttttaatccagatccaaagaagcctatcggtggtaatattatggcacattcttccaccacgcgattaggtttcaaaaagggtaagggatgtcaaagattatgcaaagttgttgactcaccttgcttaccagaggctgaatgtgtgtacgcgatctatgaagatggtgttggtgaccccagagaagaagacgagtag

SEQ ID NO: 76346 - DNA, 2265 bp, Saccharomyces pastorianus
atgataaaaagatggttatctgtgaataggaaaaagttacacccggagaagaacactcaagataatgacgaaattaatcggaaagcaactagcctgaagaaaacgaaaggttctggagatccctccatagcgaaatcaccaagtgctaagagtagtacatcaagcagaccttctaatcttgcgagccatgaaagaagaagcaagtttagtagtcaaacggataaccttgcaggaaataaacattaccatgagcattaccataatatggcaagtacttcagatgaaagagagtacgattcctcgactacatatgaagatcgtgcgttcgatacagagtcctccatactatttactactatgacagatttaatgccatatggggatggttccaataaagtgttcggttatgaaaattttgggaatacttgctactgcaactccgttctacaatgcctttataatatccccgaatttaggtgtaatgtgctgcgatatcctgaaagagtagccgcagtaaacagaatacgcaaaagtgatttgaagggttcaaaaataagggtattcactaatgaaagttttgaaacatctactaatagcggaaattctaatacggggtaccaaagcaatgataatgaagatgcacataaccaccaccaccttcagcagagtgatcaagataactcctcttcttctactcaagaaaaacagaataattttgaaagaaaaaggaactcgtttatgggttttggaaaaggtaaatcgaactataaagattctgcaaagaaagatgataacaatgagatggaacggcctcagcctgttcacacagttgtaatggcctctgatacattaacagagaagcttcacgaaggctgtaaaaaaattattgtgggaagatcgcttttaaagcaaagcgattccttatcaaaagcttcaactacagattgtcaagcaaattcgcattgccagtgtgattcacaaggcagtaggattacatcagtggatgatgatgtccttgttaaccctgagagctgtaacgatgctgtcaacaattctaataataataaagagaatacgtttccaacaagtgaacaaagaaaaaaagccgccttaattagaggccccgttcttaacgtagatcatttactttatccaaccgaggaagctacactttacaatggactaaaagatatatttgaatctattactgaaaacttgtcgctaaccggtatcgtttcacctacagagtttgtcaaaattttaaaaaaagaaaacgtcttgttcaacactatggtgcaacaagatgcccatgaatttttaaactttttattaaatgatttcagtgaatatattcaacgcaataatcccagagtgagattcggaccacaaaagacagacaacagcaacgacaactttataacggatttattcaaaggtacactgacgaataggatcaaatgtttaacttgtgacaatatcacctcaagggacgaaccatttttagactttccaatagaagtacagggtgatgaagagactgatatccagaagatgttaaaaagctatcatcagcgtgagatgttgaacggggttaacaaattttattgtaacaaatgttatggtttacaagaagcagaacgtatggtcggactgaagcaactgccccatattctgtcattgcacctaaaaagattcaagtattcagaggagcaaaagtcaaacatcaaactttttaacaaaatactctatccactaactttggatgtttcttccacttttaatacatcagtatataaaaaatatgaactaagcggcgtcgtcatccatatggggagcggtccacagcatggtcattacgtatgcatttgcaggaacgaaaagtttgggtggcttttgtatgatgacgaaacggtggaatccataaaagaagaaactgtgttacaattcacaggtcatccaggtgatcaaactacagcctacgttttattctataaagaaacacaggctgataagaccgaaaatcaaaatgaaaatatagacacttctagtcaagatcaaatgcagactgacaataacattgaacagttaataaaatgcgatgattggttaagggatcgtaaattgagggcagctgcaaatattgaacgcaaaaagaccttggggaatatacctgaagttaagactgcagaaaccaagacgccattaaatgataaaaaacgcaataagcaaaaaagaaaatcgagaatattgagcttcatcaaataa

SEQ ID NO: 76347 - DNA, 1293 bp, Saccharomyces pastorianus
atggcagagaaaatcttggaaaataaagaccctaaactagaagcgatgacagtggaccatgaagtttcagcgccgaagccaatccccgtggatgaacctacgctgactagagtcgccagaccgttaagacatgtaagacatattcccgttaagtcattagtttttcattctaaacacggtcccattactttttcatatgagaacaaaattaagttgcccataagtaaaaacaaactggtagttcaagtgaactatgtaggtttgaaccctgttgatatgaagattaggaatggttacaccaagcctatttatggtgaagccggcattggaagagaatacagcggagtgataacacatgtcggtgataatttgacaaatagatggaacgtgggtgacgatgtgtacggcatttactatcatcccaagttagccattggcgccctgcaaagttcgttgctcattgatccgcgtgtcgatcctattttaatgcgacccaaaaatactctatcaccagaaaaggcagcaggctccttattctgtttaggaacagcgcttaatctgttagctcaactaaaggagaaggatcaattgaatacagaatctaatgttttaataaacggtggtacaagctctgtagggatgtttgctatccagttattgaagcgttactataaagtttctaaaaagctagtagtggtaacgtcaggtaatggtgcagcagtcctgtcagaacatttcccggatttgaaagatgaaatcattttcataaattatctgtcatgtaggggaaaatctagtaaaccactcagacgtatgttggataccggtaaagttgtagattatgatgattttaatactctcaaagaaaccgaagattatactcagggtaaatttaatgtcgtgttggacttcatcggtggttatgatatcttgagtcactcgagttctttaattcacgctaaaggtgcttatattacaacagttggtgattatgttggaaattataagaaagacgtctttgattcttgggataaccctagcgccaatgcaagaaaaatgtttggatcaatgttatggtcatacgattattctcatttttactttgaccccaatatcaagattatccccaagaagaatgattggatacatgaatgcggcaagctgctaaatgagggagtcgtagattgcgttgttgataaggtttattcctggaaaaatttcaaggaagcattttcctacatggctacacaacgtgctcaaggtaagcttataatgaaagttgaaggtttttga

SEQ ID NO: 76348 - DNA, 627 bp, Saccharomyces pastorianus
atgtacagcaatcataatttaaattcggatgactgttgcttcgattggaatgaagagaaggccgcagaactacagcgtacaggtgtttcttttgaccggagtttaacacctcaatctttaagaacatctacacgtagactatcagaagagaacaaacaacaaagtggcactatgcacattgacacttccccttctgtggtttcagatataatatcaagtagacgagatcgttcacaggatttttttgggcctcattcttcatcccctattgtcccttcagaacgacaacgagcggatcagagatcacggttggagtccatgagattaactagacgtcgagacaaaatgaccaaagtacgcggtggcctagaaaagatggaagaaatgatcatgcaaggtgaacaccttagagaaatgcaaaggctaaagcaggaagcacaaaagaacgctctaccctctgacatggctgaatatatggaatggcaaaacaacgaggatttggaagacgatgagttgcttgcctttattgaaaaacaggaaacttataaaaatgaattagaacactttttgaacaatgctaataaaaatgtttatgagaacaactcgtatccgaactctcatacgtga

SEQ ID NO: 76349 - DNA, 4176 bp, Saccharomyces pastorianus
atgtattcaactccactaaaaaagaggattgattacgatcgcgaaacgtttacggcttcggcttccttaggaggaaatcgcttagggaatcggccaagagatgaccaaaacaacggtaagcccaacctgtcgagccgttccttcctaagcgaaaaaaaaaccagaaaagatgtattaaacaagtatggcgaggctggaaatactattgaatcagaacttcgtgacgtaactacacacgtcaagataagcgggttgacttcctctgaaccgttgcagttggctagtgaatttgtccaggatttgtgctttagggacagaaatacgccaatactagataatccagactattatagtaaaggtttggattataatttctcagatgaagtcggtggattaggtgcatttacccccttccaaagacaacaagtgacaaatataccagatgaagttttatcacaagtttcaaataccgaaataaagagtgatatgggtatttttctcgaactgaactattgttggataacctctgataataaattgatcttgtggaatatcaataatagttcagaataccactgtatcgatgaaatcgagcacaccattttaaaagtgaaactagttaagcctagcccaaacacttttgtttcttctgttgaaaatttattgattgtcgccactctttttgatatctatattttgacaatatcatttaatgaccgtactcatgagttgaatatctttaacacaggattaaaagtaaatgtaactgggttcaacgtttctaacataataagctacgaaaggactggacaaatatttttcactggtgcgactgatggtgtcaacgtgtgggaattacaatataactgctcggagaacctattcaatagcaagagtaacaaaatatgtttgacaaagtcaaacttagcaaatttactacctacaaaactaatacctagcatacccggaggaaagttgatacaaaaagtactagaaggggatgcaggtaccgaagaagaaactatatcacagctcgaagttgaccagtcaagaggcgttttacatactctatcaacgaaatctattgtcagatcttacctaattactagcaacgggctagaaggaccggtcctcattgatgctgctcatatcaggcgtggaatgaatgcattgggtgtaaaaaattcacctctactcagtaatcgagctttcaagattgccaaaattgtttctatctctatgtgtgagaacaatgatttattcttagctgttataactactactggggtacgcttgtatttcaaaggttccatttctaggagatcgattggctcattaaaattagactctgtaaagtttcctcctaccagtatatctagctccctcgagcaaaataaatctttcataatcggtcatcaccccttaaacacacatgatacaggcccactttcaacacaaaaagctagttcaacttatatcaataccacttgcgctagtacgataatatcaccaggtatatactttacgtgcgtgaggaaaagagctaattccggagaactatctaaaggtattacaaataaagctttgctggaaaataaagaggaacacaaactttacgttagtgctccagattacggtatattaaagaattatggtaaatatgtagagaataccgcactactcgatacgacagatgaaattaaagagattgttcccttaacaagatcttttaattacacttctactccccaaggttacgccaatgtgtttgcctcacaatacagtgcaggaccattaaaagttgccgttttaacaagcaatgccttagaaatttattgctatcgcacgcccgacgaagtgttcgaaagcttgattgaaaatcctttgccatttattcacagttatggtttatctgaggcttgctctaccgcactttatttagcttgtaagtttaataagtcagagcatattaaatcaagtgccctggccttcttctctgccggtatacctggggtagttgaaataaaaccgaaaagttctagagaaagtggcagcgtgccgccaatctcacaaaatttattcgataaatctggtgaatgtgatggtatagtactatctcccaggttttatggttctgcgttattaattacaagattatttagccaaatatgggaagagagggtctttgtttttaaaagggcttccaaaacggaaaaaatggatgcttttggtatttctataactaggccacaggttgagtattatttatcatcgatatctgttttggcagatttcttcaacatccaccgtccttccttcgttccatttgtgcctccgaaaggtagcaatgctataactgcatccgatgctgagtctattgctatgaatgctcttatcctcttaataaattctattaaggatgcgctttcccttataaatgtcttctacgaagatattgatgttttcaaatctttgctaaatacattgatgggtgcagggggagtttatgactccaagacacgtgagtatttttttgatcttaagttccatgatttgtttacccctaacgcaaaaaccaaacaattaataaaagagattttaatagaagttgtaaacgctaatattgcaagcggcacatcggcagattatattgtgaacgttttaaaggaacgctttggatctttttgtcatagtgcagacattttgtgttacagggcaggagagcatttagaagcagcacagaagtttgaaatgatagattctaaaatatcaaggaaccatttagataccgcaattgacctttatgaaaggtgtgccgagaatatagaattatgtgaattgagacgtgtggtggatatcatggtaaaacttaattaccagcctaagactgttgaatttctacttagatttgcagataaaattgataaaggaaaccaagcacaagagtatgtgtctagaggttgtaatactgccgatccaagaaaagttttttatgacaaacgcataaatgtgtacactttgatttttgagattgtcaaaagcgtggatgactatacatctatcgaacaatccccttcaattgcaaatatatctattttttcaccagcttcgtcactgaagaaaagagtttactcagtgataatgaatagcaataaccggttcttccattattgcttttatgattggcttgtcgcaaataaaagacaagactacttattacgtttggattctcaatttgttttaccgtacttgaaagaaagagcagaaaaatctctagaaattagtaatctgttgtggttctacttatccaaagaagaacattttcttgaagcagctgatgttttatatgctctagctagttctgattttgacttaaaattaagtgaaagaatcgaatgcctagcaagagcaaacggtctttgtgatagctcaacgtcattcgaccaaaagccggcactggtccagttatctgagaacatccacgaacttttcgacatagcttccattcaggatgacctacttaatttggtaaggaatgaaacaaggattgacgaagattatagaaagcaactaacacttaaactaaatggaagggtgctcccattatcagatctctttaatgattgtgcagacccattagattactacgaaataaaactaagaattttcaaagtatctcaattcaaagatgaaaaagtcattcaaggagagtggaatcgattgctcgatagcatgaaaaatgctccatcgcctgacgtgggaagtgtaggccaagaatcctttctttcctcgatatccaacacactaattcgaattggtaaaacaacacacgatacggacgttgttttccctgtacatttcttaatgaataaaatattagaatcgttcattgataaaagttcagctgctgatggatctgtatgttcaatgttcttgcttgccggagtttctcatttaaaactctattacattctaagtcgtatcatagaaaactctgaaggaaatgtcgaattggcaaaaaaagaaatggtatggttgatcaaagattggtaccaaagtgattcagatttacgcggttcaattgcgccagaacaaatcaaaaaattggagaaatatgatccgaataccgatcccgttcaagattatgtgaaggatcgtcatcatggcctgaaatga

SEQ ID NO: 76350 - DNA, 1098 bp, Saccharomyces pastorianus
atgtctttttttaatcgatcaaatacaacctcagctttgggaacgagtactgcaatggcgaatgaaaaggatttggccaatgatattgtcattaatagcccagcagaggactcaatatcggatattgcgttttcaccgcaacaagatttcatgtttagtgccagttcctgggacggtaaggtacgtatttgggatgtccaaaatggtgtacctcaatgtagagcgcagcatgaaagctccagccctgtattatgtaccagatggtcgaatgatggtacaaaagtagcctcaggcgggtgtgataatgccctgaaattgtacgatattgccagtggtcaaacacagcaaattggaatgcattctgcgccaataaaagtattacgttttgtacaatgtggaccatcgaacacagagtgtatagtaaccggatcctgggataaaaccataaaatattgggatatgagacaaccccagcccgtatccaccgtaatgatgcctgaaagagtatattcgatggataataaacagtctctgttagtagtggctactgccgaaagacatatcgctattatcaatctagcaaacccaacaacgatttttaaggcaaccacgtcacctttaaaatggcaaactcgatgcgtggcatgttataatgaagccgatggatatgcgattggttcagtggaaggtagatgctccataaggtatatcgatgatggtatgcagaaaaaatcaggcttttcatttaaatgccatcgtcaaaccaatcctaatagggcacctggctccaatggtcaatctctagtgtaccctgtaaatagcattgcatttcatccattatatggtacttttgttacggctggtggtgatggtaccttcaatttttgggataagaatcaaaggcatagattgaaaggctatcctactttgcaagcatctattcctgtatgcagcttcaataggaatggtagcgtatttgcgtacgctctaagttatgattggcatcaaggccatatgggcaacagacccgactatccaaacgtcattaggctacatgccacaactgatgaagaggttaaagagaaaaagaaaaggtga

SEQ ID NO: 76351 - DNA, 321 bp, Saccharomyces pastorianus
atgaaatcttgttgcggtgaaaacgcaatatccgatattgagtcctctgctgggctattaatgacaatatcattggccaaatccttttcattcgccattgcagtactcgttcccaaagctgaggttgtatttgatcgattaaaaaaagacatagttccccacttttcctcttcttacgtatttctttattttattgtaatatgcagattaaggtttatgatatttgatcaaggtggatgtgccggaatgattggtatggtaagcttgcccaattcttataagtcagtctctgttcaagtaaaatggttatatagtgcttaa

SEQ ID NO: 76352 - DNA, 2439 bp, Saccharomyces pastorianus
atgagttataaagtgaatagttcgtatccagattcaattcctcccacggaacaaccgtacatggcaagccagtataaacaagatttgcagagcaatattgcaatggcaacgaatagtgaacagcagcgacaacaacagcagcagcagcagcgacaacaacagcagcagcaacagcagcagcagcagcagcagcagcaacagcagtggataaatcaacctacggcggaaaattcggatttgaaggaaaaaatgaactgcaagaatacgctcaatgagtacatatttgactttcttacgaagtcgtctttgaaaaacactgcagcagcctttgctcaagatgcgcacctagatagagacaaaggccaaaacccaatcgacggatccaaatctaaagaaaacaatggtaaccagaatacgttctcgaaggtagtagatacacctcaaggctttttgtatgaatggtggcaaatattctgggacatctttaataccagttcttccagaggtggctcagagttcgctcagcaatattatcaactagttcttcaagaacaaaggcaggaacaaatatatagaagcttggctgttcatgcggcaaggctacaacacgatgcagaacgaagaggggaatatagtaacgaggacatagaccccatgcacttggctgctatgatgctaggaaatcctatggcacctgcggttcaaatgcgcaatgttaatatgaaccctataccaattcctatggttggtaaccctatcgttaataatttttccattccaccatacaataatgcaaaccccacgactggtgcaactgctgttgctcccacagcgccgccttccggcgattttacaaatgtagggccaacccagaatcggagtcaaaacgttactggctggccagtctataattatccaatgcaacccactacggaaaatccagtgggaaacccgtgtaacaataataccacaaataatacaactaataacaaatctccagtgaaccaacctaaaagtttaaaaactatgcattcaacagataaaccaaataatgtcccgacgtcaaaatctacaagaagtagatctgcaacctcaaaagcgaagggtaaagttaaagccggtctagtggctaagagacgaagaaaaaataataccgctacagtttccgcgggatcgacgaacgctggttcgccaaatattaccacaccaggctcaacaacaagtgaacccgctatggtaggttcaagagtaaataagactccaagatcagatattgctactaacttccgcaatcaagcaataatatttggcgaggaagatatttattctaattccaaatctagcccatcgttggatggagcatcaccttccgctttagtttctaaacagcccacaaaggtaaggaaaaatacaaaaaaggcatccacctcagcttttccagtagagtctacgaataaactcggtggcaacagcgtggtgacaggtaaaaagcgcagtccccctaacactagagtgtcgaggaggaaatccactccttctgttattctgaatgctgatgccactaaggatgagaataatatgttaagaacattctcgaatactattgctccgaatattcattccgctccgcccactaaaactgcgaattctctcccttttccaggtataaatttgggaagtttcaacaagccggctgtatccagtccattatcttcagtgacagagagttgcttcgatccagaaagtggcaagattgccggaaagaatggacccaagcgagcagtaaactcaaaagtttcggcatcatccccattaagcatagcaacacctcggtctggtgacgctcagaagcaaagaagttctaaggtaccaggaaacgtggttataaagccgccacatgggttttcaaccaccaatttgaatattactttaaagaactctaaaataatcacttcacagaataatacagtatcccaagaattgccgaatgggggaaacatactggaggcgcaagtaggcaatgattcaagaagtagtaaaggcaatcgtaacacattatctactccagaggaaaaaaagccgagtagtaataatcaaggatatgattttgacgccctcaaaaattcaagttctttgttgtttcctaatcaagcttatgcttctaacaatagaacaccaaacgagaattcaaatgttgctgatgaaacctctgcatctacaaatagtggcgataatgataacacattaattcagccctcatccaatgtgggtacaactttgggtcctcagcaaaccagtactaatgaaaatcagaatgtacactctcagaacttgaagtttgggaatattggtatggttggagaccaaggaccggattacgatctcaatttactggatacaaatgaaaatgatttcaattttattaattgggaaggctga

SEQ ID NO: 76353 - DNA, 3342 bp, Saccharomyces pastorianus
atggatcaacaatttctaagtcaacttgagcaaactttgcacgctatcacttctggtgtaggcttgaaggaggctacaaaaactttgcaaactcaattttatacccagcctacaactttgccagctttgattcatattttgcagaacggctccgatgattcgttgaaacaactagctggtgttgaagctagaaagttggtttccaagcactggaacgccattgatgaatccactagagcctccatcaaaacatctcttttacaaacagcatttagtgagccaaaagaaaatgttcgtcattccaacgctcgagtaattgcttctattggtactgaagagctagatggtaacaaatggccagatttagtccctaacctaatccaagctgcttctggtgaagacgttcaaacaagacaaactgccatttttattttgttttctctgttggaagatttcacctcttctctatctggccacatcgatgactttttggctttgttctctcagacaattaatgatccatcttctttggagatcagatcattatctgcccaggctttgaaccacgtttctgctttgattgaagaacaagaaaccatcaaccctgttcaagctcaaaaattcgccgcctcaattccatctgtggttaacgttttagacgcagttatcaaggccgacgataccatgaacgctaaattaatctttaactgtttaaacgatttcctgctattggactcccaattaacaggaaactttattgtggatttgattaagctgtctttacaaattgctgttaacagtgagattgacgaagatgttcgagtttttgctcttcaattcatcatatcttcattgtcctacagaaaatcgaaggtttctcaaagcaaattgggcccagaaattactgttgcagctttgaaggtggcttgtgaagagatcgatgttgacgatgaattaaacaacgaagacgaaacaggcgaaaatgaggaaaatacaccctcttcttctgctattagactgttagctttcgcttcctctgaactgccaccatcccaggttgcttccgttattgttgaacacattccagctatgttgcaatccgcaaacgtttttgagagaagagctattcttttagctatttccgttgctgttactggttctccagactacattttgtctcaattcgacaaaattatccctgccaccataaacggtttgaaggatactgaaccgattgttaaattagctgctctgaagtgtattcaccaattaaccactgacttacaagacgaagttgccaaatttcatgaagaatacttgccattgatcatcgatatcattgattctgcgaaaaacattgtcatttacaactatgcaactgttgctttagatggtctgcttgagttcattgcttatgatgctatcgctaagtacttggatccattaatgaacaaactattctatatgttggaaagtaatgaatcatccaagttgagatgtgctgttgtttctgcaattggttccgctgcttttgcagcaggttccgcgttcattccatatttcaagagtagtgttcactatttggaaaaattcatccaaaactgttctcaaattgaaggtatgagcgaagatgatatagaactaagggccaacacttttgaaaatatttctactatggccagagccgtcagatcagacgcatttgccgaatttgccgaacctttggttaactccgcctatgaggccatcaaaactgattctgctagattaagggaatctggttatgcattcattgcaaacttggctaaagtttacggcgaaaattttgctcctttcttgaaaactatcctaccagaaatcttcaagacactagaattagatgaataccaattcaacttcgatggtgatgcagaggatttagccgcatttgctgattctgccaatgaagaagaactacagaacaaattcaccgttaacactggtatttcctatgaaaaggaagttgcttctgcagctctatccgaattagcattgggtacgaaggagcatttcttgccatacgtcgaacaatccttaaaggttttgaatgaacaagtcgatgagtcgtacggtttaagagaaaccgctctaaacaccatctggaatgttgttaagtctgtcctgttggcttccaaagtagaaccagaaagctatcctaagggtatcccagcctcttcctacgttaatgctgatgttttggcggttattcaagctgccagggaaacttccatgggtaacttaagcgatgaattcgaaacctcaatggtcattaccgttatggaagattttgccaatatgattaagcaatttggcgcaatcatcatcatggacaacggcgactcttctatgctagaagctttgtgcatgcaagttcttagtgtcttgaagggtacccatacttgtcaaaccattgatatcgaggaggacgttccaagagatgaagaattagacgcttctgaaaccgaagcaactttacaagatgttgcattggaagttcttgtcagtttatctcaagctttagctggtgattttgccaaagtctttgacaacttcagaccggttgttttcggattattccaatctaaatccaagaataagagatcatccgccgtcggtgccgcctctgaattagctctaggtatgaaagaacaaaatcctttcgttcatgaaatgctagaagccttagtcattagattaacaagcgataaatctttagaagttagaggtaacgctgcttatggtgttggtttgttgtgtgaatatgcttctatggacatctcagccgtttatgaacctgttttgaaggcgctttatgagttactaagtgctgctgaccaaaaggccttagcagccgaagatgacgaagccaccagagagattattgatagagcatacgctaatgctagtggatgtgtggccagaatggctttgaagaacagtgctctagttccattggaacaaactgttccagcattattggcacatttaccactaaacaccggttttgaagaatacaatccaattttcgaattgatcatgaaactataccaggaaaatagtcccgttatcacaaacgaaaccccaaggatcatcgagattttcagtgctgtgtttaccaaagaaaatgatagaattaagttagaaaaggagtctactctaggtagggaagagaatatggaaagattaaagcaattccaaaccgaagagatgaagcataaggttattgaattattgaagtatctaaacactacttacaacggaattgttgctcaaaatccggttttagctgccgtcattgcttga

SEQ ID NO: 76354 - DNA, 564 bp, Saccharomyces pastorianus
atgctacctttatatcttttaacaaatgcgaagggacaacaaatgcaaatagaattgaaaaacggtgaaattatacaagggatattgaccaacgtagataactggatgaaccttactttatctaatgtaaccgaatatagtgaagaaagcgcaattaattcagaagacaatgctgagagcagtaaagccgtaaaattgaacgaaatttatattagagggacttttatcaagtttatcaaattgcaagataatataattgacaaggtcaagcagcaaattaactccaacaataactctaatagtaacggccctgggcataaaagatactacaacaatagggattcaaacaacaatagaggtaactacaacagaagaaataataataacggcaacagcaaccgccgtccatactctcaaaaccgtcaatacaacaacagcaacagcagtaacattaacaacagtaacaacagtatcaatagcaacaaccaaaatatgaacaatggtttaggtgggtccgtccaacatcattttaacagctcttctccacaaaaggtcgaattttaa

SEQ ID NO: 76355 - DNA, 2121 bp, Saccharomyces pastorianus
atgagagtaagaccaaagaggtcggtcataacactcatggcgatagtagtcgtgatgctcatcctcagaaaccagttctactcatcacgaacgcgagggcatgggcaggaaccagtcatctcctccagccaaaagaatctttatgacgggtggataacacccaatttctatagaaagggtgatcccttggaattgattgtgaataagatagaatctgacttaacgcaattaccatacgcatattatgacttgcccttcacttgtcctcctactatgcataaaaaaccgcttcatttatctctaaacgaaataataagaggggataggaaatgggaaagcgactataaactcaaatttggcgaagacaatccatgtgaaacgttgtgtgcccggaaaactaccaaagagggcatgcagaccttagacaagttagtcagggagggatacgtcgtacaatggctaattgatgatgaattaccggctgccactacctttatttccaccactgatcataaaaaatactatgcatctgggtttcctttaggtttcatagatcctgatacagataaaacctatctgcataatcacgtaatgctggtaatacgttttcatgccagtgataatgataaaaataccatagtcggctttgaagtatatccaagatctgtgtcagattatcattgtcctggggcatcgaagaactacgaacaatacgaaatagtcattcctgaggatgaaaatgagttgacatatttgccatttacttactccgtatattggagggaagaaattgaagtagactggaatcatagatgggattatttcttgaacgcaggtgagttatctgacgaacagagcattcagtttcattggatgagcttagccaattcagtgggaattgtattgtccatctcatttatcacgctcattatttacgtacgagtcatgtacacggataaaagtaattcaaagtcccccaaatacatgataaatatagaaggaattgaaacagaggatgacctggacgatgacaagtatggtaaatactccgtttacacggtggcgaaagactggatacaaaatggtagaccaaatttatttggtttaaaagttttaatccttctggtctcatttggggtgcaatttttatttaccataattggatccttaacgatatcatgttcaatgaacaaattgcataatgtaagaaacagtgtgctaactatggccattttatttttcgtacttggagcattcatggcatcattcgtagggacaagactcagtatggtaacgaaaacgaaaagaaccaaggccaattaccttgacgataacagatacctcaaagactacaagaagtttagtcccatttttacgatactttgtgggtccagcttacctggcattgtaatggtgagcacatttttattaaatagtattgtttgggcacatgattctacaagtgcattaccattcaagactattgtgtttttcatgagcatttatttcatcgtctgtataccactcagcttgtttggtggtattgtagctaataatatacctttgcctcaatattggttgagtggaattactaaagatgaaagcaatagcgatggcaatggattatttgtacctaaatcacgagccaagttcaacccgttggtttactgcggcatttatttatgtggtattttccccttgttagtaatttacgtggaaatgcaatacgtttacaaatctctctggttggagaaaactacattttattatttttacggattcctttttttgagtatcatactattatgcgtgttaactatggagatatcaattattggaagttatttattaatgagattttgcttcgaagataaggtggttcgcaacaattggagatggaagtgctttgaaatgggatttagcggtggtgtatatatggaattgtattcgctatattacattttcgcagtgctaaacatccatgggttttcatctatcttaatttccatttgttatagtttaatcttcaacgtaatgtgcagtttagggcttggcgcattaagttacttaacggcttcatggtttataaataaaatataccaccagaaagtcaacctgtaa

SEQ ID NO: 76356 - DNA, 3123 bp, Saccharomyces pastorianus
atgagtaatgacagggaagtacccacactctcgcagctcaacacaactgtcagcagagataaagacgtatcggacactttgtcaccggattttgacagcaaaggaagtgcaaccgggcgtgacggtggcaatttcccaatgtatattgccattaacgagtattttaagcgaatggaagatgaactagatatgaagcccggtgacaagatcaaagtaataactgatgacgaagaatacaaggatggctggtattttggtcgaaatctgagaaccaatgaggaaggtttatatccggtggtctttactcaaaagataacagtggagaaggctccgacattgatgagagccaagtctaccaaaaggatatatagcccattaaccaatgaagatcctcttctttccagcacttttatcagtgaaaacgattcaaacagtgaactgccaaccccgcaaccaattgaaaccgccgcctctatttcgagaactgccaatggaaagatcgaaagaaacttgtctttaaagaatacaatgagtgacatagacaatgcactactggagtttaaagacgactctataggtccaccagatcgtttcaccaattcgggcagagacgaggaacatagcattacgcatgaaacaattctatcagccactgatggactggatgtagtcgaatctaacagtaagccaacaacgagtagttctactgggttcctgaacggagatttggaaaatcaagctactttaattaatggaattgatactactaaattgaaccctgtagaagcagagttttggtcacccgaagaaataacagcttattttattatggaaggatacgatgtccaatctgcctctagattccagaagcacaaaatatcgggtaaaattttgttagagttagagcttgttcatttaaaagagttgggcataaattcttttgggacaagatttgagattttcaaagaaatagaaaaaatcaaagaggctattagaactaatggccgctccctgaatagagctagtaagaccaataactctaacatttataaccaattgatgcctcccgcaaacgttgaccagagagcttcctacagaggccatgttagaaagacttcacagtcgttagaggaccttccgtcacaacagaattttatccccactcccagaaatactaggaactcctcagcttccaagcaccggcctaaatctttagtttttgattcacaagaggctaatgctaatatagctccagatgttcaaattcctcaggtggtagaggaaatggcaggtaatgaaaatttgtttgtttctccgaggagagcccccaaacccccatcttaccctagtccagcacaacctccaaaatcgcccctattgaataacacaaggacgtcaccttctcctactcaactttattcatggcaatcacctactttatctttctcagggcctaaaaggacttcttatatcgatcaatattcttcatcagattctaatttcaattcccgttccgcactcccaaagaacaaccaaggcggtgggaaggcgttgtcacctattccatcccccacccgtaattctgttagaaatgaagatagtgaaggcaagctaacatcgtcctcgaagaggaattctgtcccttattatggatacgctcctgaatcttcttcggatagaaaatcctcttgttccagccatgaggaagagcagtttcaagaaacaatgaacacattcgaaagacccacgtccagtatatacgctgatggatctaccattgcatccataagtaatgacagattggcacatgagaaggaggggaagaaaaaaccaacgagacactcgtcttcattatcttctaaatcaaaaagcgattccaggaggaactcgtctttaaagagaagcagcagtgcatcgcgaactagttcattcaaaaaaagttccttcatgctaagtccctttaggcaacaatttactgataatgctgctcgctcttcaagtcctgaagagaatcccataacctcaatgccgtcagaaaaaaacagctcaccgatagttgataaaaagtcttccaaaaagagtagatctaaaagaagatcagttagcgcaaaggaagctgaaatttttaccgaaactgtgaaagatgataaaaataagaggtctgcgagtgaggctattaaaggtgaaacgctcaagggcaaaagcttgcgtcaaatgaccgctagacctgtagccaagaaaaagcaaacttctgcatttatagaaggtttaaggagtattagtgttaaagaggcaatgaaggatgctgacttttctggttggatgagcaagaaaggcagcggtgccatgagtacttggaagacgagatttttcacattgcatggtactagattgtcatacttcagctccactacggacacgagagaaagaggtcttatcgacattactgctcatcgcgttgtgcctgctaaggaagatgataaactagtttcattatatgcagccagtacaggtaaaggacggtattgtttcaaactattacctccgcaaccaggatcaaagaaaggtttgacatttacacaacctcgcacgcactattttgcagtagataataaagaagagatgagaggttggatggctgcactaattaaaaccaccattgatatcgacacatcagtgccaattatcagttcctatacaacacctacggtttccttgagcaaagcgcaagagatgttagcagaagcgagagaagagaccaagctaagggaacagcaaatgctagagaacgaggaagatgaggaccagtttttatgggatcaacagcagcttcaacagcagcaacatgacaataatcaagggcaagctgatcgcacaatatcagcgtcaacccaacgaacttccgacgaggataatactatatctactccgaatttgtcctctgctaacaatacaaccattggctcaaatggattttccagtccgttcttactagcttccggattgttatcgcctggagtggctcgcaatagtagtatgcgtggaacagagaaaaagggtaaattctcaacggaagaggattacttcggggataattcaaaacataaaaccgacaaaatataa

SEQ ID NO: 76357 - DNA, 1104 bp, Saccharomyces pastorianus
atgtcaatatcatcaaagataagaccaactcctcgtaaaccttcacgtatggctaccgaccattcttttaaaatgaaaaacttttatgccgatcctttcgctatatcatcaatttctttggcaattgtatcgtgggtcatcgccatcgggggctccatctcatctgcatccaccaatgaatccttcccacgttttacttggtggggtatagtataccaatttctaattatttgttctttaatgctgttctattgttttgatttagtcgatcattacagaatcttcatcaccacatctattgcagtggcatttgtgtataatacaaacagtgcaacgaatttagtgtatgcggatggtcccaagaaagctgctgcttcagcaggtgtcatcttactttccatcataaatttaatctggattctgtactacggcggtgataatgcttccccaaccaatagatggattgattcgttttccattaagggtatcaggccttcgccattagagaattctcttcatagagctcgtcgaagaggcaataggaacacaacgccttaccaaaataatgtctataatgatgctatacgagactcaggctacgcgacacagtttgatggatatccacagcagcaaccttctcacacaaattatgtatcttctacggcattggctggttttgagaatactcagccaaatacttcagaagccgttaatcttcacttgaacactctacaacaacgtatcaatagcgcaagcaacgcgaaggaaaccaatgataatagcaataatcaaaccaatactaatataggtaatacgttcgatactgatttttcaaatggcaatacggaaactacgatgggagacactttgggtctgtatagcgatatcggtgatgataatttcatttacaaggcaaaagcactgtacccatacgacgctgatgacgatgatgcttacgaaatctcatttgaacaaaatgaaatcctacaagtctctgacattgaaggcagatggtggaaggcaagaagggcaaacggtgaaacaggtattattccaagcaattatgttcaactaatcgatggtccagaagaaatgcatcgttaa

SEQ ID NO: 76358 - DNA, 735 bp, Saccharomyces pastorianus
atgtctgctgttgaaatttcccctgacgtgttggtgtataagtctccattaacggagcaatcgacagaatacgctagtatttccaacaattcagaccaaaccattgcatttaaggtcaagaccacagccccaaagttttactgcgtgagaccaaacgccgcagttgttgctccaggtgaaacaatccaggttcaagttatcttcctgggtttgactgaagagcctgccgcagactttaagtgccgtgacaagttcctggttatcacgttgccttctccttacgacctcaatggcaaggctgttgcagatgtttggtccgacttggaggctgagttcaagcaacaggctatctctaaaaagataaaagtcaaatatttgataagtccagatgtacacccagcacagaaccagaatatacaggaaaacaaggaaactgttgaaccagtagtccaagacagtgagccaaaggaagtgcctgctgtggtaaacgaaaaggaggtccctgctgaaccggaaactcaacctcccgtccaagtaaagaaagaagaggtcccacctgtcgttcagaaaaccgttcctcatgaaaatgagaagcaaacgtccaacagcactccggccccacagaaccagataaaggaagccgcaaccgtacctgcagaaaatgaatcatccagcatgggtatattcatattggttgcactccttatcttggttttaggatggttctacagataa

SEQ ID NO: 76359 - DNA, 345 bp, Saccharomyces pastorianus
atgggcttatcgcgctggcacgacatgaattcaaggccagcagaggaaaagagcgaagaaatgcaacaggatgcgcactactacgcccttgcggcaagtgatagtttaaatgcaagtgtttctaacgaatatggtaatcaagtaatgaactcgttttggaaagtgggtatagactatccctatgtggacgatgaagcaattagaaacagagatgtcgaaaataacttaccttctttaaagcaaagtgtttataatgctaatgaaccaaatgctacctcgtctgcattttcaaccgcttcatacgcacatgaaactttcgattttagaaaccttaaactaagataa

SEQ ID NO: 76360 - DNA, 1482 bp, Saccharomyces pastorianus
atgagtaacgatgaaggagaaacatttgccacggagcagactactcaacaagtttttcagaagctaggtagcaacatggaaaatcgagtttgttttgattgtggtaacaagaatcctacttggacttcggtaccttttggtgtgatgctgtgtattcaatgctctgctgtgcatagaaacatgggtgttcatatcacctttgtaaagtcttctacattagataaatggacaattaacaatttaagaaggtttaagttgggtgggaaccataaggctcgtgattttttcttaaagaacaatgggaaacagctactaaatacagcaaatgttgacgcgaaaacaaaatatacgagccctgttgctaagaaatataagatacatctcgacaagaaggttcaaaaggatatggagttatacccatcagaattagtcttgaacggtcaagattcttcggactcaccgttggacaccgattcagacgcttccaggtcgacttccaaagaaaatagtgttgacgattttttctctaattggcaaaaaccaagctccaattccagttctaaactcaatgtaagtacaggctctctcgccccaaaaaacaacaccacaggcagcacacccaagaccactgtcactaaaacgagaagttccatcttaacggcaagcagaaagaaaccggtattaaactcgcaagataaaaagaaacattcaattttgtcttcgtcaagaaagcccactagactaaccgcaaagaaagtcgacaaatcacaggcagaagacttgtttgatcaatttgaaaaagaggctcaacaagaaaaggaggacgagttcactaattcgtcttctagcaccaaaattagacaaaatgattacgattcccaatttatgaataacagtaaaggcaacaataataacagtatagatgatattaatacccagcctgatgaattcaatgattttttaaatgacacttcaaacagcttcgacacaactagaaaagaacagcaagatactttaacacccaagtttgccaaattgggatttggtatgaccatgaatgacgccaatgatttggcaaagcaacaaaaagaatctcagaaaatagctcagggaccaagatatacgggcagaatcgcggaaaggtacggcacacaaaaagctatatcatctgatcaattatttggtcgtggctcatttgatgaagcagcaaacagggaagcgcatgacaagttgaaaacatttgacaatgctacatcaatttcctcttcttcatattttggagaagataaagaagtggacgaatttggtaatcccatcaatagtagtggaagtggagcaggtaattttgatggccgtaattctaataacggtttcatcgattttaatgcctccgcagatgatgaattgcagatgttgagagacgttgtagaacagggtgctgaaaaactcggtagttatttaagggactacttaagacaataa

SEQ ID NO: 76361 - DNA, 1575 bp, Saccharomyces pastorianus
atgtcccaacgatcttcacaacacattgtaggtattcattatgctgtaggacctaagattggcgaagggtctttcggagtaatatttgagggagagaacattcttcattctggtcaagcgcagaccggtagcaagagggactctagtataataatggcgaacgagccagtcgcaattaaattcgaaccgcgacattcggacgcaccccagttgcgtgacgaatttagagcctataggatattgaatggctgcgttggaattcctcatgcttattattttggtcaagaaggtatgcacaacatcttgattatcgatttactagggccatcattggaagatctctttgagtggtgtggtagaaaattttcagtgaaaacaacctgtatggttgccaagcaaatgattgatagagttagagcaattcatgatcacgacttaatctatcgcgatattaaacccgataactttttaatttctcaatatcaaagaatttcacctgaaggaaaagtcattaaatcatgtgcctcctcttctaataatgatcccaatttaatatacatggttgactttggtatggcaaaacaatatagagatccaagaacgaaacaacatataccataccgtgaacgaaaatcattgagcggtaccgccagatatatgtctattaatactcattttggaagagaacagtcacgtagggatgatttagaatcgctaggtcacgtttttttttatttcttgaggggatccttgccatggcaaggtttgaaagcaccaaacaacaaactgaagtatgaaaagattggtatgactaaacagaaattgaatcctgatgatcttttattgaataatgctattccttatcagtttgccacatatttaaaatatgcacgttccttgaagttcgacgaagatccggattatgactatttaatctcgttaatggatgacgctttgagattaaacgacttaaaggatgatggacactatgactggatggatttgaatggtggtaaaggctggaatatcaagattaatagaagagctaacttgcatggttacggaaatccaaatccaagagtcaatggcaatactgcaagaaacaatgtgaatacgaattcaaagacacgaaatacaacgccagttgcgacacctaagcaacaagctcaaaacagttataacaaggacaattcgaaatccagaatttcttcgaacccgcagagctttactaaacaacaacacgtcttgaaaaaaatcgaacccaatagtaaatatattcctgaaacacattcaaatcttcaacggccaattaaaagtcaaagtcaaacgtacgactccatcagtcatacacaaaattcaccatttgtaccatattcaagttctaaagctaaccctaaaagaagcaataatgagcacaacttaccaaaccactacacaaaccttgcaaataagaatatcaattatcaaagtcaacgaaattacgaacaagaaaatgatgcttattctgatgacgagaatgatacattttgttctaaaatatacaaatattgttgttgctgtttttgttgctgttga

SEQ ID NO: 76362 - DNA, 2430 bp, Saccharomyces pastorianus
atgccttcatccatatccgtcaagttagtggctgcagagtcattatataagagggacgtattccgttccccggatccgtttgctgttctgactattgatggttaccaaaccaaatctacatccgcagcgaagaaaacgttaaatccctactggaatgagactttcaaattcgacgatatcaatgaaaattctattttaaccatccaagtctttgatcaaaagaaatttaaaaagaaggatcaagggtttcttggcgtggttaacgtccgcgtgggtgatgttttgggccatttggatgaagatactgctacatcgagtggtagacctcgtgaagaaactattactcgtgatttaaaaaaatctaatgacggaatggccgtcagcggtaggttgattgttgttttatcaaaactaccttcgtcaagtccgcattcacaagctccttctggccatactgcatcttctagtacgaatacaagttcaactactcgaacaaatggtcattctacttcctccacccgtaatcattcaacgtctcatccttccagaggcaccgcgcaagcagtagaatcaactcttcaaagcggtacaacagctgctactaatacggcaacaaccagtcaccgttccaccaattccacatccagtgctaccagacaatactcttcgtttgaagaccagtatggtcgtttaccccctggttgggagagaaggaccgataactttggtcgtacatattacgtcgatcataacacaagaactaccacttggaaacgtccaacgctcgatcaaacagaagccgaacgtggcaaccaattaaatgcaaatactgagttagagagaaggcaacataggggaagaactttacctggtggatcatcagataattcctctgtaacagttcaagtgggaggtggttccaatatacctcctgttaatggtgcagcagcagcagcgtttgcagctacaggtggtaccacatctggtttaggcgaattaccttcaggctgggagcagcgatttactccagaaggaagagcttatttcgttgaccataatactagaacaaccacttgggtggatccaaggagacaacagtatatacgtacttatggccctacaaataccaccattcagcaacaaccggtctcccaattaggtcctttgccttctggatgggaaatgagattgaccaatacggcacgtgtatatttcgttgaccacaatacaaaaacaacgacctgggatgacccaagacttccatcatcgctagaccaaaatgttccacaatacaagcgtgacttcagacgtaaggttatttatttcaggtcccagcccgctcttagaatattgccgggacaatgtcatattaaagtacgtagaaagaacatttttgaggatgcttatcaagaaattatgagacaaaccccagaagatttaaagaaaagattaatgatcaagtttgatggtgaggaaggtttagattacggtggtgtttccagagaatttttctttttattatcacatgagatgtttaatccattttattgtttgtttgaatattctgcgtatgacaactataccattcaaataaatcctaacagtggcatcaaccccgaacatttgaactatttcaaattcattggtagagttgtgggtcttggtgttttccatagaagatttttggatgcattctttgtaggtgcactttacaaaatgatgctacgtaaaaaagtcgtattgcaagatatggaaggtgttgacgcagaggtgtataactcattaaactggatgcttgagaatagtatagatggtgtcttggatctgacgttcagtgccgacgatgaaagattcggtgaagttgtaacagtggatttgaagccagatgggagaaatattgaagttactgatggtaataagaaagaatatgtcgaattatatacccaatggagaattgttgatagagttcaagaacaatttaaggcattcatggatggttttaacgaattaatccccgaagacttagtaactgtgtttgatgagcgtgaactagaactattgatcggtggtattgcggaaattgacattgaagattggaagaaacacactgattatcgtggttaccaagagtcagacgaggtcattcaatggttttggaagtgtgtcagtgaatgggataatgaacaaagagcccgtttattgcagttcaccactggtacttctcgtatacctgtcaacgggtttaaagatttgcaaggctctgatggtccaagaagattcactattgaaaaagctggtgaagtacaacaattgccaaaatctcacacatgttttaacagagttgatttgccacaatacgttgattatgacagcatgaaacagaagctaacattggccgtggaagaaaccatagggtttggtcaagaatga

SEQ ID NO: 76363 - DNA, 786 bp, Saccharomyces pastorianus
atgcctcaaaacgattatatcgagcgtcacatcaaacagcatggtaaaagattagatcacgaagaaaggaaacgtaagagagaggcaagagagtctcataagatttctgaacgggcccagaagttgactggttggaagggtaagcaatttgctaagaagagatatgctgaaaaggtatcaatgagaaagaagattaaggcacatgaacaatctaaggtcaagggttcatccaaaccattggataccgatggtgatgctttgccgacatatctattggacagagaacaaaataacacagccaaagctatttcttcatcgatcaaacaaaagaggttggaaaaagctgataagttttcagttccgttaccaaaggttcgtggtataagtgaagaagaaatgttcaaagttattaaaacaggtaaatctagatccaagtcatggaagagaatgataacgaaacacacttttgtgggtgaaggtttcactagaagaccagttaaaatggaaagaatcatcagaccaagtgcgttgagacagaaaaaggcaaacgtcactcatccggaattaggtgtaactgtcttcttgccaattttggcagttaagaagaatccacaatctccaatgtacactcagttaggtgttttgactaaaggtaccattattgaagttaacgtttcggaattggggatggttactgctggtggtaaagttgtctggggtaagtatgctcaggtcacaaacgaaccagacagagacggctgtgtcaatgcggttttgcttgtatga

SEQ ID NO: 76364 - DNA, 1074 bp, Saccharomyces pastorianus
atgtctgaacttaatgcattattaaaagatatcaacggctcgctcactgcgacatcagaatccttggagaggttgtctgggatttatagtaattctgcgaccgatgagattcctgaaagtaaccaactacatgagcatctattttacgacgctaagaagcccgctgagaaagtatcgctgctatccttaaaaaatgggagcatgctagggtacataaattctctattgatgcttataggtaataggctagacgacgagtgcaaagatccttctgctatggatgcacgtgaacgctctatccaacaccgtgtggtattagagcgtggtgttaaaccactagaaaaaaagttggcttaccaattggacaagctgactagagcatatgtgaaaatggaaaaggaatataaagacgctgagaagcgtgcactggaaaaatctaccttagtgaatcatagcggcaacgacgatagcgaagatgatgagtctagtgaggatgaaatagcatacaggccaaatacctctggaattatcaacacaaataaaaaatcatcagcatacagggtggaggaaacggctaagcaagaaaacgaggaagaaaacgatgacaatgagactggcgtgtataaaccaccaaagattacggctgttctaccaccgcaacaaacgcattttgaagatagattcgatgccagagaacacaaagatcgtagtaacaaatcgcgtatgcaagccatggaagaatatattagagagtcatcggaccaaccggactggagtgcatctattggtgctgacattgtgaaccatggaagaggcggtatcaaatcttcgagagacacagagaaggaacgtagagtcacttcattcgaagaagataattttaccagattgaatattacaaataaagctgaaaaaaggaagcaaaagcaaagagaaagaaatgcaaggatgaacgttatcggtggtgaagattttggtatattcagctcaaagaggaagctggaagatagcacttcgagacgtggggccaagaagactcgttctgcctgggatagagctcaaaggagactgtag

SEQ ID NO: 76365 - DNA, 612 bp, Saccharomyces pastorianus
atgataaatgagtacgttgccagaaaggtcgctctcaaggacatgcaaccatgtgcgatctgtagcaaaccatccactaccgtcctttacaacgcatctggtccagattggctatatacatgcgaaatacatttacaagataatccacaatttgtcattcccctctatagtacagagtataatgaagccgtggctcaattaaaactagtaaaggggaaaatggatagtctgacatcagctcaaacccaattagggtcctgggatggttgggttactaaaatattctccaagaaagaaaaggagacaaataactctaaagaccctgatccaactacaaccgactctactgatacatctccacaggctaagaacgatgcagaaatcttgtcagaaacaaagaaacagtacagcaaaatacttgacaaagttacagaactgcaaaggaaaaacagaaaatacgaactagcaaaaatcatgtttgaaagcagactcctaagaaaaagaacagaacaagtaaatcgcgaacgatacctcaaggagcaagagaattactctaatacggatcctgaagaactgcttcgaaaacacgtgttcccctccgttccaaaataa

SEQ ID NO: 76366 - DNA, 360 bp, Saccharomyces pastorianus
atgccaaaaaagagagcttccaacggtagaaacaagaagggtagaggtcacgtcaagccagtgagatgtgttaactgttccaagtccattccaaaggataaggctatcaagagaatggctattagaaacattgttgaagctgctgccgtcagagatttgtccgaagcttctgtctacccagaatacgccttgccaaagacttacaacaagttgcactactgtgtctcctgtgctattcacgccagaattgttagagttagatccagagaagacagaaagaacagagctcctccacaaagaccaagatttaacagggataacaaagtttctccagcagctgccgcaaagaaagctttgtaa

SEQ ID NO: 76367 - DNA, 5262 bp, Saccharomyces pastorianus
atgaccgtattacaaccaccatctagtgtttgttatccgctcaacctccctattgtaccgaatcccaatctggatgaagtaacaaggaagaagctcactttggaatgcagaactggagctgcagtagaactagcccgttcaggtgtttttgtccatggtgggctcacactacctttaaatctgactattataaattcattacagctgcaaaaggagctaattctatattttggtaaacagaaggatagaaatgctgattttaaaacattagctgattggataagccctgagatatttttccttgatttaatttccagaacatggcaaagaataaatactacaatagatactacatcagaaaatgagttgaataacggcttaagctttaaagagagattgtttcattcgatgtgcttcacagaatccaacatttacattttcggtgggcttatggtgtcgcctcacaacggctatgagctgatagcaacaaacgaattatggaaattagatcttaaaacaaagtgctggtctttgataagtgaaaaccctcaaattacaagacgttttaatcatagtatgcacgtcctaaatgaaaataacgaaaatcaagatacgaagctaatcatagtaggtgggttagataatatggatattcctgttaaaaaaattgatatatttaacctacgtacaagtttatgggagtcagaatcgaaatcggacgaaaacccagcttcaaaggggtcgtcaaaaatactggttaatattgatgggatgccaatttctttatctcacgattccaacttctcagttctgattgaaaataatcaggcagaaattccgacattggcattatatttccctcaacgcgaggcaaacacgtccagaaggggaaccgacgatggtagtttctctacttacgctcatgatctagacgacaaatccaaactaccaaaacatcaccatcaccatcatggcgatcttaaatatttggaaagcgatgatgcagatgaaaacgctgtaaaaacacttatgtcgcctatcgtaattttgccactacttggaaactctcagggcgctaggatgacatcaaaccctacacaaaacaacaaagaaaactctattttacaagtaccttttcacttgcagtatccctcaggtaattactttaattataacattgttgtaataggattttatccagacctccaaccttccaatcttcattgtttcatttataatatcgctagtggaaaatggataagagtaaacatagcatgtactgagtgcagtattagtatgcatagattttggaagcttctgatttggaagtctcatcatcaagctttattacttggtaccagaacagatgatttttgttcacctagcgttcaaaaattcgatcacattttatcattctctttaccaatgttaaacggctataataaattagtgaataccaaacacacacgcactaataatggcatcgctaatagtcataactcaaacgtaaatctaagtctttatgatcatcttccatactctaattcatcaacgattgagcacacaaatccatacacagtaactcaagggtattccttagacgactcagggatcccccgcttgacttcgactgcgacctcacaatttgagaactattccagatatataactgtaccattagaaatggaatcaactagttctatatttccgccatatgctatggttttaggtaaagatgctctagaaatattcggcaagactttatctgatttcgaatttatcactgctgatggtgattctatcggtgttccagtatatttattgagaaaaagatgggggagatattttgattcactattatcaaacggctatgcaaatacatctttcaattatgagtttaatggagacacttctaatatcataagtttttcacctcatacagcctcaaaaactaccaagtttggtaactctagtcaatcatccaacggatccctagaaaaatacttttctaaaaacggaaatagtaaatcgaacagtaatacaagtcttaagaaaccacatagcgtagactttacttcatcaacatcgtcacccaagcagcgagccatctcgcataataaactatctccttcagaaccaatactttgtgcggatgaggaggacagtcggtcaaacacgttaaaacaacatgcaactggcgatactggcctgaaagaaacgggcaccttgaacaaaaggccgatatccaccacttgctcttctacaggtatggtctttagggttccctttcaggacatgaaaaattcaaagctggggctttcagaacagtctggtcgctctactcgagcaagctctgtttcacctcctccggtatataaaaaatcaactaacgatggtaatgatagcaattgtacactttccaatacacctttagtttataggcgagcttccacagtgggaaccaccacgaatagttcggtagatgacggcttttcatccattcggagagcctcacaccctcttcaatctcacattatacccaaatcttcacccagtagtatatcaaaggctagtcccgcggaaaaagctttctcacgtagaaaatcatccgcattaaggtttatagcaagtccaaatcagtcgcgacagacttcatttgcatctactgccagcactgcctctgttgtaagttctacttcaggaagaaggcgcaactctaaccaaatttctcatttaggaagctctgcaagtttaccaaactcgcccatcttgcctgtgttgaatatcccattacccccacaagaaaagatcccactagaaccactaccgccggtgccaaaagcaccctcaagaagaagcagttccttggcggagtacgttcaatttggtagggatagtccagtcgcgtcaagaaggtcttctcattccaccagaaaatcgagctcctcggatgcaaggcgtatctctaactcttctttgctgaggaatactctagattcgcaactgctaagtaatagttatggcagtgacattccttacgaagcaagtattcaagaatatggcatgaacaatggaagagatgaagaggaagatggggacaatcaagactacggctgtatctcaccttccaatataaggcccatcttttccaccattaatgcaatcaatataaacggcaatttcaaagaaggtgaatttttttcttcaaaatcatatattaataatgaaaagagtagaagactttcttacatttcaaaccctgaaagtgtagaaagtacaaattcgaacaataacgccataatcgagttagaacccttattaaccccgagatcattgtatatgccttggtcgaccgcctctgtaagagcatttgcagagttcttttacaccgcacaaattaatggcaaatggctattagctcctgtgaccctggacctgcttatcatggctaaaatatacgaaattccaattttatacgaactgattacggaagtgctatataagataatcagcaaaaaggaagaaggtctttcagttacttgcgaagcactactaaatctgttccagcaaaaggtttcgagatattgcaatgaaaatgagggcaaaataagaaagcagttggattctagcgaatcatatcaggacaccttagagataaaacgttccctagccaatatagacaacggatacgttgattcatatcttttgcgaaacacttcaatggcgcaatcaatacactacacggatgacagtaatggagaaaccgaaatagatatgcaccacacgggaatttctagcataggatcgcttgccaatagggctgttcctactgtttttgccggtggtcctagagacagccataattctattggttcaattgcattccccagtaattcgggtgttcaaaatattcgccgctctgtgtccttatttagcccagcgacgaagaagaaatccagcttaagtagggaaacagatccattagatacctccgatcaatttactgatgatgttcccgatagtggaccagtcagccggcaacagaactttccaagaagaagtagtagttttactgaaacagttcccacagaaactacgagatataattaccaaaattatgactctagtaagtcaaacagagcttcggacgataaagaggaacaaaacgaacaagctacgctccaggacatttcgaacttcgataaatacaaggttgaaacgttgcaaaagagaaacagcaacgatgggaaagatttagaccgcactaatgatccattgaagaacagaggaacagaaatacctcaaaactcatccaatttagagacagacccgtttattcgtgatagttttgatagtgattcaggttcttccttccgctctgattctgatgaccttgattcacagctaggtattttgcctttcacaaaaatgaataaaaaattacaggagcagacatctcaagaatttgatgattctattgatcctttatataaaataggatccagcactccaggctcttcaagattgcatggatcattttccaaatatattagacctaattcacaaagagaagatggttcagaatatgttaatatatctagcctggaaaatatggtgtcacccaatgcactaccacctgtcgactatgtcatgaagtctatttatagaacttctgtattggttaatgacagtaacttgatgacgcgcacgaaggaagcaatcgaattatccaaagtcttgaaaaagttaaaaaaaaaggtattacaagacatttcacaaatggatgacgaaatgagagagactggaaaaccaatttttgcacgcggatcttcttctcctactctaagtaggcagcactctgatgtcgcgacaccgttaaaacagcaagaaaatacaagaccagctttaaaatttgcatcaagttccccgatctcggagggattcaggaaatcgtccatcaaattctcacaggcgccttccactcagatctcacctaggacttccgttacagatttcactgcatctcaacaacggagacaacatatgaataaaagattcagtacgcagacgacacattccacatctgctctattcatgaatcctgcctttatgcctcctgcagtgaatactggacgtaaggagagtgaagggcattgtgaggatagatcagcgactgccaacagaacaaataggaaagaagacgcaactacaaatgataacgataatattgccccatttccttttttcggtaaacgaagataa

SEQ ID NO: 76368 - DNA, 342 bp, Saccharomyces pastorianus
atgtatcatcttcccataaatgtaatgacttcttcttatgctcagatgatgctctgtgaactaagtgcgcagtccttcaaacctttccactcaggtaatcttgataaagtttccaagatggtccattctctgggtctcttacataaacaaacttcactccgtatttctccacttctttgtttctactttcatcatcaaataaacaaatctttttcgattttaaatcgctggtattataaagatctttcaaaccgtcccttaaatggccaattttacttctttctccccactgaaattcatcgaacaggttggccaacggggttacgacaccagcatacttga

SEQ ID NO: 76369 - DNA, 537 bp, Saccharomyces pastorianus
atgactggataccctgacgtggccgccttcgatttggactacaccatttggccctgctattgtgatacccatttgcacggtccctttaagccagttaaaagtagtaatggcgaagttctcacaattatatgtagagatggttacgagctcacaatctacaaagatatcccacgtatactaggtgatcttaaagataatggagttaagttaatgaccgcgtcacgaacgtgggcacctgagattgcccaggaaatactgaaaatattcaaggtcaagtatgctggtgtcgtaaccccgttggccaacctgttcgatgaatttcagtggggagaaagaagtaaaattggccatttaagggacggtttgaaagatctttataataccagcgatttaaaatcgaaaaagatttgtttatttgatgatgaaagtagaaacaaagaagtggagaaatacggagtgaagtttgtttatgtaagagacccagagaatggaccatcttggaaactttatcaagattacctgagtggaaaggtttga

SEQ ID NO: 76370 - DNA, 393 bp, Saccharomyces pastorianus
atgacatggactttaagaaacttacataattcacagaaaaaggtcttggtcgatattacaatttggttagcactttctccatacggtgacatggcgttatttacaagttttgagtatataatcggcgaatattataggtactctatactaccgttacatcaaaacttacacaagttactattcactctttttctaatatgcctcgctagttggaaagagggaaacagatcttgcagatataaatggcagaaatttgtgtgcaacaagctaaattctcctgaaacaaatttcgtacccattcgcacctcagtgaataagaactctaaaatgattgttgaaaagcagataagcattcatatttctttaaagtgtattgtttacaaagaatactaa

SEQ ID NO: 76371 - DNA, 1356 bp, Saccharomyces pastorianus
atggatcaagaaacaatagacactgactacgacgtgattgtcttaggtaccggtattaccgaatgtatcttatctggtttactctctgtagatggaaaaaaggtattacatattgacaagcaagaccattatggtggcgaagctgcttctgtgaccttatctcaattgtatgaaaaatttaaacaaaatccgatcagtaaagaggaacgggagtccaagtttggtaaagatagagattggaatgtcgacttaattcctaaattcctgatggccaatggtgagctgacaaatattttaatacataccgatgtgaccagatatgtcgatttcaagcaagtttctggctcctacgtttttaagcaaggcaaaatttacaaagtgccagctaatgaaatagaagccatttcatcgccattgatgggtatttttgaaaaacgtagaatgaagaaatttttagaatggattagctcttacaaagaagatgacttgtccactcatcaaggattagacttagacaagaataccatggatgaagtgtattataaatttgggttaggcaattctaccaaagaattcatcggtcatgcaatggctttatggaccaatgatgactacttacaacaacctgctaggccatcgtttgagaggattttgttatattgccaaagtgttgcccgttacggtaaatcaccttatttgtatcctatgtatgggttaggcgaacttccacaaggatttgctcgtttgtcggctatttacggtggtacttacatgctagacactccaattgatgaagtattgtataaaaaagacacaggaaaatttgaaggggtcaagactaagctgggaactttcaaggccccattggttattgctgatccaacttattttcccgaaaaatgtaaatctactggtcaaagagttattagagccatctgtattcttaaccatccagttccgaacaccagtaacgcggattctttacaaattattatcccacaaagccaactgggaaggaaaagcgatatatacgttgcgattgtttcagatgcgcataacgtttgctccaagggtcactatttagcaattatttctacaattattgaaactgataaaccacatatagaattagagcctgctttcaaacttctgggaccaatcgaagaaaaattcatgggaattgccgaattatttgaaccaagagaagacggctctaaggataacatttacttatccagatcatacgacgcatcctctcatttcgaatccatgactgacgatgttaaagatatttacttcagagtaacaggccacccattagttctaaaacaaagacaagaacaagaaaagcagtaa

SEQ ID NO: 76372 - DNA, 681 bp, Saccharomyces pastorianus
atggcgacgattgaagatattaaggaaacggcgttaatccctttccaaaagcacaggcaactttccatgcatgaagcagaagttataactttagagattataggcctattatgtgattcagaatgcaaggatgagaaaacattgaaatatttgggccgatttctcacaccggatatgtatcaagacctagtagatgagaggaatctaaacaaaagatgcggatatcctctttgcggtaaatcgccagaaagaatacgtgatccattttcaatgaatgatactactaagaaatttttattagaaaacaatccgtatgcatatttgtcgcactattgcagtaagttccattttagatgttcccaattttatcaagtgcaactatctgatgaagctttatttgcaagaacaggggttcacctatttgaagatcctgaacaggacaaacacgatatagatttcaaagtgactttgtttgaagagttgctaagagaaaaggcatccgaagaagacattaaatcattgatatccggtctcaaaaagttaggattaaatcctgacagtgggactacagaaaaagatgatactgagctggaagatgacttatcgaagtggttggcacaaatcaaaattgttgagaatgataatcccagcattttgggtgatttcacaagggaagattga

SEQ ID NO: 76373 - DNA, 1671 bp, Saccharomyces pastorianus
atgcaacacaaggatacggcagtagcgaaggacacagctaaaaaacgtttactgagaagaaatagtgcgccgtcagctatacatataatttcacgattagacaaaaagtggtccttcctatggaatactatagatagacacaatattgttgaagagcaagatgaaagtagcgctgcaaaaagcgaagaagaacatgaggatgattatgaattggaacaattactcaacatgataagaataccaatgttcctggaaaagttcatgctctttgcacttttaacaagcttggactgttttttgtattactttactgtattaccgatacgactgataaagggatatgtgaagcaattcaagagttatcgtcagcattatcgcctgcaacaacggtctgggcataagaataaaatatcctttcgatatagaataacttcaagagaatataaagagagatgtatgatttttatcatcgtgatttcatccattttgttgagcaaactagacacctcaaaactatatcacaggataaaacggcaaagtacgatgaaattgtacatgctattcagtgtactggaaatggcggacaaaatgttggcaagtttgggccagagcttattaacggttatgctttctaggaaaaactcggaacggatattactgcataaatgtttgttagtgtcaatgagcttgacatatgtgactatacacggctatgtattggtttaccaggccatttcattaaacatagccgtgaattcgtattccaatgccttgctaactttattactatccatgcaatttgcagaaatcaaatcatcggttttaaagaaatttgataaggagggatttttccaaatagccattgcagacgtagtggaaagatttaagttgaccttattattgtcaataactggccttcggaacctccagtcgtggtcatcttcattatcgaacacaagcatcaatttctggagtccacgttccacattatcaatcgtcattaacatactttgtgggccgatggtaagcgtggtagggagtgaagtgttagtggattgggcaaagcatgcttacatcacaaaattcaatcggatccgcccacagatatatgataagttctattatataatatacaaggattattctacgagaacgcacaaattagaagatagattgggattacctttacctgcattcgttgtcctttttattgtaatggtgaggccaacactttttaaatcatcggaaccttcttaccttccctcgctatttaggatcctcttcatgggggcatccgtgtttttactagcattgttggcaaaatttacactagatcttattttaatcaaatggagcaaacggatagagcaacggttcagagaccaagctctcaataccgttgtaactgaagaagaatacgtcccaggtttactctcgggcggtatgggtaaagtcgacgtgtctacaagaattgcattacattctgattacaataaagagaatcgtatagagaccgaaagtgtatcgccaatgcggaaaagaaaaactactttaactgctgaatgtactcctcctagcctaaatgatattagaagacagaaagattccaagaatccacgatcgcttgaaaatgtcgctcgctataaaatggtttctaaaagaatatggtaa

SEQ ID NO: 76374 - DNA, 1461 bp, Saccharomyces pastorianus
atgcttttcagaaacatagaagtgggcaggcaggcagctaagctattaacgagaacctcgagtcgtttggcctggcaaagtattggggcctcaaggaatatttctaccatcagacaacaaatcagaaagactcaactatataattttaagaaaactgtgagcatccgtccattttctctctcctcccctgtttttaaaccacgtgttgcttcagaatcaaaccctatagaatcacgtttgaagacctcgaagaatgttgcttactggttaataggtacatctggtttggtatttggtattgttgttcttggtgggttgactagactaacagaatcggggttgagtattaccgaatggaaacctgtcacaggtactttgccccctatgaaccagaaggaatgggaagaagaatttatcaagtataaggaatcaccagaatttaaattgttgaattctcacatcgatttagacgagttcaagtttatattttttatggagtggattcatagattgtggggtcgtgctatcggcgctgtttttatattacctacagtttatttcgctgtatctaaaaaaacttcaggccatgtcaataagaggttgtttggtctcgcaggtttattaggattacaaggatttgttggttggtggatggtgaagtctggtcttgatcaagagcaactagacgcaagaaaatcaaagcctaccgtttctcaatatagacttactacgcatttgggtaccgccttctttttatacatgggtatgctctggactggtttggaaatattgagagaatgtaaatggattaagaaccctgttcaagccattagtctcttcaaaaaattagataatcccgcaattggcccaatgagaaagatttctttagctttgttagcggtgtctttccttaccgctatgagtggcggtatggttgccggtttggatgctggttgggtctataacacctggccaaaaatgggtgaacgatggttccctagttctcgtgaattaatggacgaaaacttctgtagaagagaggacaagaaagatctgtggtggaggaatttgctagaaaacccggttacagttcagttggtccataggacatgtgcgtacgttgcgtttacatcagtactagctgctcatatgtacgctatcaaaaagaaggccgtaattccaaggaacgcgatgacctctttgcatgttatgatgggcgtcgttactttacaagcaacacttggtattttaactatattgtacctagtcccaatatcgttagcttctatccatcaagctggtgctttggcgttgctaacaagttctttggtgtttgcctctcaattaaggaagccaagagctccgatgagaaacgtaatcattaccttgccacattcaagcaaagtaactagcggtaaaattttaagtgaagcgtcgaagttagcctcgaaaccattataa

SEQ ID NO: 76375 - DNA, 891 bp, Saccharomyces pastorianus
atgaaactaaaaagggagtatgatgagttaataaaagcagacgctgttaaggaaatagcaaaagaattagggtctcgacctctagaggttgctcttcctgagaaatatattgctagacatgaagaaaagttcaatatggcttgcgaacacattttagagaaagatccatcactttttcccatacttaagaataatgaatttacgttgtacttgaaggagactcaagtccctaatacactcgaagattattttattaggcttgcaagcacaattttgtctcaacagatcagtggccaagcagctgaaagcatcaaggcaagggttgtcagtctttatggcggtgcatttcctgattacaaagtccttttcgaagacttcaaagacccagcaaaatgtgcagaaatcgcaaaatgtggattgagtaaaaggaaaatgatatatctagagtctcttgctgtctactttactgaaaaatataaggatatcgaaaagctcttcggtcaaaaagataatgatgaggaagtgattgaaagtttagttacgaatgtaaaaggtataggcccatggagtgccaaaatgttcttgatctccggattgaaaagaatggatgtatttgctcctgaagatctaggtattgctaggggtttttcaaaatacctttcagataagccagaattggaaaaagaattaatgcgtgaaagaaaagtagttaaaaagagtaagattaagcataagaaatacaactggaaaatatatgacgatgacataatggaaaaatgctctgaaacattttctccgtataggtctgtgtttatgttcatactttggaggctcgcgagcacaaatacagatgccatgatgaaggcagaagaaaatttcgtgaaatcctaa

SEQ ID NO: 76376 - DNA, 1287 bp, Saccharomyces pastorianus
atggatttaacaatttcaaacgaacttactggcgagatatacggcccaattgaagtcagtgaagatatggctttaactgatctaatagcattactgcaggccgattgcgggtttgacaaaacaaaacacgacttatattacaatatggacattctagactcaaacagaactcagtctttaaaagaactagggctcaaaaccgatgacttattattgattaggggtaagatttccaattccattcaaacagatgctgctactttgtccgacgaagcgttcatagagcaatttagacaagagctacttaataatcaaatgcttagatcacaactcattttgcaaatccctggattgaatgatttagtaaatgacccactgttgtttagggaaagattgggcccgctcatattacaaagacgttatggtggctataacaccgccatgaatccttttggcatcccccaagatgaatatactagactaatggccaaccccgatgatcctgacaacaagaagaggattgcagagcttttagaccaacaagctatcgatgaacagttgcgcaatgctatcgaatatacacctgaaatgtttacccaggtccctatgctttacattaatatcgaaataaataactaccccgtaaaggcatttgtagatacaggggctcaaacaacgattatgtccaccaggttagcgaagaaaactggcctgtcgagaatgattgacaagagatttattggagaagctcgtggcgtaggaaccggcaaaattattgggagaattcaccaagcccaagtcaaaatagaaacacaatatattccatgcagttttaccgtcttagatactgacatcgatgttttgataggactagacatgctgaaaaggcatttggcttgtgtggacttaaaggaaaacgttcttaggatagcagaagtggagacaagctttttgagtgaagcggaaatcccaaaaagttttcaagaaggacttccagcaccaacgtcagttacaacttcgtctgataagcccctaacacccaccaagactagttcaagtctaccaccacaaccgggggctgttcctgcgcttgctccaaggactggtatggggccaacacctacgggaagaagtacagccggtgctacaacggcaaccgggagaacgtttcccgaacaaacgattaaacagcttatggatctaggattccctagggatgctgtggtaaaggctcttaaacagactaacggaaatgcagaatttgctgcatccctcctcttccaatga

SEQ ID NO: 76377 - DNA, 1215 bp, Saccharomyces pastorianus
atgcctaacaaagtgttcaacgtggccgttttcttcgttgtgttcagagagtgcttggaagcagtgattgttatttccgtgctgctatcgtttttgaaacaggcaatcggggaacatgaccgggcgctgtaccgtaaattaaggattcaggtttgggtcggtgtgttactcgggttcatcatttgtctggccatcggtgcaggtttcatcggtgcgtactattcgctgcagaaggatattttcggaagcgcggaagacttgtgggaaggtatcttttgtatgattgcgacgataatgatctcgatgatgggtattcctatgttgagaatgaataagatgcagagtaagtggagagtgaagattgcgcggtcgttggtggagattcctcaccgtaagagagactatttcaagattgggttcttgagtagaagatatgctatgttccttttgccgtttattactgtcttgagagaaggtttggaagctgttgtgttcgttgccggtgcaggtattaccacacagggctcgcacgcctctgcttacccattgcccgttgtggttggtttgatatgtggtggtcttgttgggtatttgttgtactatggtgcttcgaaatcctcgctgcagatttttttgattttgtctacttcgatcttgtacctgatctccgccggtcttttctctcgtggtgcgtggtactttgaaaattacagattcaaccttgccagtggtggtgatgcttccgaaggcggtgatggtaatgggtcttataacatcagaaaggccgtttaccatgtcaattgttgcaacccagaactggacaatgggtgggatatcttcaacgctttgcttggatggcagaacaccggctacttgtcatccatgctttgttacaacatctattggttggttcttatcattgtgttgagtttaatgatattcgaagaaaggcgtggtcacttgcctttcaccaaaaacttacaattgaaacacttgaacccaggatactggatcaagaacaagaaaaagcaggagttgacggaagagcaaaagagacaactgtttgccaagatggagaacatcaacttcaatgaagatggtgagatcaatgtgcaagagaactacgaacttcccgagcaaactaccagtcattcctcgtctcaaaacgtcgccacagacaaggaagtcctccacgttaaagccgactctctttga

SEQ ID NO: 76378 - DNA, 438 bp, Saccharomyces pastorianus
atggcaatattgttgccgcttaaaagcattctgccatggtgctgcataactttctcatttctgctctcgtcctcaggatcgataagccactcgacagcgtcttccagtataacgttgacgaagtcgtcgaaaccaactaacgtgccctcgaactcgcggttcgactgcagcacaatcaacactttctggttaattgttttatctatgacctccaaaggcaaaatctccggtagactcattttgcgcgcttctgtgtatgcttgtgagtgcacgtgtatacgctatgcttgttgtgagaccatctatccgccaaggaagcctttttcgctttctctgtattttttctacttcaataagaaagcaagtattctgttttgctacccggacgcaaagacaaaacccgagcatccgggtaataaaagagcagggtccggctga

SEQ ID NO: 76379 - DNA, 282 bp, Saccharomyces pastorianus
atgagtctaccggagattttgcctttggaggtcatagataaaacaattaaccagaaagtgttgattgtgctgcagtcgaaccgcgagttcgagggcacgttagttggtttcgacgacttcgtcaacgttatactggaagacgctgtcgagtggcttatcgatcctgaggacgagagcagaaatgagaaagttatgcagcaccatggcagaatgcttttaagcggcaacaatattgccatccttgtgccaggcggcaaaaagacccctacggaggcgttgtaa

SEQ ID NO: 76380 - DNA, 1875 bp, Saccharomyces pastorianus
atggaaaatcttggcgacaaacttagtatttcacaagtataccacttagcacaggaatacagagactatgcatattcaattgcgaataaaatcggttctgaggaagagttgaagcagtattatggcctcatgaacatgtctatccagatgtttcagctattgaaaacgaaatgtacgctttcagttctggaggatagtaaggtcacgtttgagatggtggagttattgatacaggagacgtataattttgacctagcagagctttacatttccagtttgaaagaacggttacaaacgcaccagagcgacacagatttggtagaagagatcatgcgttgcgagtttctgttgttacatgacttgccacttatgagagacagtaagttccactataagattgcactaagaaattgcaatgaattagtccagtacatggtaaatttgcaggatgagttgtatcaaaattgggcatccgtattccagtatgtcggcgtgatgctttgcattaagctgaaacagcaccgcagggtgaagacgacttttcatgggctgctctcgcaatgtcgggaaaagtcacaatggaaatggtttctaaatctgtgttatgtgaattacttgctaaatgagaggttcccaatccccgaggatgccctgcaggagctgcgaagcacggagctgtacacggtggggcctgagctatatgcatggaagttggcattagagatggtaatccagctttataaagacgggaatattacggaccacttgaacgaattcaaaaatttctttgacacaaacaagcaatctctagtcactaatgaaggtaagggatgtgtgatcaaaatcatgccaaggatagcgctgaaagtagagttgcctatgattttccactacaaagaattaaagaacatactgttattattgcaaagtgtcagctacatcgtgaactgttatgacgaaaagggcaatttttccaggaagttcctccccaaagtctattctacaacgcagaaactgattaagaacattgccgctggcggtgtttcgatgaatgagctggactcacgaatccagacatacaagagcattcttgaattctgtgagttttacaaagtgtgggaacaaacactcttgaagggggccgtagtgacgaccgagtcacctaagttagggccctctccaggctacgtgaggctgctgcaagccatgaaggttcagtttgaaggcggcggggccgtagaagagtacaagcggcttgcacaatctggcggtacatccagcgaggtgaagatgatatcgcttctgaattgctacacagtgcaggcggcaagagtgagccgatgttcgggggacaaacagggcgaactcgtagagcaatgcaacaaggtgtggcttcaggtggagaaattgctacaagaaacggatctgcagttcaaccccatatgggagtgcacagtaacgatcctatggcttttcagccatttcgagccgttcagttggaacccgctgccatgtagtgacaagcagcgcgccgagtacgtgtcgaagctccgcgagttctactctagcaacaagttcgttgccggagaagccgttgcggacaaccgcttcaaattgaagaaggctctgttgctgcaaatactggtaaactacttaggcggtcgaatgctcgaacacgatctgggtgagatctatgcgatttcagcaaagtgtttcgatatgtgccgccagcagggcggcatgcgcaaggtccaatacgtgatcggaatatggcatttaatgaattgtacggtggcgatgcggggaaaagacgtcgctctcacgaacgcgaagctggaagcgctggttaagcaaatcaccagtgtcaaacaataa

SEQ ID NO: 76381 - DNA, 411 bp, Saccharomyces pastorianus
atgatgacagcagcaaaacgcttggggttatattctgcattacgggcatgtagcgcaactgttttcagatctaacctgcaccccaaagtcacagttgccacaatgttttgtagtgttggaacaatacctgatgtggcggaggtgtctttttcagattctggggcagctctttttatgtcctcttcactctggaaagtagttgctggttttgtaccatctcgattctggttttcccatacttgtctggtatttggatcaaacactatcttgtttgcctctttaaactcctttaaacgttcctcatcggccataattaaaaaagtttctcttgatacacctgtttatgttggactagaaaagaaaaataaaatgcagcctttacttccttgcttcttccgcagagcagtctaa

SEQ ID NO: 76382 - DNA, 723 bp, Saccharomyces pastorianus
atggccgatgaggaacgtttaaaggagtttaaagaggcaaacaagatagtgtttgatccaaataccagacaagtatgggaaaaccagaatcgagatggtacaaaaccagcaactactttccagagtgaagaggacataaaaagagctgccccagaatctgaaaaagacacctccgccacatcaggtattgttccaacactacaaaacattgtggcaactgtgactttggggtgcaggttagatctgaaaacagttgcgctacatgcccgtaatgcagaatataaccccaagcgttttgctgctgtcatcatgcgtattagagagccaaaaactacagctttgatttttgcatcagggaaaatggttgttaccggtgcaaaaagtgaggatgactcaaagctggccagtagaaaatatgcaagaattatccaaaaaatcggatttgctgctaaattcacagacttcaaaatacaaaatattgtcggttcgtgtgacgttaaattccctatacgtctagaagggttagcattcagtcatggtactttctcctcctatgagccagaattgtttcctggtttgatctatagaatggtgaagccgaaaattgtgttgttaatttttgtttcagggaagattgttcttactggtgcaaagcaaagggaagaaatttaccaagcttttgaagctatataccctgtgctaagtgaatttagaaaaatgtga

SEQ ID NO: 76383 - DNA, 250 bp, Saccharomyces pastorianus
atggccgatgaggaacgtttaaaggagtttaaagaggcaaacaagatagtgtttgatccaaataccagacaagtatgggaaaaccagaatcgagatggtacaaaaccagcaactactttccagagtgaagaggacataaaaagagctgccccagaatctgaaaaagacacctccgccacatcaggtattgttccaacactacaaaacattgtggcaactgtgactttggggtgcaggttagatctgaaaa

SEQ ID NO: 76384 - DNA, 250 bp, Saccharomyces pastorianus
cagttgcgctacatgcccgtaatgcagaatataaccccaagcgttttgctgctgtcatcatgcgtattagagagccaaaaactacagctttgatttttgcatcagggaaaatggttgttaccggtgcaaaaagtgaggatgactcaaagctggccagtagaaaatatgcaagaattatccaaaaaatcggatttgctgctaaattcacagacttcaaaatacaaaatattgtcggttcgtgtgacgttaa

SEQ ID NO: 76385 - DNA, 579 bp, Saccharomyces pastorianus
atgttttataataagatgtttattcatagcatatctggtggatcgtctctattaagcgccatcgaggtgtttgcctctgcatttttcagcaaagcaagctccctttccagcttgaatctatgttcacgctcatccgacaattctttttcatactttctttgtgtactcgtaagcacttttttaaactcacttgtcattattgaaagtgaacgtgatccagaaccgcttgtggggcttcctacagaggaaggtgaacttggatcccaagtcaccggcgaactcgctggtgatgacatgccgaaattatgtctgcttgaattcagcttgttgttggctttttcaagttctttattttcctgctccaattcgtgtaatttcttttcagttttactcaaattcgagtggttgtttaataacttatcttgtaattctctgttagtccgcgttagcttctcgatatcttgtacatattcggcacggtcattctcgaattgcttagtcaaaaaattgtgtgccagttgcaaatcactaaatgccgtttctagttcttctaattttttagaggagtcttcctcttga

SEQ ID NO: 76386 - DNA, 1263 bp, Saccharomyces pastorianus
atgcataaatttgatctagagctctcgagaagagcgaaccctttgctttttagtgcagaacgatacgaagagtatccattgaaatacgatgaattgaaacagtaccttctctcccaaaatccgtcacatccgcatcacaatagtagaccatacacttctattgactattttgactatcttctgtatagaagtaaaaatgacgagtcagaaatagaccttgacaaaaagctagtgtctgagttcgccctatattacgttcaaaaagagcacttgaactctgatgatctaaatcccacactcaatgagttgctgaagctgcagccgaagtctgcggattggtatgaaatgatgctgaggatccttgaatccattaacactacagggatagaccagcttacgaaggaaaacaacaacagtttcccaaattctaaaagagcgaggtcttccactaatatgggtggcacagataaatttaacaagggtgcttaccatactgacaaagctgatgacgataaaaatgaaatacttcaagaattaacgtccttcttgatgtcaaactccattcagaaaggcattgatatcaagccaataccattagatgaccctgtgaagttcttgaaaaatgggataaattctatcttggatacgtgcgtcagtctagaaaaaaatacgtcatcaccacctatttcacctaacgccgctgcaattcaagaggaagactcctctaaaaaattagaagaactagaaacggcatttagtgatttgcaactggcacacaattttttgactaagcaattcgagaatgaccgtgccgaatatgtacaagatatcgagaagctaacgcggactaacagagaattacaagataagttattaaacaaccactcgaatttgagtaaaactgaaaagaaattacacgaattggagcaggaaaataaagaacttgaaaaagccaacaacaagctgaattcaagcagacataatttcggcatgtcatcaccagcgagttcgccggtgacttgggatccaagttcaccttcctctgtaggaagccccacaagcggttctggatcacgttcactttcaataatgacaagtgagtttaaaaaagtgcttacgagtacacaaagaaagtatgaaaaagaattgtcggatgagcgtgaacatagattcaagctggaaagggagcttgctttgctgaaaaatgcagaggcaaacacctcgatggcgcttaatagagacgatccaccagatatgctatga

SEQ ID NO: 76387 - DNA, 447 bp, Saccharomyces pastorianus
atgttgtctaacgctaagctccttctatcattggccatggcctctacggctctcggattggtatctaattctagttcctctgtaatcgtggtaccatcaagcgatgctactattgccggtaacgatacagccacgccagcaccagagccatcatccgccgctccaatattctacaactcgactgctactgcaacacagtacgaagttgtcagtgaattcactacttactgcccagaaccaacgactttcgtaacgaatggcgctacattcactgttactgccccaactacgttaataattaccaactgtccttgcactatcgagaagcctacttcagaaacatcggtttcttctacacatgatgtggagacaaattctaatggtgctaacgcaagagcaatcccaggagccctaggtttggctggtgcagttatgatgcttttatga

SEQ ID NO: 76388 - DNA, 2739 bp, Saccharomyces pastorianus
atgaacatgcaagacgctaacaaagaagagtcgtactcgatgtacccgaaaacctcttctccaccaccacctacgccaaccaatatgcagattcctatttatcaagcgcctttgcagatgtacggctacactcaggccccatatctataccccacacaaatacctgcctattcgtttaacatggtcaaccaaaaccagccaatctaccatcaaagtggcagcccacatcacttgcctccgcaaaacaatattaacggcggaagcactaccaataacaacaacattaacaagaagaagtggcactctaatggcattgccaataacaatggaaacagcggtaatcaaggcgccaactctagcggtagcggcatgaactacaacaaatcccacacctaccatcacaattactctaacaatcatatccccatgatggcctctccaaacagtggcagcaatgcgggcataaaaaaacagaccaactcttccaacggcaacggttcttcggctacttcaccatcgtactcttcctacaactcttcatcacagtatgatttatacaagtttgatgtcactaaattaaagaatctcaaggaaaattcatcaaacttgattcaattaccactgtttataaacactacggaagcagaatttgctgcggcaagtgttcaaaggtacgaattaaacatgaaggctttgaacctgaactctgaaagcttagagaactcatctgtagaaaagagctctgcccatcatcacacaaaaagccatagtataccaaagcataatgaggaagtaaagacagaaacacatggggaagaagaagatgctcatgataaaaaaccacatgcgagcaaagatgcgcacgagcttaaaaagaaaactgaagtaaagaaagaggatgctaagcaagaccgtaacgaaaaagttatacaggaacctcaagctactgttttacctgtagtggataagaaggaaccagaggaatctgttgaagaaaatacttccaagacatcttcaccttcaccatctcctccagcagcaaaatcctggtccgccatagcatcagatgcgattaaaagtagacaagctagtaacaaaacagtctccggatcgatggtcactaaaacaccaatttctggtacgaccgcaggcgtttcatcaacaatcatggctgcggcgactataggtaaatccagctctcccctgttgtccaagcagcctcagaaaaaggataaaaaatacgttccaccttctacaaagggtattgagccactgggttcgattgcgttaagaatgtgttttgatcccgatttcattagttacgttttacggaataaagatgttgaaaacaaaataccagtccattccattattccaagaggcataattaacagagccaacatttgttttatgagttctgtgttacaagtgttactctactgtaagccatttattgatgtaattaacgttctcagtacacggaataccaattcaagagtcggcacatcatcctgtaaattattagatgcttgtttgactatgtataagcaattcgataaggaaacctatgagaaaaaattcctagagaatgctgatgatgctgaaaaaaccacggaaagtgatgcaaaaaaatcatcaaaatccaagagtttccaacactacgccactgccgatgctgtcaaacctgacgaattttacaaaactttgtctactataccgaagttcaaagacttgcaatggggccatcaggaagacgcagaagaatttttgacccacttattggaccaattacacgaggaattaatttctgcaattgatggcttaaccgataatgaaattcaaaatatgctgcaaagtattaatgatgaacaattgaaagttttctttattagaaatttgtcacgttatggaaaagcagagtttatcaaaaatgctagtcctagactgaaggagttgatagaaaaatatggcgtgatcaatgatgactctaccgaagaaaatggttggcatgaagtgagcggatctagcaaaagaggcaagaaaactaagaccgctgccaagaggactgtcgagattgttccatcaccaatctccaaacttttcggtggccagttcagatctgtgttagatataccgaacaataaggaatctcaatcgattacacttgatccattccaaacaattcaattggacatttcagatgctggcgtgaatgatctagaaactgcattcaaaaaatttagtgaatacgaattgctaccctttaagtcctcgtcagggaatgatgtcgaggccaagaagcagacttttattgataaattgccgcaagttcttttaatccaattcaaaagattctcattcataaataatgtgaacaaagacaacgcaatgacgaactataacgcgtacaatggacgtattgagaagatcaggaaaaaaattaaatatgatcacgagttaatcatacctgaagaatcaatgtcttccataacattgaaaaacaacacctcagggattgatgatagaagatataagctaaccggagttatataccatcatggggtaagttccgatggcggtcattacacagcggatgtttatcatagcgagcacaacaaatggtatagaatagatgatgtaaatattaccgaactagaggacgatgacgttttgaaaggtggcgaagaagcttctgattcgaggactgcctatattttaatgtatcaaaagagaaattaa

SEQ ID NO: 76389 - DNA, 1332 bp, Saccharomyces pastorianus
atgaaatacaaggaaatcaatttcttcaagggccatccaagctcgaggttgctgcctcgagaagcagtaattcaagcgactgcggctatattgggcccggagaccagggagtacgataacgacccctgtaacaggcatccgctgacgtacggttcggacgaaggtgccctgtgggtgcgagagcagatttgtacgttcctgaatgatcagctgtttaagttcgaaaatggggctcggagcaggacacgggcagactatttgaatctgaatagcggcgcttcgtatggcatgctgaacatccttctgcaaacaaccttgccacataacgggtataccaggcaggcgttcatcatcacgccaacatatttcttgatcaacaattgcttcacagatgcgggattcaaggggaaaatgaccgccatcaacgagcagggccacgactcgattgatttcgagtcgttgatttctgcccttgagcagcacgaggcggagccgcagccccatagcaccacagagatgattcaggggccaaagttgaccaagaaggtctacaggtacgttatgtactgcatcccgacgtttgcaaacccatcgggaaacacatactcgcttgagaccagacgcagacttatcgacatcgctcggaagtacgacatgctgataatcactgatgacgtgtacgatattctagattacacgacgccctcggatgagctgccctctccgcccctaaggatggtgcacatagacagaagtacagcgccctccggtgaggactcgttcgggaatacagtgtccaacgcaactttctccaagctgatcgcccctgggctcagatttggataccatgagtcaatcaacgcgaatctcgccagacagctatctaaaggtggtgcaaacgtctctggcggaactccctcacaactgaactccatgatcgtgggtgagatgctgcgtagtggtgccgcccagagatgcattgcacatctgagatccgtatactccgagagggccactgtcttgacctcggcgcttaagaaatacatgcccctaggaaccgagattatgccattgaagggcggctattttacttggatcactctcccaccagcgtacaatgccatggagatatccactattcttgccaagaaatttaatgtcatccttgccgacggctccaatttcgaggtcatcggcgatgagaaaaactggggtcagtcatgctttaggctctcaattagtttcttagaggttgatgatatcgacaggggcattgagctgtttggtgctgtttgcaaatctcatgcgatcaccaataacataattatgtag

SEQ ID NO: 76390 - DNA, 567 bp, Saccharomyces pastorianus
atggggctgcggctccgcctcgtgctgctcaagggcagaaatcaacgactcgaaatcaatcgagtcgtggccctgctcgttgatggcggtcattttccccttgaatcccgcatctgtgaagcaattgttgatcaagaaatatgttggcgtgatgatgaacgcctgcctggtatacccgttatgtggcaaggttgtttgcagaaggatgttcagcatgccatacgaagcgccgctattcagattcaaatagtctgcccgtgtcctgctccgagccccattttcgaacttaaacagctgatcattcaggaacgtacaaatctgctctcgcacccacagggcaccttcgtccgaaccgtacgtcagcggatgcctgttacaggggtcgttatcgtactccctggtctccgggcccaatatagccgcagtcgcttgaattactgcttctcgaggcagcaacctcgagcttggatggcccttgaagaaattgatttccttgtatttcattaccgcttgctagcacgcgttgttccttgttacagcgatgctccacccagatttatgtgttga

SEQ ID NO: 76391 - DNA, 765 bp, Saccharomyces pastorianus
atgttgactatcacgaagagactggtgaccaccgatgtgcggtcgcgaatactgttaagcagtttaaacgggaaaatgtccgatgcactggcgctgctgcgtcagcagcagcagaccagcgtggatgtggagctgctgcacacgatgctagcgcgagccgctgcgcttgcccatgccgacactatagcatacatgtggtatcagcatgtgatgccacgccggttgccagtagagggccgcctgctatgtgaaatggctggcgtagcattgtaccaggacaggctcttcttacccgcgcagttcctccagcactaccaggcgatgaatcgcgatcgtcgcaccagcccagaagatgaactgattgagtatgagcttagacggattaaagtcgaagcgtttgcgcgtggcacaatgcactccacggcgctcagggaaaagtggaaggtattcttgcaggagatggatacgctaccagggcagccgccattaaggctgcgcgacttcccgcaaatgaccaaggctatgggcatagcattgacgcagcaagatgagcaagcagctgccctggcgttgtttggacgacagcccctagtgataaagaacgaatggtcactaccgctactactggctggtgtcctttggcatgttcccggcccagcgcaggcgcgacgtgtgctggcggagttccgtcaaagttatcgcgggctgccgctgctggatgccgaactagtgataaagagaagaggatttgaaatcaacacataa

SEQ ID NO: 76392 - DNA, 1209 bp, Saccharomyces pastorianus
atgttcaaactcacctctcgactcgtcacgtcaaggtttgctgtctcttccagactggccaccgctcgaaccatagtattgccccggccccatccgtcatggatctcttttcaggccaaaagatttaattcgacgggcccaaatgccaacgatgtctcggaaatccaaacccagttgccttccatcgatgaattaacctcttcagctccttctctttccgcttctacttcggaccttatcgctaacacgacccaaacagtgggcgagttgtcctcccatatagggtacttaaatagcattggcctggcccaaacctggtactggccctcggacattatccaacacgtcttggaggccgttcatgtttactctgggttgccttggtggggaactatcgcggccaccaccatcctcattcgatgcctgatgtttcccctctatgtcaagtcctctgatactgttgctagaaattcccatatcaagcccgagctggacgccttgaataataagctaatgtccactacagatttgcaacaaggtcagctagtcgccatgcaaaggaaaaaactgctctcctcgcacggcattaagaacagatggctggccgcacccatgctacaaattccaatcgcccttgggtttttcaacgcattgagacacatggttaactacccagtagatgggttcgctaatcaaggtgtcgcttggtttacagatttgactcaagcagacccttacttaggtttgcaagtaatcactgccgctgtgttcatctcatttacaaggctggggggtgagactggtgctcaacaattcagttctcccatgaagcgtcttttcactattctaccgatcatttctataccggccacaatgaacttatcgtccgctgtggtcctctactttgcctttaatggtgccttctccgtcctacagacaatgattttgagaaacaaatgggttcgttcgaaactgaagataacagaagtagctaaaccaaggactcccatcgctggcgcttcccccacggagaacatgggcatcttccaatcattaaaacataacattcaaaaggcaagagatcaggcggaaagaaggcaattgatgcaagataatgagaagaagttacaagaaagcttcaaggagaagaggcagaattccaagatcaaaattgttcacaaatcaaacttcattaataacaaaaaataa

SEQ ID NO: 76393 - DNA, 6504 bp, Saccharomyces pastorianus
atgaaaggtcttctctggtctaagaacaggaaatcttcaacggccagtgctagttcaagctcaacttccacgtctcataagacaactactgcgtctacagcatcgtcgtcgtcgccgtcatcatcctctcaaactattcgaaactcgacaagcggtgcttctccatacatgcattcccaccatcaccatggccagggacacagtcaccacagaggggaagacaacaacagagataagagaaaaagctccgtatttccaccctccaagcagtacacatccactagttccagtcaggtgaacttggggatgtattattcggatactaacaccagatcatctagaagcatagcctctacgctaaaagacgattctccgtctgtctgctccgaagatgaaataagcaattcttctagccagaagtccaatgcccaggatgagacccccattgcgtacaagaagagtgcgcattcgaaagactcattgttgccttcacgttcctcgtctttatcacctcctcagtctcgatgtagcactggaactacgctagagaaatcgttgaacacttcaggtatcagtaacaatagcggcactaataataacaatagcaataataacaacgataacgagcaaaagcaaagaaatgttatccacttaaactctgaaaactatgatacaactgtttttaagactggatgggttaataagtcccatggccagactgttgctacaaactataatagctcaatgacagccccttcctcttcctcttcgtcctcctctcagaatctccgtaatgatgcgtattctagaaacagggaaagcaggttttatgggaacgacggttcgtctttaaaaaatgatgacagcagtagtactacggctactaacagtggcaatgatgtggcctcagcaagaagcagcatggctatagatcctcaaatgctagtacctgattaccgtctttatagggctcaattgaaaggttgcgttctcaacctttacaaaagtggtttgaatagtaacattaagttttttgatccaactttaccagcttcaaatagtagtatagcaaatgaaaatcatcgacagaaaaaacaacaaacaaacagccaagcacaagcggaagctctgcaccaaaagcaatcatttggccaaatgggtgaacctattacactggacctgaagtatttatctgaagtttacccgcacccagatttaagacaagacagtgatggtaaaattatatcaggcacaatagaaagtttatgtcacatagtcctattttaccccggtccaaagcaatcggacgtacctaatgagaaatcattatctaagacacatagagctgttattaatctgttattgatgtttccattactagatcatttcattaagtttctgaaggtattcaaccaattcggtctttcttttaccaagaataaatcaaggttgacaaataattccacacaattctacaacatatcccctgctgtcgatgactccatgactcaaagattagctttaactgctaaaacaatccttgatgtatttccgggatttttgctggatgaaccaatgcttaagactataatttccttattagatactatatcttcgcataacgatgaaatttccaacaatttgaaaattaaaatcgccaataaacataacgaattaatgaaacttaccgcattcactcgatctcttccaatggcaacatcatctacacatgaattagagattatattggatccaagtcatttcctgtctttagacattacaacattggctgatgaagttcatcatatcaatttaaagtttgataaagtatgggcaccgaaatttgactattctctgctgtatgattcgaagtttattaatcgaagaatcgtctcgttaaatccattggtattcaacaacgaccaaaatatccattttcttggaaggctactagtattacatttatttccaacaaatcctgagtttagtaaaaaagtgactccaaaagtgagagctgagttattagataaatgggtccaaattggctgtagatttgaacatttaggagacatggtatcatggctagctgtcgccactatcatttgttcaattcctgtactaaggtcatcttcatggaaatatgttcctgatcagtcattgaaaactatttttaaagattgggttcctaccattattcagttagagaggcgacaaaggacatctaaatctacaagtagtgttttcatactcgctcctccaaatctggatgacgactttacgagagctaacgtgatttcttattttggcgatttattaattcatgctgatgatttaccatctgatacgaaattcaagtacttggaaaagaaaattaacagaacaaaaaacgcttttcataaatggcaacaaagattacaagcaatcgactctacgagacataaaactagttcgacagaaaacgtcagggataatgaatctcctaacaacgttgtttatcagctctggaaatttcatttatcacaacctccgttgaacattgaaggaataatgaaattaagtgtccaacacgaacctccaataatcgaccagaaagcgtattctactattggttctcaaaggagtgctttagtaactggaagttatttacccattttattcaatgaactattcccaaattattcactatttcctaagaatacattagtgggtgctgccagtgatgcaaagttgccgcctccaagatcatccgcgcgcctctcaaaatcactttcaatcagtgaaccaattccaatagcttcaaacagtcacactacgggctcattaacagatgatgctatgtccgcaaaaaatgataataataaagttacaggtgttggaaaaattgacggacctgtgatcaaagagatgtcgtcaaaacaatcaaataaacagagactattaaaatctgtgagagatgtttttaatattgacatggatgtgtttcatatatcagatgagttggtatttaaatcggtatacgataatgatggtaaatcccgtcctgttagtatggtcatagaaacaccaaagagattctcacaacactcttccatgcttattaataatccagctactccaaaccaaaagatgagagattccttggataccactggaagactaagtaagacattagaaaatatggactttttcaacaatattggtcaagtatcagattcactaaaagaatcgattattcgtgtcgtattgaaatcgtcgtcgctagaaaagatttttgatttactggtattaacttcaaatatcttctcaaaattggtagacactaaagaccttgagaattattactatcatcaaagacaaaggggtcattctaccagagggctttccgatgataacataggactactagattatgcattcgttaaactaactatggacaatgatattttcacagaaacattcttcaacacttataaaagctttactactacaactacggtattagaaaatatggcaaaacggtatgttggtgcaaagagttgcagcgtgtcaatttccaagattttagatcgcagtgatgattctaaaatgaagataaatgaggatacaaatttggtgtcctcttcattatacgaccaaaattttcctgtttgggatatgaaagtaactgacgatgaaaacataaaccttatttatatggcaaaaatccaaatcggcgccgcggaagctatactacatttagtgaaaaatcattactctgactttactgacgatttatgtaacaactctactctattggatattataaaaataatggaacaagaagtatccactgaatggcctacgcgaattgccaactcaaagttacaaaaaagcctaccagaaaattttgtgattgaaacagaaaatttgttgactacgttaactgatctatttcatggtattaaatcagcataccaaaagcaactatacagacctattggtgtcaatagaactcagaagagaataactgacattttgaattcctttaacacattctcttttacagatcttaacaacatcattgatgatccttcctttagcgatgacatgattagatcttttcaaaagttacactcaaccaattacgaagatatactagaatggatctaccagttagataactttatttctaagaagttcaatttagtttctaagaaagattggatagttcttttccaggagttggaattgctttcaaaggaatctctggtctcttttttcaattatccgctacattttaagtcaagcaaattgataaaccccggatatttgcaattgcacgagtttgaaatttccaatctttttacttggatttctacattgattcttaaggatgataatggtacggagagtcttttttttgaaaaactaccacaatctataaaattgttaataaagttacacacgagtctaactacgtttttcgtgatggaaatttcaaacgtcaacaaaagcagtagtgaaaggttaactacttgtaaagttatattacaaattttgaactacatccgctggaaaaacggaagtttggatttatttgattcagaggaggatgaaagtcctcatgctatttgtccacacattccagcttttattgaaactgctattgcgcatgccataatatcaccagagtctagaaactatgaactttcgtggatcaaagcttctgaaaaactttcggaccctactaaaggaacccaaaatctaaggtctattagtaacgttttagagaagatagatgacatacatataaagagattcattgagattgatgatgtattcagcaaaaactgcaagaatttatgcccctgccctggttggttcatttcaaggttactagaaatatctcagtttgtccctaacatgagtatcactaattcgaaacttattaattttgacaaaaggagatttgttaacaacataatatctaatgtcttggatttaattccgaacgaaagggagtttccacttgacattgaaatgagtgacgaaaatccttcgaaaagaactacatttggccgcattttgttcaataattttgaagatgttaataaagtatacagaaagaagactaaaaaagtatcagaatcagaagccatatcggagagatttcaagagcagggagtatttaatgaaatactagtcaatgaaattgaaaaaataaagagggaagctagaaaattagaggttttactcgatcaagaaaagatcttgaagaactctgctgctttacatcaggccgttccgaaaaagaataggaagtctgttattatctcaggtactcatagtgacaacgatcatagctataatatcaataagaacaccggtcaaacgccttctctaggtagtgttatggaaagcaataattcagcaaggaatagaagagattcaagggcctccttttccacaaatagatcatcagtagtgtcaaattccagccataatggtgttagtaaaaaaataggtggatttttcagaagaccattttcaatcggtggattcaacacatccagttctaattattcactcaacagtatattatcgcaagaagtttcaagtaacaaatccattctaccaagtatacttccagaggttgattccatgcaactacacgacttaaaacctagttatagtttgaagacctttgaaatcaagtcaataatggaaataatcaatcacagaaacattccggcttactactatgcgttcaagatagttatgcaaaatggccatgaatatctgattcaaacggctagttctagtgacctcacagaatggataaaaatgatcaaggcttccaagagattttcattccattcgaaaaaatataaaggtaaaactcataataagatatttggggtaccattagaagacgtttgtgaaagagagaataccttgatacctacaattgttgtgaaattgctgaaagagattgagctgcgtgggctagatgaagtgggattgtacagaattcctggttccatcggcagtataaatgcactaaagaacgcatttgacgaagaaggtgcaacagataattcctttacattagaggacgatagatggtttgaagtgaatgcgatcgcaggctgttttaagatgtatttaagagagttaccagattctttattttctcatgctatggtgaacgactttaccgatttggcgattaagtataaagcacatgcaatggtaaatgaagaatacaagagaatgatgaatgagttactccaaaagttacctacatgctattaccaaactttgaaaagaattgtatttcatttgaataaagtacatcagcatgttgtaaataataaaatggacgcatcaaacttggctattgtattttccatgagttttataaaccaagaagacttagccaacagcatggggtccagattaggtgcagttcagacaatcctgcaagattttattaagaatccaaatgattatttcaagcaataa

SEQ ID NO: 76394 - DNA, 1017 bp, Saccharomyces pastorianus
atgaatagcgtaaaaagagtaaagctaaattcaaatatgtccaaacaaatatgcacgcattccggatcttttcacgcggacgagtcgttggcggtatacatgttaaggctactacccgaatttaaagatgctaagttggttagatcaagaaatcccaaggactgggaggctagtgacattctagtggatgtaggagctcagtatgacggcgtgaaattttttgaccaccaccagcgtggatttttcgaaactttcaacgagaaatacaagactaagctctcaagtgctggtctgatcttcaaacactacggtcgtgacattatcaaaacaattttgaacgacaaggttagcagctctgatttagatctgctctatgacaaggtatacaaacaatttgtcgaggcactggatgcaaacgacaacggtattagcaagtacacgattcctaaggattccaacttggaaccgaatttcagggataacgccatcagcattcccgggattatttcaggtatgaatcctaactggaacgaagacacttccgatgagtcttttgacagatgctttgctcgcgcaagtgagtttatcggtggggtctttgtcacattggtaaaaggctacggtcaatcgtggttgccagccaaggcccttgtggcgcaagccattgatgaaagaatggatgttgataagagtggcaaaatcattgtcttgccccaattctgtccatggaaggagcatctatacgagctggaaagagagaagaacattgaaaagcaaatcgagtttgttcttttcacagactcttcaggtgcctggagggtatctactgtaccaatcaactccacctccttccagtttaggagaggtttgccggagccattaagaggcctcagagacgaagaactgagcaccaagagcggtgtgccaggatgtatcttcattcatgcagcaggtttcattggaggtgccaagtccaaagaggctgtatatgagctggctaagatgtctttggcctag

SEQ ID NO: 76395 - DNA, 2406 bp, Saccharomyces pastorianus
atggcgagaagtagaaagaattcattggttcgagatattgcgtctcatccgactataccagaagctcagaccatagtgggtttactggacgattcgtacctttttgataagctaaaaaagctgtctttggctgtggaaaattctgacggtctgcaaagaactgatgtctcagaaggttgttcagaggttaatggttctgaagctacgacttctgcggatgtaaaaaagacaaacaagtatttgtattatactacctatttggaccggttaaacattaagatagacgagtataaagttgttctggatcaaacacgccaggttaatgatcaattggatagttccatcaagaaatttcggaaaatctctcaggatactggagctttcattgaggaaacgaagacgatctatgaaaagcagtctaaattaagcaatctaactgagtcaatccctaaagctctccattattttgaagttttggaccctataatgcgtcgcttgaaccatgccacttctcccgctattgtcaagaagagctcctttacgacgatgttggcgactatcgacgagtctttacgttttttggatgagaatagtgacctcaaggatgcagcagcgtacagaatcaagttcaagcaatgcttgatcagagcctgtgaattgatatctcactttttaacgaatctgttgaaacaaacaaatcaagaaattttggataaaaccaaaaacaaaaattcgttaactgggttgccgtcgactacaagagacgccttcttgtacagtaaattctatactatagctgatactttcaaaactcaggtttcggaaattgttaagagaagcaacgaaaaagcctacaacaagtatcacgatgaactgaattccattctttacgagtgtttcaaccactatttccaaacacgtttaagactgctaactccggtcatttggtcacacattgatgaaattgttgttaaagataaggaccagggcttggtcaaattcattcaagacggtaaggtttattttcagcagttatgcgcggacgaatacaaacttttcgtagaatttttccctgaaaaggaatgtcatttcaagattaatcagtggttcttacagttatgtgaacccctttatgactccattagagttagggttttgaaagagacagatatttgtactttgtgtgactcagtgactttgtttgccccatattatgaatttgaagaaggttcagaagaatacgtgaagcagtttaccgacattcagtatgataaactattcgaaccgattgtccaaaaagtgcaggctagattaattttaagagtgcaaatatatgtccaacaaaatattttgagctataggcccactagggacgttttcatgatttcaaatagaaggagaaaatcgaagaccagcttacaagggggtaacgaagatgctactactagtgatgacaatccagatcccttgttagaatcttatttatcttctttcaagaatagaagcatattgcccatatcccctaatgatgcagacgataaaagtattgattcagaagaatctactgataaaatttcacagttgcaaacatattatccgcccttgttaaagactttggctttattgtccaaaatttatgaaatgatcaattctgtggtatttgatgatttagctcaccatgtagtccacgactgtattgtatccttgagaaatgcctatgatatggttatcaaatcttcagcgggaaaatctgattttaacaacttagatatttcattagcgtacctaaaaaatttgttgatgttacgtgattccatacagaactttaatattcaatatacagttaatgaaacttatctggatttttctggtgttgaggggtttttcaaatcacttaaagaaaatggtagaaacgttttgaaaaagacaaagtcatcttcaatattgaccctggcaagagagctggttccaaaagttgtaaacaatatggtggacgcccgtacggaactcatatctgaattgagaaacgtcattaaagattttactgaaagcacttctttggagcttattgatgacactttagatatcaatagtgatgaagatctgttaagcaaaaacgtaaaattaagagaaaatataaaggccagattaccaagaatatatgaacagatattgaactatatcgatgatcaagagatcgttactaatttattagacgctgtgcaagagttaattacacaatcatattccaaatattatgaaactataactgaattggcagaaaatggaaagtttgctaaggatcaagtcgcagacgtaatgtacttggacgtcttcacagatttttttgccaaagaggtggcggatcttttaagaaatggtgatattgataccataacgaaataa

SEQ ID NO: 76396 - DNA, 1728 bp, Saccharomyces pastorianus
atgttacagcagggttcttcctcgaggaggagtttgcatggtaatgattttcacacgctcacttctccttcaaggagagactctttgagtattcctagggctgtggacgctagatctgcgtctacgattgatctgttctacataccggatgctaccgtctcaaggaggcactctactctggtggctaatagattagacaataatggtaatggcgcaccgatgcgccagtacaataaacctaactttgcttcctcctcgacttcatctctgccttcaactagaaatcgcccctctcgctacgataacatgaatatgaatatgaatatgaatatgaatatgaatatgaacatgaacatgaacatgaacatgaacaaccatactaccagtgatcacaatgcgcacccgcaatatcgttgtagaccaaacccgtccagacgccactccttaatgaccattcccgaaaagtactctggtagtcgctacagtctccgatcatccccgcccacctattctaatccacgtgttaggaaggaacttactcctttccaattacaaagaaagcagatgaaaagcgcttttcaattccccaacggtgaaaatttcacgccaagaaaccagatagcaaggcttccgccatcttcgacttttcccgactctccttctagttcatcgttgcctttgacccagactggaggcccatcttccgcagataacgattccattgccactggcacgaacaatcgttctcctcaacaaacgaaagctgctgatgctaatcagaaatctgaatccgagtctccaaaggcaattagatcaaattctaaaaagatatctcgtttcttcaggaaaatctggtcgtccaagtcatcaaattctgcagattccgtagaagagaatagcaaaacaaagcagaaaaggaaaaatccggagagagttgtaccagaaccgataacgtcccttgaccaaccggttgaaattataaaacagagtttttcaaccgttaacaatcacgaaacggctgtaccttcaattaaggactctggcatagtacaagaattgacagcactcggagataataacaggataccagttcttccaccccctaggtcaccaaacagacctacactgtctgataaacgaactacaaagttatactattgtagtcaagattcgtctaatgaagatattgctccagaggaaaagagcaccgttttcttaaagcgtttgcaggatgaatggtctaccgtgtatttaaacaaattgcctttgactgcttctgtgccatcttctctctctaccactactgatgctgcgaactcttccttcataaactcttcaatatcatcgccggctccttcttcttcgtcctcgtcatcgttggtttcccgtggaccaatgcaatccatatcttcttctccaacacctgccccttcttcagggtcatcgaaatctaaaaatgccgtcaaatccttacgctttgcggatgagatttatgtaaacgatacgtggtccgccgcggactattgcaggtgtgataatacctttttgaataatttctctaaaggaaagagccaagacattaccaatccttctacttttgtcagtaataatctctcatccacaaaaaatatatccaatattgaaatcaaaatggaggtgaatgagttcaaaagaaaggaaatgcgtgttcaccaggatagcgctaagtatacacattactacttataa

SEQ ID NO: 76397 - DNA, 216 bp, Saccharomyces pastorianus
atgtggtattcattttacactaagttacatcgccccgttctgctcaggcactctcttcctccggttgtgtttggccttcttctacgcatagaccttcccttaagaaatcgaatttttcgtcgtttaaaattgttttttttagtatttcggcggttattctcttggttccttgtcctcttgccatctccccgctttttttcaccaataacgctataa

SEQ ID NO: 76398 - DNA, 429 bp, Saccharomyces pastorianus
atggcagatcaagtaccagttacaacacaactaccaccaataaaacctgaacatgaggtaccacttgatgctggagggagtccagtaggtaacatgggtaccaactcgaataacaacaacgagctaggtgatgtattcgacagaataaagacgcacttccctccggccaaggtaaagaaaataatgcagacagacgaggatataggaaaagtttcacaagccacgcccgtaatagcgggcaggtccctagagttttttatagcgttattggtgaaaaaaagcggggagatggcaagaggacaaggaaccaagagaataaccgccgaaatactaaaaaaaacaattttaaacgacgaaaaattcgatttcttaagggaaggtctatgcgtagaagaaggccaaacacaaccggaggaagagagtgcctga

SEQ ID NO: 76399 - DNA, 1002 bp, Saccharomyces pastorianus
atgagttttctttccaaactttcccaaatacgaaaatcaacgactgcatcaaaagcccaagtgcaagatccattacccaagaagaatgacgaagagtattccttgttacccaaaaattacataagagacgaagatcctgcagtaaaaagattgaaggagctgaggcggcaggaactgttaaagaatggtgctttggctaaaaaaagtggtgtaaaacggaaacgtggcacctcatctggatctgagaaaaagaaaatagaaaggaatgacgatgatgaaggtggcattggaattaggtttaagaggtctattggagcaagtcatgcgccactcaagccagttgtaaggaagaaacctgaacctatcaaaaagatgtcatttgaagagctaatgaaacaagcggaaaataatgagaaacagcccccaaaagttaagtcatcggaacccgtaactaaggaacgcccacattttaacaagccaggtttcaaaagttcaaaaagaccacaaaagaaagcatcccctggcgcaacattgcgtggagtatcttctggaggcaatagcataaaatcatcagactcacccaagcccgtcaagctcaacttgtccacaaatggatttgctcaacctaataggagattaaaagaaaagttagaatctagaaaacagaaatcaagataccaggatgactatgatgaagaagataacgatatggatgattttatagaagacgacgaatatgaaggttaccacagcaaatcgaaacacagcaatggtcccggatatgatcgtgacgaaatttgggctatgttcaatagaggcaagaagcggtcagaatacgattacgatgagcttgaggatgatgatatggaagcaaatgagatggaaatcttggaagaggaggaaatggcaagaaaaatggcaaggttagaggataaacgtgaggaagcttggttaaaaaagcatgaagaggagaagagacgccgtaagaagggcatacgctaa

SEQ ID NO: 76400 - DNA, 699 bp, Saccharomyces pastorianus
atgactaatgacaacagtggtatctgggtcctaggctacggatctctgatttacaagcctccgtctcattatacgcatagaataccggcaataattcacggttttgctcgtcggttctggcaaagttccactgatcataggggtacacctgcaaacccaggaagggtggccacactaatcccgtatgaggatattataaggcaaactgccttcttgaagaatgtgaatttgtatagtgaaagtgcacctatccaggatcccgacgacttagtcaccataggggtagtgtattatataccaccagaacatgctcaagaggttagagaatatttgaatgtaagagaacaaaacgggtacactctacatgaggttgaggtgcatctagaaactaatcgggagcacgaggcagaattgggtgaagcattagaacagttgcctcggcacaacaaatcgggtaaacgggtactacttacttcggtgtacattggtacaatagataatgaggccttcgtcggaccagagaccgtggatgaaactgcgaaagtaattgcggtgtcgcatggacctagtggatctaactatgaataccttgcaaaactggagcaagcgctagcgcaaatgcccatcatgaaagagcgagggcgtattaccgatcattatctgactgctctattggagactgtgaataaatacaggtga

SEQ ID NO: 76401 - DNA, 4407 bp, Saccharomyces pastorianus
atggcagccaaggatatttctactgaagtgctgcaaaatcctgaactatatgggctgaggcggtcacatagagctgctgcgcatcaacaaaactacttcaacgatagcgatgatgaggacgatgaagataatattaaacagtcgaggaggaagagaatgaccacgattgaagacgacgaagacgaatttgaagatgaagaaggcgaagaagattctggagaggacgaagatgaggaagattttgaagaagatgatgattattatggctctcctataaaacaaaatcgatcaaaaccgaaatcaagaacaaaatcaaagtctaaatctaagccaaaatctcaatctgaaaagcaatctacagtgaaaataccaacaaggttttctaatcgtcaaaacaaaacggtaaattataacatcgattatagcgatgatgacctcttagaatctgaagatgactatggttccgaggaggctttatcagaggaaaatgtgcatgaagcatctgccaatcctcaaccagaggacttccacggtattgatattgttatcaatcacagactaaagacatctttggaagaaggaaaggtcttggaaaagactgttcctgacctcaataactgcaaggaaaattatgaattcttaatcaaatggacagatgaatctcatctccacaatacttgggaaacttatgaatccattggccaagtccgtggattgaagaggttggacaactattgtaagcaattcatcatcgaagatcaacaagtaagattagatccatacgttaccgccgaagatatagagatcatggacatggaacgtgaacgtaggcttgatgaatttgaggagttccacgtgccagaaaggattattgatagccaacgtgcttcgttggaagacggcacctcacaattacagtatttagttaaatggcgtcgcctaaattacgacgaggctacttgggagaatgccacagatatcgtgaaattggcacctgaacaagtgaaacatttccaaaacagagaaaactctaagatcctcccacaatattccagtaattatacttcacagagaccgcgttttgagaagttaagcgtgcaacctccgttcattaaaggtggggaattaagagattttcaactgactggtattaattggatggcatttttgtggtccaaaggcgataatggtatactggcagatgagatgggcctgggaaaaacggtccagactgtcgcctttatcagttggctgatatttgctcgtagacaaaacgggcctcacattattgtcgttcctttatcgacaatgcctgcctggttggatacttttgagaaatgggcgcctgatttgaattgtatatgctatatgggcaaccaaaaatcaagagataccattcgagaatatgaattttacaccaatccaagggcaaaagggaaaaaaacaatgaaatttaatgttttattaacaacatacgagtacatcttaaaggatcgtgctgaattaggaagtataaaatggcaatttatggccgttgacgaagctcatagactaaaaaatgctgaatcatccctttatgaatcattaaacagtttcaaggtcgccaaccgtatgttaatcacaggcacacctcttcagaataatattaaagagttagctgcgttggttaatttcctaatgcccggaaggtttacgattgatcaggagattgattttgaaaaccaagatgaagagcaagaagaatatattcatgatttacacagaagaatacagccttttattcttcgtcggttgaagaaagacgtagaaaaatcacttccatcaaagacagagcgtattttaagagttgaattgtccgacgtacagactgagtactataaaaatattctgactaaaaactactctgctttaactgctggagctaaagggggtcatttctctttactgaatattatgaacgagttgaaaaaggcatcgaaccatccatatctcttcgataatgctgaagagcgcgtcttacagaaatttggggatggtaaaatgactcgagaaaacgtactaagaggtttgatcatgtcttcgggtaagatggttcttttagaccaattattgaccagattgaagaaagatgggcaccgcgtgttgattttttcacaaatggtcagaatgcttgacattttaggcgactatttatccattaaaggtattaacttccaaaggttagatggtacagtaccatctgctcaaagaagaatatctattgatcatttcaactctccggattcaaacgacttcgtatttttactttctactcgtgctggtggtttgggtatcaacttaatgaccgccgataccgttgtgatttttgattccgattggaatccgcaagccgatttacaagcaatggctagagctcatcgtattggccaaaaaaatcacgttatggtgtataggttggtttcaaaagacacagtagaggaagaggtattagaaagagcacggaagaaaatgattttggaatatgctattatttctcttggagtgacagatggtaacaaatacactaagaagaatgaaccaaatgccggtgaattatcggcaatcctgaagttcggtgcaggcaatatgttcactgccacagacaaccagaaaaaattggaggatcttaacttggatgatgttttgaatcatgcagaggatcacgttactactccagacttaggagagtcgcatcttggcggtgaagagtttttgaagcaattcgaagtgactgattataaagctgatgtagattgggatgatatcattccagaagaagaactaaaaaaactccaagatgaagagcagaaacgcaaggatgaagaatatgttaaagaacaactcgaaatgatgaatagaagggataacgccctgaaaaaaataaaaaacagtgttaatggtgatgggaccgccgcaaactcagattctgacgacgatagtacttccagatcttctagaagaagagcaagagctaatgacatggactctattggtgaatcggaggtgagagctttgtataaagctattttaaaatttggcaacctaaaggagattttggacgagttgattgcagatggaaccctgccggtcaaatcatttgaaaaatacggtgaaacttacgatgaaatgatggaagcagctaaagactgtgtacacgaggaagagaaaaatagaaaagaaatcttggagaaacttgagaaggatgctaccgcctatagagcaaagctaaaaagcggtgaaataaaagcagagaaccaaccaaaggataatccgttgactagattatctttaaaaaaaagagaaaagaaagccgtccttttcaactttaaaggtgttaaatctttaaacgccgaatctttactaagtagagtggaggatttaaagtacttgaagaacttgataaattcaaactacaaagatgatccattaaagtttagcctaggcaacaacacacctaagcctgtacagaattggtcatctgattggacgaaagaggaagatgagaagctattgattggtgttttcaaatatggatatggttcctggacacaaataagagacgatccatttctaggcattactgataaaatattcttgaatgaagttcacaatccggtagcaaaaaagtcggcaagctcctctgatacaacaccaacaccctcaaagaaaggaaagggaataacgggttcttcaaaaaaagtacctggtgccattcacttgggcagaagagttgattatctattatccttcttaagagaaggcctaaatacaaagagtcccagtgctgacataggctcgaaaaaactccctactggtccttccaaaaagagacaaagaaaacctgctaatcacagcaaatccatgactccagaaattacaagttctgagcctgcaaatggcccgccaagcaaacgtatgaaagccctcccaaaaggtcctgccgccttaataaataacacgagattgtctccaaacagccccgcgcccccattaaagtccaaggtttccagagataatggtacaaggcaatcaagcaaccccagtagcggcagcgctcacgaaaaagaatatgacagcatggatgaagaagactgtcgacacacaatgagtgcaatacgtacttctttgaagcgacttagaagaggcggcaaaggtcttgatcgtaaggaatgggccaaaattttgaagaccgaattaactacgattggtaatcatatcgaatcgcaaaagggctcatcgagaaaggcaagcccagaaaaatatcgcaagcacctttggtcttacagtgccaacttttggcctgccgacgttaagagtacaaagctgatggcaatgtacgacaagataacagagtctcaaaagaagtga

SEQ ID NO: 76402 - DNA, 1734 bp, Saccharomyces pastorianus
atggctgatattactgataagacagctgaacaattggaaaacttgaatattcaagatgaccaaaagcaagccaccactggttcagaaagccaatctgttgaaaactcttctgcatcattatatgttggtgacttagaaccttctgtttccgaagcccacttatatgatatcttctctccaatcggttcagtctcctccattcgtgtctgtcgtgatgccatcactaagacctctttgggctatgcttatgttaactttaacgaccatgaagccggcagaaaagcaattgagcaattgaactacactccaatcaagggtagattatgccgtattatgtggtctcaacgtgacccatcattgagaaagaagggttctggtaacatctttatcaagaacttgcaccctgatattgacaacaaggctttgtatgacactttctctgtgtttggtgacatcttgtccagcaagattgccaccgacgaaaacggaaaatccaagggttttgggtttgttcacttcgaagaagaaggtgctgccaaggaagctattgatgctttgaatggtatgctgttgaacggtcaagaaatttatgttgctcctcacttgtccagaaaggaacgtgactctcaattggaagagactaaggcacattacactaacctttatgtgaaaaacatcaactccgaaactactgacgaacaattccaagaattgtttgccaaatttggtccaattgtttctgcctctttggaaaaggatgctgatggaaaattgaagggtttcgggtttgttaactacgaaaagcatgaagacgctgtgaaagctgttgaagctttgaatgactctgaactaaatggagaaaagttatacgttggtcgtgcccaaaagaagaatgaacgtatgcatgtcttgaagaagcaatacgaagcttacagattggaaaaaatggccaagtaccaaggtgttaatttgtttgttaagaacttagatgacagcgttgatgacgaaaagttggaagaagaatttgctccatatggtactatcacttctgcaaaggttatgagaaccgaaaacggtaagtctaagggttttggttttgtttgtttctcaactccagaggaagctactaaggccattacagaaaagaaccaacaaattgttgctggtaagccattatacgttgccattgctcaaagaaaagacgtaagacgttctcaattggctcaacaaatccaagccagaaatcaaatgagataccagcaagctactgctgccgctgccgccgccgctgccggtatgccaggtcaattcatgcctccaatgttctatggtgttatgccaccaagaggtgttccattcaacggtccaaacccacaacaaatgaacccaatgggcggtatgccaaagaacggcatgccacctcaattcagaaatggtccggtttacggcgttcccccacaaggtggtttcccaagaaatgccaacgataacaaccaattttatcaacaaaagcaaagacaagctttgggtgaacaattatacaagaaggtttctgctaagacttcaaatgaagaagcagctggtaaaattactggtatgattttggatttgccacctcaagaggtcttcccattgttggaaagtgatgaattgttcgaacaacactacaaagaagcttctgctgcctatgagtctttcaaaaaggagcaagaacaacaaactgagcaagcttaa

SEQ ID NO: 76403 - DNA, 357 bp, Saccharomyces pastorianus
atgattgtcatattctgtgtcatcgttaaatgtgaattcttctgcatcttcacgtttatttttgggtgtttcatcattgaagctgacctgtggccggctgtatttgttgcttgttgcaccatcatcaaaatgggtaggtgcaatatgtgtatcttcattactgctattatcttcaaattgaaatgtatcttcaaagggcgacatgggagcatgcccatcgccatgaaaagttccagacataattatcaactaactttcctttttaaagttaactgcgtttttatttcacttccaggaggaaataaaggatttctgttacggttgctttcccttgctcaacctccggttaatttttga

SEQ ID NO: 76404 - DNA, 4716 bp, Saccharomyces pastorianus
atgtctggaacttttcatggcgatgggcatgctcccatgtcgccctttgaagatacatttcaatttgaagataatagcagtaatgaagatacacatattgcacctacccattttgatgatggtgcaacaagcaacaaatacagccggccacaggtcagcttcaatgatgaaacacccaaaaataaacgtgaagatgcagaagaattcacatttaacgatgacacagaatatgacaatcattcctttcagccaacaccgaaacttaataatggatctgggacgtttgatgatgtggaattagacaacgatagtggtgaaccgcacactaactacgatggtatgaaaagattccggatgggtacaaaaaggaataaaaaaggaaacccaataatgggaagatctaagaccttaaaatgggctaggaagaacattccaaacccatttgaagactttacgaaggatgatattgaccctggtgccataaatcgtgcgcaagaactaaggactgtgtattacaatatgcccttaccaaaagatatgatagatgaagaaggcaaccccattatgcagtatcctcgtaataaaatcagaactaccaaatataccccgttaacattcttaccaaaaaacattctatttcagtttcataatttcgccaacgtttatttcttagttttaattattttaggtgcatttcaaatttttggtgtcacgaaccctggtttaagtgcggttccgttagttgtcattgttataatcactgcgatcaaggatgctattgaagactcaagaagaaccgtcctagatttagaggtgaataataccaagacacatattttagaaggtgttgagaacgaaaatgtctcaaccgataatatttcattgtggagaaggtttaagaaagcaaactctagactccttttcaagtttatacaatattgtaaagaacatttaactgaagagggcaaaaagaagagaatgcagagaaagcgtcatgaactaagagtacaaaaaactgttggaacgagtggacccagatcctctctagactccattgacagttacagagtatctgcagattatggccgtccttcattggattatgataatttggaacaaggggccggtgaagccaatatagttgatagatccctaccacccagaactgattgtaaatttgccaagaattattggaaaggtgtcaaggttggtgatattgttcgtatccataacaatgatgaaatccctgctgacattatcttactttcaacgtcggatacagatggtgcctgctacgtagaaactaaaaatttggatggtgaaacaaacttaaaggtacgccaatccttgaagtgtaccaatactataagaacgtcaaaagatattgctagaacaaaattctggatcgaaagtgaagggccccactcaaatttgtacacttatcaaggtaatatgaaatggagaaatcttgcagatggcgagatacgaaatgagccaattactattaataacgttctgcttcgtggttgcactcttagaaatactaagtgggcaatgggtgttgtaatgtttaccggtgatgacacaaaaatcatgttaaactctggcattacacccaccaagaagtccaggatttcaagagaactaaacttctctgtggtgataaatttcgtgctacttttcatcttatgttttgtttctggtattgcaaatggtgtatattacgacaaaaaaggcagatcacggttttcctatgaatttggaacaattgctgggtcagcggcgacaaacggtttcgtctcattttgggttgctgttattctttaccaatctttagtcccaatctctttgtacatttctgtggagatcatcaaaactgcacaagcggccttcatttacggagacgttttactctacaatgccaaattggattatccttgtacaccaaaatcctggaatatttctgacgatttaggtcaagtggaatatatattttctgataaaacaggtacattaactcaaaatgtaatggagtttaaaaaatgtactatcaatggtgtttcatatggaagagcttacaccgaagcgttagcgggattaagaaaaagacagggtatcgacgtcgaaaccgaaggtaggcgtgagaaggccgaaattgccaaagatagggatacaatgatcgatgaactgagagctttatcaggaaattcacaattttatcccgaagaagttacctttgtatcaaaggagttcgttcgcgatttgaaaggggctagtggtgaagtacaacaaagatgctgtgagcactttatgttagcattagctttatgtcactccgtcctggtagaagcaaacccggacaatccaaaaaaactggatttaaaagctcaatctccagacgaagcagcgttagtagccacagctagagatgtaggattcagttttgttggaaaaaccaaaaaagggttgataattgaaatgcaaggtattcaaaaagaatttgagattctaaatattttggagtttaattcatcgagaaaaagaatgtcctgtattgtcaaaattccgggtttgaacccaggggacgagcctagagcacttttaatttgtaaaggtgcagattccattatatactcaagattaagtcgccagagtggtagcaatagtgaagctattttggaaaaaactgctttgcatttagagcagtacgctactgaaggtttaagaacgttatgcatagctcaaagggagttaagttggtctgaatacgaaaaatggaacgaaaagtacgatattgctgctgcatcattagcaaacagagaggatgaattagaagttgttgcagattccattgaacgcgaattgatattattgggcggtacagctatcgaagatcgtttacaagatggtgttccggattgtatagagttgcttgcagaggcaggaattaaattatgggttcttacgggtgataaagttgaaacagctataaacattggattttcttgcaaccttttgaataatgaaatggaattgttagtcattaaaacaactggtgatgacgtgaaagaattcggatcagagccaagtgaaattgtggatgctttactctccaaatacttgaaggagtatttcaacttaaccggttcagaagaagagatttttgaagctaaaaaggatcacgaatttccgaagggtaattacgccatcgttatcgatggtgatgctttgaaattggcgctatatggtgaagatataagaagaaagtttcttttactctgcaagaattgtagagctgtcttatgctgtagagtatctccatctcaaaaagcagccgttgttaagttagtcaaggattctctagatgtcatgacactagccatcggcgatggttccaacgacgtcgccatgattcaatctgcggatgttggtattggtattgccggtgaagaaggtcgacaagctgttatgtgctcagactacgccattggtcaattcagatatttggctagattggtcctcgttcacggtaggtggtcttataagagactggcagaaatgattcctgagtttttttacaaaaatatgatttttgctttggcattgttctggtatggtatctataatgattttgatgggtcttacctgtatgaatacacatacatgatgttctataatttggcgtttacatccctaccagtcatcttcttaggtattctggaccaggacgtgaatgacacaatatcattagtggtccctcagttataccgtgttggaattttaaggaaagaatggaaccaaagaaagttcttatggtatatgttggacggattatatcagtctattatctgtttttttttcccttacttggtttatcacaaaaatatgatagttacgagcaatgggttaggattggatcatcgttattttgtcggtgtttatgtgaccactattgctgtaatttcgtgtaacacatatgttttattacaccaatatagatgggattggtttagtggattattcattgcactgtcttgcctcgtagtttttgcatggacgggaatatggtcttctgcgatagctagtagagaatttttcaaagctgcagcgcgtatctatggagcaccttcattttgggctgttttctttgttgccgtgctgttctgcttactaccccgtttcacatatgacagttttcaaaaatttttctacccaactgacgtggaaatagtaagagagatgtggcaacatggccatttcgatcattatcctcctggttacgatccaacagatcccaacagacccaaggtcacaaaagctgggcaacacggagagaagattatagaaggcatagcactttccgacaacttaggaggatcgaactattcaagggatagtgttgtcacagaggagattccaatgactttcatgcacggtgaagatggaagtcctagcggatatcagaagcaagaaacctggatgacttcacccaaggaaacacaagatcttcttcaatcgccccaatttcagcaggcccaaacgttcggaagaggcccatcaaccaacgtcaggtcatccttggaccgcacaagagaacagatgatcgccactaaccaactagataaccgctactctgtggaaagagcgagaacatctctagatctaccaggcgtaactaacgcagcctccttaatcggaacacaacagaacaattaa

SEQ ID NO: 76405 - DNA, 2556 bp, Saccharomyces pastorianus
atgccgaagaatagtcaccaccatcgttccagttcggttaattccacaaagagtcgttctacggaatctacgaataaatggaaaattccgcactattatcgcagatccgctagcggcagcacacaagcttcgccggacaggaactcctcaacaggctcgtgtagcactctagtactacctactatgaatgttatgtctagcccgaaaaaagttttgctagaggatcccagagacaaccatactaaggcaaagaagagtagtagaaagaaatcaggtgaaatggtcttcgtcaattatactgtacaggacacggctaacgaaaatgatactgacttgcaaacccagccggtttctgtgccagcaccaaaggcgaaattaaagaagaaatcctccaaaaggagaatgctgaagatatttggatcgtcaaagaacgaacacatagaggatatcgttgaagagcaaccaatggtgcttcaaatggattcagaatctaaacccctttcgggaacccctatctcagaaagcggaatcgatgcctcgtcactaacaaccaaaagatcttataactcgttcttaaaacacaataggctaaacggtaaaactccgttctctggaaacttgtcctttccatcattaaacatgatgggtaacactactgatctgcctattgacaataacgatttttgttccgagaaagaagtcgttccgaaatcaactcatgatccttcactagcaaaaccgccatcaaggttcactggaagcgaaacaaattctactcccaacttatcaagtatacctctcatgaacacaaaaaatacaagattgaagtacaataaagtggcgcctcagagttcagaccgacaaaagtcacaggaaagtgggctatatcattctaccgaatcattcaacttcaaagatcaaaactacagtaacaataaatcctctttaagtctgaactccgatttaagtacaccccactttgcaaagcattcacctgattcaccaagaacttcaagatctttcaactgcggagactcacaaagtaaagttaaattaccggaagaaaatgacgcttctattgcatttagtaagatgtttactagaaaacgagccaacactggcgggtccacgtgttcgctagcctcacccactattgcacaaactattcagcaatcaaatataaaagttaataaattgccaactcagcgaaccacttcagttggctcattatcatccatgtcaaatcgttattcaccaataagagttgcatcgccaggaagagcaagatccgcaactcgtgggtcttccctttatagattatccagagaccttaattctttaccaagcgtcactgatctaccagaaatggatagtacaaccccagttaacgaaatattcttggatggccaaccacagcataaaagtggcagtgttaaaggagggcataggaagaaacaagaatctatctctgatgctcaaagaattcaaaattctaattcgtacattacaacaccttcatcttctctagtgactcctccttactacatgacaggttacacattaccaagttctgcatctgcttcttcaactccaaatgtgcttgaaacacacaatatgaactttgttccaagtaccagtactgttacaagttatcgcccatctagcaatttttcctcatttgacaaagaatacagtaacgaaaacgacgctagtggggaattctctgctttcaatactccaatggagaatataccggcactaaaaggtatacctagatccacgttagaagaaaatgaagaagaggatgtcccagtacaagatattccgaatacggcacacttccaaagaagggatattatggggatggatactcacagaaaggatgacagtttagattttaactctttgatgccacacggtagtacaactagtagcagcatcgtagattctgttatgacgaactcaatatccactacaacaagcaacgcgaccggaaactactttcaagatcaagataagtatacattggtaaatacgggattgggattgagtgatacaaacctcgatcattttattagatctcaatggaaacacgcttctcgatcagaatccaataacaataccggaaatcgcgtttcttacagtggctcaacaccaaacaatgttgatacaacaaagactaatttgcaagtgtataccgagttcgattttgaaaacccagagtcgtttttccatgagcaatcgaagctactaggtgagatgggccacagcaataacaacagcaacagcgccatcaacatgaatgaacccaagtctgcggatacatacattggaaatatatctccggatacttcagcaactgtttcattaggcgacctgatgggctcaaacgtttcaaacaacagtgaaagaaatttttacgatggtcatactttcgttccacagtatcaagcaaactcatctgtggaaaactcaaataatcaaaatgcagcaccaattgcaaataacgacattgataataatttacagtctttttattttgataatagcaactaa

SEQ ID NO: 76406 - DNA, 1641 bp, Saccharomyces pastorianus
atgctacggtctactatatctctactgatgaatagtgctgctcagaaaacgatgacgaattctaattttgttctaaatgcacccaaaatcaccttaaccaaagtggaacagaacatctgtaacttgctgaacgattatacagacttgtacaatcaaaagtaccacaataagcctgagccattgactcttcggatcacgggcggatgggtgcgtgacaagcttctgggacaaggttctcacgacttggatattgccatcaatgtgatgtcaggtgagcaatttgctactggtttgaacgagtatttgcaacaacattacgccaaatatggagccaagcctcataatatccacaagattgacaagaatcccgagaaatccaagcatctggaaactgccactactaagctctttggcgttgaagtggattttgtcaatttaagatctgaaaagtatactgaactttccaggatacctaaagtgtgctttggcacacccgaggaagacgctttaagaagggatgctacattgaacgctcttttctataacattcataaaggtgaagtggaagatttcaccaagagaggtctgcaagatctaaaagatggcgttctccgtactccgcttcctgcaaaacaaacatttttggatgatcccttgagagttttgaggttgatccgttttgcttctagattcaactttaccatagatccggaagtgatggctgaaatgggcgatcctcagattaatgttgcattcaattcaaaaatttctagagagcgagttggtgtggagatggagaaaatattagtagggccaacccctttattggctttgcagctgattcaaagggctcatcttgaaaatgttatctttttttggcataatgatagctccgtcgtaaaattcaacgaagagaattgtcaagatatggacaaaattaatcatgtatacaatgataacatactaaactcacacttgaaaagttttattgaattatatccaatgtttttagagaagcttcctatcttaagggaaaaaattggtcgttcgccaggatttcagcaaaattttatattgagtgcgatcctgtcccccatggctaatttacaaattatcgggaacccaaagaagaaaattaacaacctggtttcggtgacagaaagcattgtgaaggaaggattgaagctgagtaaaaatgatgcagcagttattgccaagaccgtagattcaatatgttcatatgaggaaatacttgctaagtttgcagatcgctcccagctaaaaaaatccgaaatcggtatatttctaaggaactttaatggcgaatgggaaacagcacattttgcatctctatcagatgcgtttttaaagattcccaagcttgaaactaaaaaaattgaattacttttccaaaattacaatgaattttattcttacatatttgacaataatttgaataattgtcatgaactaaaaccaatagtggacggaaaacaaatggcaaaactacttcaaatgaagccaggtccatggctgggtaaaattaataatgaagcgattaggtggcagtttgataatcctacagggactgatcaagaattaataactcatttaaaagccatactaccaaaatacctgtag

SEQ ID NO: 76407 - DNA, 2391 bp, Saccharomyces pastorianus
atgacgaaactaatcgctccttcagaaatcgtgggcggagtgcccgtcttcaaacccacatacgagcaattcgaagatttctatgcatactgcaaggccataaacaaatatggcatgaagagtggtgttgtgaaagtaatcccacctaaagaatggaaagacaaattagatctgccttattctgcggaaacgctccaaaagatcaagattaaatcacctattcagcagcatatttctggtaataaaggtctttttatggtgcagaacgtggagaaaaacaagacctataacattatacagtggaaagatctttccaaggactatgtgcctccggaggatcctaaagcaagacgtaattctaggaaaggctccgtttccaaatccacgaagttgaaactgaaaaattttgaatcgtcttttaatattgatgattttgaacagtttaggacggagtatacaatagatttatctgacttgcaaaatacggagagattaaagttcttggaagagtattattggaaaacgctaaattttactacgcctatgtacggcgcagatacaccaggatcaatctttcctgaagggctgaacgtttggaatgttgccaaactaccgaacatcttggaccatatggaaacaaaggttcctggggtgaatgactcctatctatacgctggtctatggaaggcttctttttcttggcacttggaagatcaggacctgtattccataaattatattcatttcggtgccccaaaacagtggtattcgataccgcaagaggataggttcaaattctacaaattcatgcaggagcaatttcccgaagaagccaaaaattgtcctgaatttttaagacataaaatgtttttggcttcacccaaactgctgcaggaaaatggcatacgatgcaatgaaattgtccaccatgaaggcgaattcatgatcacttatccctatggttaccatgcagggttcaattatggatataacttggcagaatccgtcaactttgctttggaggaatggctaccgattgggaagaaagctggaaaatgccactgcatttcagactcagtggaaatagatgttaagaaactcgctaaatcttggagggacaataataaagagtcgaaaggaacgccacccctcaatcaattacccaatcctgccatgcccttacttcacaggccaactttaaaagaaatggaaagcagctcgcttagatctacaagcccagatgtgggtcatttttcaaactttaaatccaagagctctggtgtttcttctcccttattatcacgtatgaaagattattccaacattgtcgagcccacactagaagatccaactttgaaattaaaaagaatctcttcttttcaagaacagcccttaaacaaacttttgaaaagagaaacttcgcaaacggcgatgctcacagatcacgaagacaacatagtggccatgagccttacttcaatggcaaacagtgcggcgtcttctccgaggttgccactgtcaagattgaattcatctaatgaactctcaaatgcccaaccattgcttgacatgacaaacaatactcttgcctttccgcgacctaatggaccatctggattgaaccctttattatatatctctaacaagaatattagcgggatatctcactcggctccacattctccagtgaatccaaatatatcgctaataaaacgagttaagtctcccaacattgtaacattaaatatatccagggaatcgtcaagaagccctatagctctgaattacgaggcaagacaacaacattcgcaacaacattcattctccacaccatcaaccgtgtcaaatctctctacttctgtgctcgggccactgagtgacacaaacgacataaaaacaccgcaccctgaaaggccaaatcacaagacagcaaatagaatactcaaaaaggaatctcctgtcgagacatcaaaatcaaatcttatactttcaaaggttgcatccactcgccaagaggattcgtttacaagccgaaatgacgatctagacaaagaacaaggctcttctccattaaactctaagtttgcgcccgaagaaatcgtgttatcaggtaagaacaagatttatatttgtaaggaatgccaaagaaagttctcttctggtcaccatcttacaagacacaaaaaatccgtccactctggtgagaaacctcattcttgtcccaaatgtggcaaaagatttaaaaggagagatcacgttctgcagcacttgaataaaaaaataccgtgtatttcaaacgaaacaacagtagatgctccaataatgaaccctacagtgcaaccgcaggacgggaaagcggccattaatcaacagagtacacctttaaactga

SEQ ID NO: 76408 - DNA, 2337 bp, Saccharomyces pastorianus
atgaagttttatatagatgatttaccagtgctttttccataccccaagatatatccagagcagtataattatatgtgcgatattaaaaagactctggatgtaggtggaaacagtatcttggagatgccttcaggaacaggtaaaacggtctcattactatccctcacaattgcctaccagatgcactacccagaacatagaaagatcatatattgttctcgtactatgtctgaaattgaaaaagctttagtagagttagagaaccttatggattacagaactaaagaactaggctatcaagaggattttcgaggtcttggcttgacatcaagaaaaaatttgtgtttgcatcctgaagtgagtaaggaacgaaaaggtacagtagtcgatgaaaagtgccgtagaatgacaaatgggcaggcgaagagaaaattagaagaggatccagaggcaaatgtagaattgtgtgaataccatgagaatttgtacaatattgaagtagaggattatcttccaaaaggcgtattttcttttgaaaaacttttgaaatactgcgaagaaaaaacactttgtccatattttattgttcgtcgtatgatttctctttgtaacattattatttattcttaccattatctattagatcctaaaattgctgaaagagtttccaacgaggtttctaaagatagcattgtcatttttgatgaagcgcacaatattgataatgtgtgtatcgaatcgctgtcattagacttgacaacggatgcattgagaagagccacacgaggtgctaatgcgttagatgaacgtatttctgaggtcagaaaggttgactcacagaaattacaggatgaatacgaaaaactagttcaaggtctccattctgcagatattcttaccgaccaggaagagccatttgtggaaacacctgtattgccccaagatcttctaacagaagcaatcccgggaaatatacgaagagccgagcattttgtttcatttttgaaaagattgatagaatatctgaagaccagaatgaaagttcttcacgttatttcagaaacgccaaaatcatttctacagcatttaaaacagttaactttcatagaaaggaaacctcttcggttttgctcagaaaggctatcattacttgtaagaactttagaagttacagaggtagaagattttactgcattgaaagacatagcaacttttgctactcttatatcaacatatgaggaagggtttttactaattattgaaccgtatgaaatcgaaaatgctgcagttccgaatccgattatgagatttacttgcttagatgcatcgattgccatcaaaccagtctttgagagattttcttccgttattatcacttcagggaccatatcaccattagacatgtatccaagaatgttaaactttaaaactgttttacaaaaatcatatgccatgaccttagccaaaaaatcatttctaccaatgattattaccaagggttctgatcaagttgcaatttcttcaagatttgaaatcagaaacgatcctagtattgttcgtaattacggttctatgctagtagagtttgccaagatcacacctgatggaatggttgtttttttcccctcatatctatatatggaaagtattgtttcaatgtggcaaacaatgggtattcttgacgaagtttggaaacataaattaattttagttgagactcctgatgctcaagaaacttctttagccttagaaacctatagaaaggcttgctcaaatgggcgtggggcaattttgctttctgttgctagaggaaaggtatctgaaggtatcgattttgatcatcaatatggcagaactgtgctgatgataggtatcccgtttcaatacacagaatcgcgtattttgaaagctcgcctagaattcatgagggagaactatcgcatcagagaaaacgacttcttatctttcgatgcgatgagacatgcagctcaatgtctggggagagtactgagagggaaggacgactatggtgtaatggtactagcagaccgtaggttttcaagaaaaagaagccagttaccaaaatggattgctcaaggtttgtctgacgccgatttgaacctttcgactgacatggccatatccaataccaaacaattcttgagaacaatggcacaacccacagaccctaaagaccaagagggtgtatctgtttggagttatgaagatttaataaagcaccaaaatagcagaaaagatcaaggtggatttattgaaaacgaaaacaaagaaggagaacaggatgaagatgaagatgaagatatagaaatgcagtga

SEQ ID NO: 76409 - DNA, 6492 bp, Saccharomyces pastorianus
atgactgagcatgaaacgaaggataaggccaaaaaaattagagaaatttatcgttatgatgagatgtccaataaggtgttgaaagttgataaacgctttatgaataccagccaaaatcctcaaagggatgcggaaatatcacaaccaaaatccatgagtggtagaattagtgctaaggatatgggacagggcctgtgcaataacattaataaaggactaaaagaaaatgatgtagccgttgaaaaaactggaaagagcgcatcattgaaaaaaattcagcagcataacaccattttgaattcttcctccgatttcaggttacattattatccaaaggatccttcaaatgtcgaaacttacgagcagattttgcagtgggttacagtagttttaggcaatgatataccccatgatcttattattggaactgctgatatactcatcagacaattgaaagaaaatgaggaaaatgaggatggtaatattgaagagcgaaaggaaaagatccagcatgagctaggcatcaatatagactccctgaagtttaacgaattagttaaacttatgaaaaacattaccgattatgaaactcatcctgacaatagcaataaacaagcagtagcaattcttgccgatgatgaaaaatcagatgaagaagaagtaacagaaatgtccaacagtgctaatgttcttgggggagaaatcaatgataatgaagatgatgatgaggaatatgattacaatgacgttgaagtcaattctaaaaaaaaaaacaagagggcattgccaaacattgaaaacgatataattaagctctccgatagtaaaacaagtaatatcgagagcgttccgatatactcaatcgatgaattttttttgcagagaaaacttcggtcagagcttggttacaaggatacctctgtaatacaaggcctgtcagaaaaaattttgaatgatattgaaacacttgagcataatccagtagcgttggagcagaagttggttgatctgcttaaattcgagaatatatcactggctgaatttattctcaagaatagatctacaattttttggggcatacgactggcgaagagcacagagaatgaaataccgaacttaatagagaaaatggttgcaaaaggtttgaatgatcttgtggaacagtataaatttagagaaactacacactcaaagcgtgaactcgattccggtgacgaccagccacagtcttcggaagcaaaaagaacaaaattcagtaatccagcaataccgcccgtcatagatttggaaaagattaaattcgacgaaagttctaaattaatgaccgtgacaaaagtatccctaccggaaggatcattcaaaagggtgaaaccacaatatgacgaaatacatattccagctcctagcaaacctgttattgattatgagttgaaagaaattacttctctaccagattggtgtcaggaggcgtttccttcatcggaaacaacgtccttaaaccctatacaatcaaaggtttttcacgcagcatttgaaggtgattcaaacatgctaatatgtgcacccactggttcaggtaagacgaatatcgcgttattgacggtattgaaagccttatcccatcattataacccgaaaactaagaaattaaacctttctgcatttaaaattgtttatatagcacccttgaaagccttagtacaggaacaagtccgagaatttcaaaggaggctggcttttctaggtataaaagtcgctgaattgactggtgattctaggcttagtagaaagcaaattgacgagacgcaggttttggtgtctacgccagagaaatgggacataactactagaaattcaaataatttggccatcgtagaacttgttcgtttgttgattatagatgaaatacatttgttacatgatgacaggggaccagtattggaaagcatcgtggctaggacattttgggcttccaaatatggccaggaataccccagaataataggcctttctgccaccttaccaaattatgaggatgtcggtaggtttttaagagttccgaaggaaggattgttttattttgactcctcatttagaccgtgtcctctatctcaacagttttgtggcattaaggaacggaactccttgaaaaagctgaaggctatgaatgatgcttgttatgaaaaggtattgaaatccatcaatgaaggtaatcaaataatcgtgtttgttcattctcgaaaagaaacatcacgaacagcaacatggttgaaaaataaatttgctgaagagaacattactcataaattaaccaaaaatgatgcaggatcgaagcagattttaaagacagaagcagccaacgtactcgatccaagtctacgaaagttgattgaaagcggtatagggacgcatcacgcagggctgaccagaagtgacagatccttatctgaagatttatttgcagacgggttgttgcaagtattggtatgcactgcgacgttagcatggggtgttaatctccctgctcatacagtgattataaaaggaacagatgtctattcacctgaaaaggggtcctgggaacaactttctccacaagatgtacttcaaatgttaggtagagcaggcagaccgagatatgacacatttggcgagggtattataataacagaccaatcgaatattcaatattatctctcggttttaaatcaacaattaccaatagaatcgcaatttgtttcaaaattagttgacaatttaaatgcagaagttgtcgctggtaacattaagtgcaggaatgatgctgtaaattggttggcgtatacttacctatatgtcagaatgttagcttcccctatgctttacaaagtacctgatatttcaagtgatgggcaattgaaaaagtttagagaaagcttagtccattcggccctatgcattttaaaagaacaagagttggtgttatatgatgctgaaaatgatgtaattgaggcgaccgatctaggaaatatagcgtcgtcattttacataaatcatgcttccatggatgtttacaatagagagttagatgaacatacaactcagattgatctttttagaatattctcaatgtcggaagagtttaagtacgtatcggtgagatatgaagagaaaagagaactaaaacaacttctagagaaagcacccattcctatcagagaagatattgatgatcctttagcaaaagtgaatgtactactgcagtcttatttttcccagctaaagttcgaaggttttgcacttaattctgatatggtgtttattcaccaaaatgctggtaggttattgcgtgctatgtttgaaatatgcttgaagagaggatggggacatcccacacggatgttgttaaatctttgcaaatctgccacaactaaaatgtggccaacaaactgtcctttaagacagtttaaaacatgccctgtcgaagtgattaaaaggctggaagcctctacagtaccgtggggagattatctacagctagaaacacctgccgaagttggtcgtgcaatcagatctgaaaaatatggaaaacaggtttacgatttattgaaaagatttcccaaaatgtccgtaacatgcaacgctcagccaattacccgtagcgttatgaggttcaacattgaaataatagccgactggatatgggatatgaatgtacacggttcccttgaaccttttttgctcatgctagaagacactgatggtgattcaatactttattatgacgtactattcatcactccagatatagttggtcatgaatttaccttatcctttacttatgagttaaagcagcacaatcaaaataacttaccacctaatttcttccttactttgatatcagaaaattggtggcacagtgaattcgagattccagtttccttcaatggatttaaacttccgaaaaaatttcctcctcctactccccttctggagaatattagtatttcaacatcagagcttggcaatgatgatttttccgatgtatttgaatttaaaactttcaacaagattcagagccaggtcttcgagtctctctacaattcgaatgactcggtctttgtaggttcaggaaagggcacaggtaaaacagctatggctgaattagcactgttaaatcattggagacagaataaaggaagaccggtttatatcaatccgtctggggaaaaaattgattttttgctatctgattggaataaaaggttctctcatcttgctggtggtaagataataaataagctaggaaatgatccttctctaaatttaaaattattagcaaaaagccatgttctcttggctacccccgtgcaatttgagcttttgtcacgtcgttggagacaaaggaagaacatccaaagtttagaattaatgatatatgatgacgctcatgagattagccaaggtgtttacggtgctgtgtatgaaacgctaatttctagaatgatatttatagcaacccaacttgaaaagaaaattcgatttgtttgcctttcgaactgtttggcaaatgctcgtgattttggtgaatgggctggtatgacgaagtcaaacatctacaacttttctccaagcgaaagaattgagcctcttgaaattaatattcagtcatttaaagatgttgagcacatatcattcaatttttcgatgcttcaaatggcatttgaagcatctgctgctgcagcgggaaatcgtaattccagttcggtgttcttaccatctagaaaggattgtatggaagttgcgtctgcatttatgaagttttcaaaagcaattgaatgggatatgttgaacgctgaagaagagcaaattgtaccatacattgaaaagttaacagatggtcatctaagagcacctttaaaacacggtgttggtattttgtataaggggatggcatcaaatgatgaaagaattgtgaaaaggttatacgaatatggtgcggtatcggttttactcatttctaaggattgttctgcattcgcttgtaaaactgatgaagtgattattttaggaaccaacctttatgatggtgcagagcataaatatatgccatataccataaatgaacttctagaaatggtgggactagctagtggtaacgattcaatggcaggcaaggttttaattttgacaagtcacaacatgaaggcctactacaaaaaattcttaattgagcctttgcctactgagagttacctacagtatattattcatgatactctgaacaatgagatagcaaattctattatacaaagcaaacaagattgtgttgactggtttacatattcgtatttctatcgtcgtatccatgtgaatccaagctattatggcgtaagggatacgtctccacatggaatttcagtttttttgagtaatttagttgaaacttgtttgaatgacttagttgaatcatccttcattgaaattgacgatacagaagctgaagtaaccgcagaagttaatggaggagatgatgaagcaactgaaatcatttctaccttgagcaacgggctaattgcttctcactatggcgtatcattttttactattcagtcattcgtttcttctttatcgaatacgtcaacgctcaaaaacatgctgtatgttctttcaacagcagtagaattcgaaagtattccactcagaaaaggagacagagcattacttgtcaaattaagtaaaagactaccattgagattccctgaacacacctcttctggttcggtgagctttaaagttttcttattgttacaagcatatttttcacgtcttgaattacctgtcgactttcaaaatgatttaaaagacattctagaaaaggttgttccactaattaacgtagtggttgatatcctttcagcaaacgggtatttgaatgctactaccgccatggatttggcgcagatgttgattcagggtatatgggacgttgataatccgttgagacagattccacacttcaacaacaaaattttggaaaaatgtaaagaaattaacgtcgagacggtctatgatataatggcccttgaggatgaagagagggatgaaattttaacgcttactgattcacagcttgcgcaggtcgccgcgtttgttaacaattaccccaacgttgaacttacttattcgttgaataattctgattcgttaatttcaggtgtaaaacagaaaattaccattcaattgacaagagatgttgaacctgagaacttacaagtaacatctgaaaagtatccgtttgataagctagaaagttggtggttggttttaggtgacgtatctaaaaaagagctttatgcgatcaagaaagttactttaaataaagagactcagcaatatgaattggaatttgacactccgacatctggtaaacataacttaacaatttggtgtgtctgtgattcatatcttgacgcagataaagagttgtcctttgaaataaatgtgaaataa

SEQ ID NO: 76410 - DNA, 381 bp, Saccharomyces pastorianus
atgaccgtacttttagagcatccactggggccagacagtagtaggatcctatgcttggcgttaggtaaaaacatggcatctaaagcttcttgtacatctttaagttttcttttatgtatggccacttgctccaaacaattgggcttgaacttttcgtaccactgttcaccgacgtcgtcgttgatacttgggaggatactagacgtatcttgcttggaaagaaagtcattttcagtgcttcttgccttacgaactggcgaagtcggtctagatgagctccattttgttatttgcgagcccaatgaactgagactatattgtaataagggccgtttgttcaaattcgtactatccatatcattcagacaggaacaaacttga

SEQ ID NO: 76411 - DNA, 1980 bp, Saccharomyces pastorianus
atggatagtacgaatttgaacaaacggcccttattacaatatagtctcagttcattgggctcgcaaataacaaaatggagctcatctagaccgacttcgccagttcgtaaggcaagaagcactgaaaatgactttctttccaagcaagatacgtctagtatcctcccaagtatcaacgacgacgtcggtgaacagtggtacgaaaagttcaagcccaattgtttggagcaagtggccatacataaaagaaaacttaaagatgtacaagaagctttagatgccatgtttttacctaacgccaagcataggatcctactactgtctggccccagtggatgctctaaaagtacggtcataaaagaactctcaaaaatcttagttcctaaatacagacaaaatagcaacggaacgtcccttcgaagcaccccgaacgagcataaagtgaccgagtttagaggtgattgtatagtcaacgatcttcctcagatggaaagctttagtgagttcttaaaaggcgcacggtatcttgtgatgtccaacctgtcattaatactcatcgaggaccttcccaacgtcttccatatagataccagacgtcgatttcaacaacttatattacagtggctatatagttcggagcctctattacctccccttgttatatgtataactgaatgtgaaattccagagaacgataataattatcgcaaatttggtattgattatacatttagtgcagaaaccataatgaacaaagaaatattgatgcatccaaggttgaaaagaattaagtttaatccaattaacagcactttattaaaaaagcacttgaaatttatttgtgtacagaatatgaaaatgttgaaggagaaaaataaatggaataaaagacaggaagtcatagattatattgcgcaagagactggtgatattaggtcagccattacgacccttcaattttgggcgacatcaagtggaagtttgccgatttcaacccgagaatccactatatcatactttcatgccattgggaaggtgatacatggttcccatagcacgaataacgataacgaaatgattaataacctcttcgaaaattcgaacaatttgttatcgaaagaggatttcaaattaggaatattagagaactataacacatttaataaaggcgaattcagcatttctgatgcatcatcaattgtggattgcctgagcgagtgtgataatatgaatggtctaccagaatccaatgagtatggtttacgagaagtgcgcaaaacctttcgtaacatcagtaaacaaggccataatcatggaacggtttattttccaagagaatggaaagtaagaaaattacaaaattcatttaaagttcaagctgaagattggttaaatgttagtctttataagtacaacgcggtacattctttcaggaatataactctagaatttggctactacgcacctctaattagaaagtgtcagagttataaaaaaaaatccattctctattatttgaagaatcttccgagtggctcctcggggcccaaacaaaccatggacaaatttagtgatataatgaaagttgagaacggaatcgacgttgtggatcggataggcgggcctatcgaagcactatctgtggaggatggactagcaccattgatggataatgatagcaataattgtgaccatttagaggatcaaaaaaaggaaagggacagaaggcttcgcatgttgattgaccaatatgaaagaaatgtgatgatggctaacgacgatcttgaagacgaagaaacttcttttaatgatgaccctattgtcgatagcgatagcgataacagcaataatattggcaatgaaacatttggtagaagcgacgaagacgagtctctatgtgaaattctgtcccagagacagccgcgtaaagcgccagttatcagtgagtccctttcagattcagatctggaaatactctaa

SEQ ID NO: 76412 - DNA, 735 bp, Saccharomyces pastorianus
atgactgtggttgaaataaaaagccaggaccaatttacgcaactaaccactacaaacgctgctaataaactcattgtcttatattttaaagctcaatgggctgatccttgcaaaagtatgagccaggtgctagaagctgttagtgaaaaagttaggcaagaggatgtccggtttttatcaatagatgcagacaaacatccagaaatatcagacctttttgagattgcagccgtaccatacttcgtcttcattcaaaatggtactattgtgaaagaaatatcaggcgcagatcctaaggagtttgtgaaaagcttagaaattctttcgaatgcttctgcctcactagcgaacaatgccaagggtcctaaatctacgtctgatgaggaaagcagcgggtcttccgatgatgaagaggacgaaactgaagaagaaataaatgctaggctgatgaagctagtacaagctgcacctgtgatgctattcatgaaaggaagcccatcagaacctaaatgcggattttctagacagttagttggtatcctcagagaacaccaaataaggttcggattttttgatatattaagagacgaaaacgttagacaaagcttgaagaagttttctgattggcctacttttcctcagttatatatcaatggggagttccagggaggtttggatattatcaaggaatctatagaagaagatcctgaatatttccaacatgctctacagtaa

SEQ ID NO: 76413 - DNA, 900 bp, Saccharomyces pastorianus
atgtctaccttttctgcttctgatttcaactcagaaagatattcatcttcaagaccttcttatccctccgatttttacaagatgattgatgaataccacgacggagaaaggaaattactcgtagatgttggctgtggaccaggtactgccactttacaaatggctcaggagttaaaaccattcgaacaaattatcggaagcgatctctccgctaccatgattaagactgcagaagtaataaaggaaggaagtcctgatacatacaaaaacgtttcatttaagatttcttcaagtgatgattttaaattcctaggcgcggattcagtagacaaacagaaaattgatatgattaccgcagtagaatgtgctcattggttcgatttcgaaaaatttcagcgatctgcttatgccaatttgagaaaagatggtactatcgctatttggggttatgcggacccaattttcccggactaccctgaatttgatgatctgatgattgaagttccttacgggaagcaaggactgggaccctattgggaacaaccggggagatctcgccttcgtaatatgctgaaagactctcacttagacccagaacttttccatgatatacaagtttcatattttggtgcagaagatgtgagagacaaagtaaaactccaccagcatacaaagaagccattgctaatcagaaagcaggtcaccctagtggagtttgcagattatgtcagaacctggagcgcttaccatcagtggaagcaggatccaaagaacaaagataaagaagatgtagcagattggtttattaaagagtcactaaggaggaggccggaactttccaccaacaccaaaattgaagttgtttggaatactttttacaaacttggcaaaagggtctga

SEQ ID NO: 76414 - DNA, 162 bp, Saccharomyces pastorianus
atgagactacataaaacatttatctgttttagtcaaaacaaacgtggttgtagaaatattctgcaagaaaatccgcggatgatatttgagaataaaatactcataatgatattgaggcagggtatattttttattagcgtgagcaccaagatcagtttctaa

SEQ ID NO: 76415 - DNA, 3366 bp, Saccharomyces pastorianus
atggattttcagtgcagaacgtgtagccaggcttatgatgctgagcagatgatgaagcatctctcaagtacgaggcataaaactgtattcgacacttcaaatgatgaagatatttgctgtgaggaatgtcaagataaaaatatacaccaacttcaaatcatcaggtttgggggtgaagacatgattttactttgtaattcgtgttttcggaaagaatattcagaaacggagcgtccatcaactagctactcattacaaaacggctctatattgaaattttgggaaaagtacgtgaaagtcagggaatgttgttgtgatgagtgtggggaagagtctaacttgaatgcaaatagaaatggagaagtattatgtgacaagtgcttgcccaaatcgaatagagctaaagactttgtttctgaaaaaagtggaagattcctatacatctacttgggactgaatgaaacacagaatagcactagaaagcctagaaaaaagggcggcagaagagttggtagaggaaagaagggcaggaagggtgctaagattaagaaggagaaaaaggaaactttcgaggccaaaataagtagaatcgcttatgaagtcaagaaagaaaatagtaccattcaaagctctagtagttccaatctaagaaacttcaaaggtttcaaagcggtggaaagcgatccagtagttgcagcaaaagtaagcaaatcagagactagtagaagtaatcctggcccatcaaatcgaaacaaagggaaaggaaataaggcaaaccacaaaaagaatagtggaaatgggataggaaaagagaaagaaaggaaaacaaacattagaaataatgtccgtaacagccaacctataccagaggacagaaaaaataccaatagccgcgttacaacaaactctggagggaaaggcaagaacgaatcagtggataagcaccaattaccgcaaccaaaagctttgaatggacacgggtcgggcagtactaatactactggtttgaaaaaagggaaaaaagagcatgctggccagaagactaagggcaatgataaaacgggtaataagaatccgcgagaggccaaactaaattcagctggcagaaagaatgcacttggcaaaaaatcaaataaccagccaaataagggaactagcaggtggacaattggatctgatactgaatcttctagagaacctagtgttagcccaaacgagaacacaaattcaattactaaatcgcgaaaccacaataagaaggctagcaaaccgacgctgaatgaaaaatcaaaaacaacaacgataccaaaaaagttggagacaaaaaatcaagagaaaaataatggaaaaactaaggacgggaaacttatttacgaagaaggtgaaccactcacaaggtataatacctttaagccaaccttatcataccccgatttgaacacatacctaaatgattactcatttgccctttttttggaacagaaattagagaacgaatttgttcaaaacttcaacatactatggcctcgcaatgaaaaagatacagcttttataatcaacgttgagaagaataataattcagaacttgagaaattactacctgcaaatttgcttgcactcggtagaccggcatttaatgaaaggcaaccatttttcttttgtactcaggatgaacaaaaagtttggtatatttttatcaaagaactttctattcaaaggggtaaatatgtgttgttagtggagcttttttcgtggaataatttgagtttgccaacgaaaaatggttcatctcaatttaagctattgccaacttctgcgcagacaagtagaattctatttgccatgacgcgtattacaaacccaaaatttattggcctattactaggccaaaagtctattaaagagatttattttgataacaggctaaaattttccagtgacaagttgaaccgatctcagaagactgcagtggaacatgttctaaacaacagtattacaattctacaaggcccacctggtacaggtaaaacatcaacaatagaggagataatcatccaagtaattgaaagatttcacgcattcccaatattgtgtgttgccgcgtcaaatattgctattgataacattgccgagaagattatggagaatagaccgcagataaagatcttaagaattttgtcaaagaagaaagaacaacagtatagtgatgaccacccattgggcgaaatttgtctccacaatattgtatacaaaaatctttccccagacatgcaagtcgtggcaaacaaaacccgcaggggcgaaatgatctccaaatcagaggacacgaagttttataaagagaaaaaccgtatcaccaacaaggtcgtatctcaatcgcaaataattttcacgacaaacattgctgcaggtggtcgtgaattgaaggttataaaagaatgtcccgtggtaataatggatgaggctacacaatcatcagaggcttcaacactagtcccactttcgttaccaggtataagaaattttgtcttcgttggggacgaaaagcaattgtcaagtttcagcaacatccctcaactggaaacctcactattcgaaagagtcctgtctaatggcacgtacaaaaacccactaatgctggatacgcagtacagaatgcacccaaaaattagcgaattccccattaagaaaatatacaatggtgaattgaaggacggtgtcacggacgaacaaaaggcatggcctggcgtgcagcatccgttgtttttttatcagtgcgatttggggcccgagagcagagtgagaagcacgcaaagagacatagtcgggtttacgtacgaaaacaaacacgaatgtgtagaaatcgtgaagattatccagatactaatgttggacaagaaggttccgctggaagaaattggtgtcataacgccctattctgcacagcgtgatctgctgtctgacatcttgaccaaaaacgtagttatcaaccccaaacagatttctatgcaacaagaatacgatgaaattgagctatttaacgcggctggttctcaaggaaccgccggcagtctacaaaacaatgtgattaacatcatcaacggcctacacgtcgcgaccgtagactcctttcaaggccacgaaaaatctttcatcatattttcatgtgtcagaaataacaccgaaaacaaaatcggctttttacgtgacaaaagaaggttaaacgtggcattgacaagagccaagcacggactaattgtggtgggcaacaagaatgtcttaagaaaaggagaccccctatggaaagactacattacctacctcgaggaacaagatgtcatattcactgatctcacagcttactag

SEQ ID NO: 76416 - DNA, 804 bp, Saccharomyces pastorianus
atgtcaaccagtcgtgaagattctgtgtacctagccaagttggctgaacaggccgaacgttatgaagaaatggtcgaaaacatgaagactgttgcctcctctggccaagagttgtcggtcgaagagcgtaatttgttgtctgttgcttataagaacgttattggtgctcgtcgtgcctcttggagaattgtttcttctattgagcaaaaggaggagtccaaggagaagtccgaacaccaagtcgagttgattcgttcgtaccgttcgaagattgagaccgaactaactaagatctccgacgatattttgtccgtgctagactcccacttaattccatcagccaccactggcgagtccaaggttttctactataagatgaagggtgactaccaccgttatttggctgaattttctagtggcgatgctagagaaaaggccacaaacgcctctttagaagcctacaagaccgcttctgaaattgccaccacagagttacctccaactcacccaatccgtctaggtttggctctaaacttctctgtcttctattatgaaattcaaaactctccagacaaagcctgccatttggccaagcaagcttttgacgacgctattgctgagttggacactctgtctgaagaatcatacaaagatagcacacttatcatgcaactgctaagggacaatttaaccttatggacttcagacatgtccgagtccggtcaagctgaagaccaacaacaacaacaacaacatcagcaacagcagccacctgctgccgccgaaggtgaagcaccaaagtaa

SEQ ID NO: 76417 - DNA, 804 bp, Saccharomyces pastorianus
atggatgtcgatgagaggttgcatcaagatgaaaatcaaacccaccctttttcgcaaaagaagtcaagcagtttcttgataaaggaaaaagctgctacaaaatccaaggatcttgaacatataaggcttcgtgacctaaatttcaatcatagaaaaaagctagatgacaaaaaattggcaaagcaagtcccagttaaggcaaatttcaagaagcctaacgaaattgaagctcgcgctaacttagattcaaatgaattaacagatatcaaccttgactatataccggattccccatctatagagaaaatatcagggcctgaggattctattgttgtaacgccaagaaatatcatacatttacaatctgattcagatattattctcgaggaatgcgagcataattatgactgtagccctttttaccgtctgttcaactacgaaaatagaattgagcccgatgactacgaggctattataaacgctataataactgacgaaattgctggcacatatccgattttcgaacgggaattagagtaccaagaactgaaaagtcttgtcagaaagcgagattatattatgtattatttcttgtcaagggattatcgggggttttttcagttgaaagaggaacgtactttattttataggtacccttcaattgcgtacactagcccgttgaggtatctggataatggatctgaaaccgagcagtttaccggggatgatgatgaggagctccaatcatttgattttgaaaacacatcatctgtgaggactttagatagtaatatatggcgttag

SEQ ID NO: 76418 - DNA, 258 bp, Saccharomyces pastorianus
atgtcagcagagaaccttagtactggctcgccgacgggcaagcagccatcctctgaagttaatcttggcgaaagagaagctggaacaaaaaatgagaggatgatgcgccaaaccaaacttctgaaggatacattagacttgttgtggaataaaaccttagagcagcaagaggtgtgtgagcaactaaagcaagaaaatgattatctagaagattacattggcaatttgatgagatccagtaatgtgttggaaaaataa

SEQ ID NO: 76419 - DNA, 324 bp, Saccharomyces pastorianus
atgctaatactgttacgtttatctgaggtttgtgtgaattttgtgataattatcgggattccattgttgatagaggcttcaatactatgtatacagaacatactagaacttctcctcaagggtatagggatcctcaaatttaatcggtatttgcatacaataatattacgattatttttcctatcgttttatatgcttcattttcccattacattatcaattcttgcatttcagcttccattaaacttgctaactctttctcaagcttcatttcatcttcctagatctcatatgatactataccagcagcaagaatgctactaa

SEQ ID NO: 76420 - DNA, 735 bp, Saccharomyces pastorianus
atgtttaaaagaatcgcaatagcccagataagaacgtatacaaatggcgttgttttcaagacagcctctaaatccaagagaagatggattccatggacaatttttgggggaagttttcttggagggtggtacttgacacagcatatgacgttcacggacctactagcttattggagatatgatgccctacccaagaacgcagatgaagtcgtcaaatatcacgctgatctgaatagacgtttaaatggcctacccatagtaaaacagttggagaatgctggttttgtacaagtgattgctaatgaagaggagaacttgttagtgtcaagggcattaaatacaccaggtggcgtcgctataccaccaagagtttactacaaccccagtaggcgtgaaactgtcgggctataccatttaggaatgaaacttactggttatcctttcttaattcacggaggcattttagcaacagttattgaagatttaatgaaagaggccattagactcgaaaaaggaacaaaaaatataaaccaagaaaccaagaatttgagtatctcgtacaagttccccacgttcgctaatcaatttgttgtagtaagaaccaccgatcttcagcaatacggtaacaaaactaaattaaaggctgaacttatggaccaaagtggcaacaggacattggtcaaagctaatgccacgttttccagcgaacaagagaatccaaaagaagaaaaatag

SEQ ID NO: 76421 - DNA, 636 bp, Saccharomyces pastorianus
atggccactaagcaattactgagacgtcaaatcaaaagggtaataaatgctcttgactacgatattatcgctgcagagtcgcatactatttctcaagcagtacgctcattgatcgcttccaccaattctaggcgtgtagcgtgttatatgagcatggataaaggagaagtaacgactggagaaatcattaagaatttatttcaagatggccaggaggtctttctgccaagatgtactcatacttctgaatcgaaacacttcaaattacgggaagatcatcatccacatttaatattccatcgaatgagtagtttgaaaatggttcgtgatttgaagcctcaaggtccatatcaactaaaagagcctgaaccgcatattgaggaatcagatattctagatgtcgtattggtgcctggagtggcgtttgatattaaaactggtgcaaggatgggtcacggtgctgggtattatgacgattttttccaacggtataagatactgcacgaaggccaaaagcccctcctagttggactatgtcttatggaacaggtggcctctccaattcctttagaaaaacatgattattccatggattgtatagtatgcggagatggatccatacattggtttcaataa

SEQ ID NO: 76422 - DNA, 2385 bp, Saccharomyces pastorianus
atggcagcaaaaagaggattagccaaacaaaaatctagggtaaccaaagcctgtgatagatgccataggaaaaagattaagtgcaacagtaagaagccatgttttgggtgtattgggtctcaatcaaaatgtacgtatagaaatcaatttcgtgaaccgattgaggcttttttcaattatactggtagtctcagtaatgatttggataatgctaagtgcagcatagcaaaattgaaggctcagttacctccaagcgcaccggcctctttacagaaaggcctagcaaacatttgcactgagcttgaaaaaatacaacctcagctttacctcaatctggacagtaaggaaattagctcgtatggtggcctgaaatcgatagaaacagaaattatcgggaaacagtcaaaatctttgaataggttctccaacgcttttgaaagcaatactgcacagaatgtcagtatgtactttggggtctattcaccgttgctatattttgcctctacgggtattagctggataactaaaaaattgatttcatgttcgaatgatagggagacgagagaaactatctatttatttttgaagtttcttgacgctagctctgctagccatgctggtcctaaagtaacttcgatatctcctttagagtattattcaaagctaaacggactttcatgtgggaacgacgtacttattcaacacattatgtcaaatatatcgaatgaaatcaaaggaaatacaaacattaaccaaacaatcaaattcaataaaccaacagactggtttatgtacggagtacagttgatggaacagcaccacaaggcgttggatcgtaaaagttccaaaaaattacttcctttgaaatattttcttgagcaagatgagttgattttttgtctctgtcttgaatattttgaaagatccctattttcgacaatgtacgacttgactattttaaagggcttagtctcgttgatgaaacacagatattggatagacgatccttttgtgctgggaagaattatttccacgatgtccaggcgaagtttggatgctggtttaaatcgttgggaatattatattggtcaggatgaggacactgccgaagaatatcgtaagttatggtgggactgctactggtgggatagatggtattcattggtcaccggtaagcagccattgatacctcatgaaatgacttcgtgtctctttcccaaggatgtggttggattaggggtagatgattcgatggactgttttactttaataaacttggtggagctcgacccaagtaagtttgatatttgtatctctttcggctatattctattaacgaaaattattacagcggtattctctggtttgctttataatcgacactttacagactacagattatttggaactcctaatgctaaagacctaaatggaaccgcacgacagcttatggtagagttttcaaaaatatgtaaaatttttcagtgcatacaagacaaactaatccctttcctcaaacaatattctgaaaacagtaatgtatttgaactatacacccatttcggatttgcaaaggtttgttgttttcagggaatggagagtttgattttaaggatacaaaatcttctacaagaaagagagagaattgaacttgattcctgcgtaaaggacatcaggcttcaaacctttgaagcatctgtagatattttgacggatgttctcaagcacgaagatacgttctatattttccgttgttcgtggttcatatatgccatcttgatgaatattaccttgaattttatcgagacccctagaaggaactcgatatgttatttatccttgatgtgccacatgatagcctcatacaatgacttatttgtgagctctggtaatgttaatttcaagggcaacaacgccttctctaaaaagttggaaaatggaacagcagtttctttcatcctaacacgcatctgctgtcagatgtacacacgttcacagaaaatggctaaggaatcactattttgtgaattgaaaaaatatggccaggcttgctcagatgctggtcaagctgcgctggacattgaatgtatctggtacaggaatattataggcgaacacaaagaatcaagcttccgtaaagaaattctcagcattcttgatagggaaatgggtgatttggtgaataatagagttattggcgtacagggaaaaaatcaagaaggtgcttgttatgagaaattgtcacccagcagcaccagtgtttcagttggcatggacttttgtagcctcgaaaattttgtgactgcagaatctctaccagaccttctcaatctattttgggaggacactgaatttggtattactaaagaaaacctcggagagtaa

SEQ ID NO: 76423 - DNA, 912 bp, Saccharomyces pastorianus
atgtccacaactgattcggggttcgtactttaccactatacgccaagtaaagcggctgcaatcgtatttgtcgtactcttcattataatgacagtcatttttgctgttcaaactttatatgctgcgagaaaatcttctaaggcattgaaaaataatccatttgagtcatctgatgataaggtcgatagtcttgaggatgctgaatacaagcaactaaaaatcacacccacagtttttgcgttcatacctttcttcactggctgcatcatggaagctgtcgggtatatcgggagggctctatccagttccaatcctgaaagaacgaccccatatattatccaatctgttcttttattagtcgctccagcactaatagccgcgacaatttatatgatttttggaaggctactacatgttatgaggtgccaatctttaattttgatttctgcacgctttggtacgactttctttgttgtgggagatgtgtttagtttctttttacaagctgcaggtggcggactaatgtctaaggcaggatcaacgaagactggttcagggctcataactgcgggcctttttgtacaggtaattttttttggatttttcattatcaatgagataagattcacagtaaatgttaaaaggagatgcttattttacgaagatatttccagaaagtggatctttgtgaatgctaccctattattaagcagtatgttgatcctactacgttcaattgtccgaatagttgaatttattcagggattcaatggctatataatctctcatgagtatttcatatatgtcttcgatgctgtacctatgttattggtaatcatagcatttagtgtgggatcctttttcggcaacgtattcgatgttataaaggagtgtcaaacgttaagtaattag

SEQ ID NO: 76424 - DNA, 2577 bp, Saccharomyces pastorianus
atgtcgtccttatccacttcatttgattcatcgtcagatttgccaaggtcaaaacccgttgacaatacggcggcttccatgaagacaggcaagtacccaaaattagagaactataggcaatattctgatgcacaaccaatacgtcacgaagcgcttgcattgaaagtggacgaaacgaaagattctaaacacaaatttagttcctctaacggggagaatagtggagtggaaaatggaggctatggggagaaaacgaatacattcacaagtggccgcatggattttgaaggtgaagcagaagcagaagcagtgaaacgttaccagttaagatcttccgcgcttttaagttctaatgcgaggccatccaggctagcaaagtctgaaactcaccaaaagcagattcatgtagagagcatcgctccctctttgccaaagaatgcggctttagagagaggccatgatatggtgttacctgccgatgcgtcaagtaacagatgcaacttagaagcctcctcctcggcaagaacttttacaaacgttcgtaaggcttcgctagttagcgcaatctttgaaacatcggctgaatcggagcatggtacgcatcccaaacaggcgaaacttaagagaagaacctattctacaatatcgacacattcatcagtcaatcctacaacgttgttgacaagaactgcatcgcaaaagtccgatatgggaaatgacacacgaagaattaaaccgttacgtatggatagcagggtatctttccatagtgagatatcgcaagcatccagggattctcaagaaacagaagaagacgtttgttttccaatgtttcgactattacatacaagagttaatggtgttgattttgatgagttggaggaatatgcccagatttcaaatgctgaaagaaatctgtctttggcgaaccatcaaaggcacagtgaacgaacatacaatcataccgaccaagatactggatttactaactctgcttccacttcaggatcctcagcagctctgaaatatacacctgaaatttcacggactcttgaaaaaaattgcagcgttaatgagatgtacgtatctgaaaacaatgaatctgtgcgggaagatgataaacctgatctacaccctgacgtaacatttggtagaaataagattgaaggtgaaaaagaaggtaatgattcgagttatagccgggcgtattataccctccaaaatacagaatatcaaattcctagtagattttcgttcttccgctctgaatctgatgaaactgtgcatgctagtgatatcccttctttgatatccgagggacagacgttttatgagttatttaagggaggcgatccaacgtggtggttggattgcagttgtccaactgatgatgaaatgcgttgcatagcaaaaacatttggaatccatcctttgatcgcggaagatatcaggatgcaagaaacgcgtgaaaaggtagagcttttcaaatcctattactttgtctgtttccatacatttgaaaatgataaagaatcggagaattatcttgaacctataaatgtttacatcgttgtttttaggtcaggtgtcttgacttttcattttgacccaatatcacactgtgccaatgtaagaagacgtgtaagacaattacgtgactatgtcagtgtcaattcagattggttatgttatgctttaatcgatgatatcacagatagttttgctccggttattcaatccatcgagtatgaagctgattcgattgatgattcagtgtttatgacccgtgatatggattttgcagccatgttacaaaggattggtgaaagtaggcgtaagacaatgacgctgatgagactcttgagcggtaaagcagatgttatcaaaatgttcgccaaaagatgtcaagatgaaactaatggtattgggccagtgcttaaatctcaaactaacatggtgaacttacaagcggaacaagagaatgtgaaccagaataatagtaataaccaaataagcttatcaaatagctatatgcaaacaacatcacaaccaaggggagatattgctttatacttaggtgatattcaggatcatttgttgacgatgtttcaaaatttattggcgtacgaaaagattttttctagatcacatgcaaactacctggcccaattacaagtggaatcatttaactctaataataaagttacagaaatgttgggtaaagttactatgttaggtacaatgttagttccattaaatgttattactggtctgttcggtatgaatgtaaaagttccaggaagaaatggaagtattgcgtggtggtatggaattttgggggtactgcttttactagctgtcataagctggtttttagctagctattggatcaaaaaaatagacccacctgcaacgctcaacgaagccgcaggtagtggggccaaatcagtcatatctagttttttaccgaaaagagataaaagattcaacgatgattctaaaaatggcaatgcgagaggtggcgttcgaaggaaatcaactgtcagtctacccagtagatatagccgttacaattaa

SEQ ID NO: 76425 - DNA, 1872 bp, Saccharomyces pastorianus
atgcttggcgaagatgaagggaataccgttcttgaaaagggaaataatccttctctaaaacaaggagaggttggagctgtatttatagtacccaaaatacttatcagagaacatgaaagagttatacttaagcaaattctgcaaatcctggatcaagatgaattggttcaacctcccttagacaaatttccctacaagaaattagaattaccgaaatatatagatgaacttaagaccagagacgctactaatacatcctacaagatgatacaattggatgcttatggtgagaaaaaagtgggttcgaacggtgaattatttggcggtagacattatttgttcaacaccttcacatttacggctcatatgggtgttcttctggtacttttacaagatgtcattaaagtgttataccaaggcaacgcaacgcatgacgaggacgagtttattgtccagcatgatcaaattctggtaatggaaacttctgaggaacaaacaaaatttttggccaaaaatggtgtcattcctgaagaatccaaaggatcttttaagtatataactgccaggtcagcctttgttgaattcggtgcttctgttattgccggtggtcaacgcatcgttgatgattattgggaatctttagctaaaaagcaaaatttgtcgtctcaccaaagggttttcaaattatcaacaagtttaatttctaaaatctcacttttacgcccctccttccagaataacaggattagcaatgccaatgaaattagtgcgaacactaataatacctgtacgatttctacttcaaaattcgaatcacagtatccaatagtcacggaacaaccatcagcggagattagagaagcctatattgaaaactttgccaaaggtgagcacatttcggcaattgttcctggtcaaagcattagtggaacattggaactcagtgcacaatttagagtaccgcgttatcacagcaaaaactcatttcaacaagctctgcaaatgaaggcaatggacataccaatcggaagacatgaagaattacttgcgcaatatgaaagtcaagctcctgatggttccgcttcaatttcacttcctaaccatattccatctgtcaatcctagcaataaaccaatcaaacgaatgctaagtagcattcttgatattaacgtttcctcatcaaaaaacaagaagtctgaggagaacgaaatgataaaacccatgaacaagggccaacacaaaaataatacatcgttaaacataaacggctggaaatttgaatctttgccattaaaatccgccgagaattcaggtaaacagcaatattatagaggattgccgttatatgaaaaaaacacgctgctagaaaggttgaaacagctgacaccgaacgaaattaaagaactagagcatttacacgatgccgtttttgttaataccggtttgcagaacattagaaaagttaggacaaaaaaatggaaaaagtactggcagtacaaggcaggtattcctatcggtttgaaacggtctcaattggatgaattcaaaaataaatatttgaaagatgtgttggcgcaaacgagtgttactacaaattttaacgaaataacgaatacggatgaaacaataacaacaaagagggtaccgaacccaaacttcctaggaaattgtaacattaaggattttaaacctccatacatttattctcatgtgaacaaagtaccacaaaatgtcgctggggataaaacggctgttaagctggacactgaagtaaagaacacaaatgctaatccagtggtggcgacggatccggtcgccgctaaaccggacaacctggctaacttcagcaacgaagtagctatgaataattga

SEQ ID NO: 76426 - DNA, 1338 bp, Saccharomyces pastorianus
atgatgatattaattactatgaaaagtacagtactgttgagtgtttttaccgtcttagcgacatgggctggattgctagaagctcatccattgggtgacacttcagatgcatccaaattaagctcagactactcgctccctgatctcattaatgcacgtaaagtgcccaataactggcaaactggagaacaagctagtctagaggaagggagaattgtattgacttctaatcaaaattccaagggttcactttggttgaagcaaggattcgatttgaaggattcttttactatggagtggacatttaggagtgttggttattctggccaaaccgacggtggcatatcattttggtttgttcaagattctaacataccacgcgataagcagttatacaatgggccagtgaactatgatggtttacaattattagtggataacaatggtccattgggcccaacacttcgtggtcaactaaatgatggtcaaaagcctgtagataagaccaaaatctatgatcagagttttgcatcttgtttgatgggttatcaggattcctccgttccttccaagatcagagtaacttatgatttggaagacgacaacttattaaaagttcaggtggacaataaagtctgtttccaaactaggaaggttcgttttccctctgggtcttatcgtattggtgtcactgctcaaaatggagcagtgaataataatgcagagtcttttgaaatattcaaaatgcaattttttaatggggtgattgaagattctttgatccctaatgtgaatgcaatgggtcagccaaaactgatcaccaaatacattgaccaacaaaccggcaaagaaaaattgattgaaaaaacagcatttgacgctgacaaagacaaaattacaaactatgaattatataagaaactggatagagttgaaggtaaaattcttgcgaacgatatcaatgctttagaaacaaagctaaatgatgtcattaaggtccaacaagagctattatcattcatgactacgataactaaacagctctcttctaagccaccagctaataatgaaaagggaacgtccaccgatgatgcaatcgctgaggataaagaaaatttcaaagacttcttatcaatcaatcagaaattggagaaagtcctggttgaacaagaaaagtatagggaagctaccaaacgtcatggacaagatggtcctcaggtcgacgaaattgccagaaaactaatgatttggttacttccattgattttcatcatgttggttatggcatattacacattcagaatcagacaagagatcataaagaccaaactgctatga

SEQ ID NO: 76427 - DNA, 2145 bp, Saccharomyces pastorianus
atgctatcattttgcgactatttttggtctgaagaccttgtctcaggtctagatgtgctttttgatagattataccatggttgtgagcaatgcgacttgttcattcaattatttgcgtcaagaatgcaatttgaagtcagtcatgggaggcagttgtttggtatagaagccggtatggacaacctgaaggcagtgcaggaagatgaagatgaaggggtgacagtttcgagggccctgaggggaattctacaggaaatgtctcaggaagggacgcatcacttgacaatagcgtcgaacatagaaagtttggtgctgcagccattcagtaaatggtgcatagaacatagggaaagaattcaatactccgagaagactttgttgaccaatgtaaataatttcaggaagtctaaaaagtacgtcagtaagctggagaaggaatattttaataaatgtaggcagctagaagaatttaaaagaactcatttcaacgaagatgagctagcaaatgcaatgaaatcattgaaaatacaaaataaatacgaagaagatgtggccagggaaaaggatcacagatttttcaacaggatagcgggaatagattttgattataaaacaatgaaggagacgcttcagctgttactgaccaagcttcctaaaacggactataagctacctctcattagttattctttgagcaacaccaacaatggtggagaaataacgaagtttctgcttgaccacatgtcgttaaaggatattgatcaagctgaaacgtttggccaagatttgttgaatttagggtttttgaaatattgcaacggtgttggtaatacatttgtcaactctaaaaaattccaataccaatggaagaataccgcgtacatgtttgccaatgtgccaatgcccggttcagaggagcctaccactggtgaatccttaatatcccggttcaacaactgggatggttcatctgcaaaggaaattattcaatccaagattggtaacgaccagggggcagcgaagatccaagctccgcatatctccgataatgaaaggacgcttttcagaatgatggatgcacttgcagcgtcagataagaagtattaccaggagtgcttcaagatggatgccttgagatgctcggttgaggagttgttgattgaccatttgtcgtttatggaaaaatgtgagtccgatagactgaatgcgatcaagaaagcgacactagatttttgttctaccttgggtaacaagatttcttcgttaaaactgtgcatagataaaatgctcacgctagaaaacgatattgatcccactgcagaccttttgcaacttttagttaagtacaagacgggcagtttcaagccgcaggccattgtttataataattactacaatcctggttcatttcaaaactttggtgttgatctagaaactcgttgtagactagacaagaaagtcgttccgttgataatttcttcgatattctcatatatggacagaatatatcctgacttacctaatgataaagtaagaacttcaatttggactgattcggtgaaattaagtttaacacatcagcttcgaaacctattgaacaaacaacagttccacaacgaaggggaaatatttgatatactttctacgtccaagttggagccaagcaccatcgccagtgttgttaaaatttatttattagaattaccagacccactaattcccaatgatgtctctgatattcttcgggtgctttaccttgactatccacctttagttgaaactgcgttgcaaaattctacatcatctcccgagaatcagcaggacgatgacaacgaagaaggctttgataccaagagaataagaggcctttatactactctgtcctctctaagcaaaccacacatagcgacactagacgctattacgactcatttttacagattaattaaaattctgaaaatgggagagaacggtaatgaagtagcagatgagtttaccgtctcaatttcacaagaatttgccaattgtattatccagttaaagatcaccgatgataatgaaattggttttaagattttctatgatctactgacacataagaaacagatttttcacgaattgaaaaggcaaaattcaaaaaactag

SEQ ID NO: 76428 - DNA, 624 bp, Saccharomyces pastorianus
atgctcaagcgtattgttggattgcctacaaggcgttgctttcatagaacgtcctttttgctgggcagtgactttgaaactgtgcatattcccaatacgaaccactttaaagatttacttatagagaacggtaaatttcaagaggatcaagcaactacaatagtagagataatgacagatgcaattaggggcggggttaatcatgtttcacaggatctggcaaagagagaaaaattgacccaacttagctatcaacagcgtgttgattttgcaaagttaagagatcagctattgagtgctgatagaagtgaattccacaatattcaaaacgagtacgaaagtgtgaaaaacgatttggagaaactaagaaacaaactaagggaggaaattaccaaaacaaacgccggtttcaaacttgatctgtccttagaaaaaggcagaattagggaagaaagtagtcatcacgatctgcaaataaaagaaatcgacaccaaaattgagcaagaagtgaccaatatgaagatgcagattgattctgtcaagactcaagtcatgcaatggctgataggtgtctgtacaggtacatttgcacttgtattagcatatatgaggttattaacatag

SEQ ID NO: 76429 - DNA, 765 bp, Saccharomyces pastorianus
atgagtatcgctgaattcgcttacaaggaaaaaccagaaactttggttttattcgatgttgatggtaccttgacaccagccagattaactgtttctgaagaagttagaaaaactttggccaagttgagaaacaagtgctgcattggttttgtcggtggttctgacttaagcaagcaattagaacagttaggcccaaacgtcttagatgaatttgactattctttctctgaaaatggtttgaccgcctacagattaggtaaggaattagcttctcaatccttcatcaactggctcggtgaggaaaaatacaataaattggccgtcttcattttgagatatctatctgaaattgacttgccaaagagaagaggtactttcttggaatttagaaatggtatgatcaacgtttccccaatcggtagaaatgcttctactgaggaaagaaacgaattcgaaagatacgataaggaacaccaaatcagagctaagttcgttgaagctttgaaaaaggaattcccagactacggtttgactttctccattggtggccaaatctctttcgacgttttccccgctggttgggataagacctactgtttgcaacacgttgaaaaagatggtttcaaggaaattcatttctttggtgacaagactatggtcggtggtaacgattacgaaatttttgtcgatgaaagaaccatcggacattcagtacaatctcctgatgacaccgtcaaaattttgactgaactattcaacttatag

SEQ ID NO: 76430 - DNA, 906 bp, Saccharomyces pastorianus
atgaaactgaaagttactggagcaggaatcaaccaagtcgttactttgaagcaagatgcaacactaaatgatcttattgagcatatcaatgtagatgttaagacgatgaggtttggatatccgcctcaaaggatcaatttgcaaggggaagacgcttctttgggacaaacccagctggacgagctgggtattaactctggtgaaaagattacaatagagtcctctgatagtaacgaaagcttctgtttgccaccaccacaacccaaaccaaagagggtgctgaagagcactgagatgtcaattggtggcagtggagaaaacgtcctatcagtacatcctgttcccgacgacaactcgtgtctgttccatgctattgcctatggcatcttcaaacaagatagcgttcgtgacctcagggagatggtctctaaggaggtcctcaacaaccccgtcaagttcaatgacgccatattggacaaacctaacaaagattacgcgcaatggattttgaaaatggaatcttggggtggagccatcgagattggtatcatatccgatgcactcgcagtagctatttatgtagtcgacattgacgctgttaaaatcgaaaagttcaacgaggacaagttcgacaactacattttgatactgttcaacggaatccactatgattccttgaccatgaacgagtttaaaactgttttcgacaagaaccagccagaatcggatgatgttctaacagcagctttgcaactggcctcaaatttgaagcaaactggctattccttcaacactcataaggcccagatcaagtgcaacacttgccaaatgaccttcgtgggtgaaagagaagttgctaggcacgctgaatccacgggacacgttgattttggccaaaatagataa

SEQ ID NO: 76431 - DNA, 2025 bp, Saccharomyces pastorianus
atgtcggatgtagataactgggaacccgtatcagataatgaggacagtactgattctgtgaaacaattgggtcccccctttgagcatgcaagtaacaatgacaatgccggcgatactgaagctgagtcactgcaagaagtgcccctaaatacagagaccaacgacgtacgcaagaatttagtagtgattacaaaccaaagtgccgccgatgaacaccctacagagatcaagcacgatcaatcaaggacttcttcgacgtcctcgttcttcagtggaatgatctcttcgtttaagtcaaacgtgccatccccagtttctagatcaactacgccaacttcgccagtttcgcaaccaagcattatatcacatagaagggagccttccatggggtccaaaagaagatcaagccgccgtatcagtaatgccacaattgctgaaataggctctcccttgcaacaggtggaaaagcctgatgaggtcaagacaagactcactccttcccaaatgaaagaagacaattacgatcatagacgattcgtggaagaacgttacatggacacaccttatcactatgcgtctgagcaaagaaataaagactttcatgagacattcaagtccgttcctaaagatgacagactactggatgattttaattgtgggctgaatagagagctgctttaccaggggaaactatacataacagaaacgcacctctgcttcaactccaatgttcttggttggattgctaaagtactgattgcgttcgaagatgtcacgtttatggaaaaaacttctgctgctgggttgttccccagcgcaatatccatcgaaacaaagatgggcaaaactctctttaatggttttatatccagagatgctgcgtttggattaatgaaagaagtgtggtcaagaaccttgttgcagaaggacatggccagcgaaaacatcaatactaaagcagaaaagccaggaaatggcaaagagattgatgatgcaataaactccatcgatgaggaaaacaatgataaagacgctaatgataatgacactaatgaaaatgacgatgaaaatatctctacaaatgagactaccaccaatagtacgagttcctcgccggataaagaaaaagagaaagcgtataaactgcgtgccgattcctcgtatcagtatgatggtccaatatatcatcattcaacaagctttccggctgaacctatggccaataacgagtttgttctcaaggagttaccattcgattgtgcacctggtatactttttgagatcatgttcaactcagagcaaaacgaatttcttctagattttttacggggtcaagaaggttcacaaattaccactattccaaatttcacgagcattgacggatcttccatgactttgaagcgtgagtattcatacgagaaagcattgcactttcctgcggggcccaagtccacgacatgttatgttgctgaggtaataaagagaaaagatcctgatacttactatgaggttatcagtagcatacgcactccgaacgtgcccagtggtggtagtttctcaactaagacaaggtatctaatccgttggaatgacgaaataacgtgtctgttacgggtatccttttgggtggaatggactggttccagttggatcaaaggtatggttgaaaatggatgcaagaatggtcaattggaggctgcgcaattaatggagcgtattctttccaagttcatcaagaacaatgtcgaagagtgccaaattactatcagcaaggaggaagaggagcaagatgataaagaagtagaaaataagttgaaagaggttgaccttgaacaaccaagagaagcggttgttacggctcccgcaattgcagagcagcaaggtctcaaggtcaccatggaaacatggttgttcttatacttgattgtggtcgttttgctattgtttaatctgttctacatacgttcaattgctgtctcattacatcaactggtgaagctgcaattggtagaactgaagttgtga

SEQ ID NO: 76432 - DNA, 192 bp, Saccharomyces pastorianus
atgaaaatgtggggaccctcccaacgagattccttcagagagattacatataaagtgaaattcaagtatgacgatggtgactactccttggccattgatttgatgtctagggattgtattaatgtctatgagttgattaccgataggctactggttgatttcctttcaaaaaagctgctcaagctaagatag

SEQ ID NO: 76433 - DNA, 1869 bp, Saccharomyces pastorianus
atgttgttctactcgttcgtgtggtctgtactggccgctagtgttgctttggcaaagacacacaagttaaactataccgcttcttgggtaactgccaatcctgatggattgcatgaaaagaggatgattggttttaatggcgaatggccacttccagatatccatgttgaaaaaggagatcgtgtcgagctttatttgactaacggctttcaagacaatactgctacttctctacatttccatggtcttttccagaatacgagtttggggaaccagcttcaaatggatggtccttctatggtgacacaatgtcccatcgttccgggacaaacatacctgtacaacttcactgtcccagagcaggtaggaacgttctggtaccatgcacacatgggtgcccagtacggtgacggtatgaggggtgcatttatcatccacgatccggaggagcccttcgaatatgatcatgaacgagtcatcactctatcggaccattatcacgaaaattataaaacggttaccaaagagtttctgtcaagatataatccaaccggtgctgaacctattcctcaaaatattctttttaataatacgatgaatgtaactttagattttacacccggtgaaacgtatctcttcaggttcttgaacgttgggctgtttgtatcccagtatatcattcttgaggatcatgaaatgagtatagtagaggtggatggtgtttacgtaaagccaaactttactgattcgatatatctttctgcggggcaaagaatgagtgtgttgattaaagctaaagataaaatgcctacaagaaactacgctatgatgcaaataatggatgagacgatgcttgatgttgtcccacctgagttacaactcaaccaaactatccaaatgaggtatggccactcgttgccggaggcacgcgcattgaacattgaagattgtgacttggaccgcgccacgaatgacttttacctagaacctctgattgagagagacctacttgctcactatgaccaccaaattgtcatggatgtaagaatggtcaacttgggtgatggtgtgaagtatgcatttttcaataatatcacttacgtcacaccaaaggtgcctactttgacaacgttgcttacctcaggaaagcttgcgtcagatcctagaatttatggtgataatatcaatgcgcagttattgaaacataatgatatcatagaggttgttctaaacaattatgattctggcagacatccattccatttgcacggccataatttccaaatagtccaaaagtcgccagggttccatgttgatgaagcttatgacgaatctgagcaagatgaaatgaccgtcccttataacgaatctgcgccattacaaccgttccctgagaggccgatggtgagagatacagtggttcttgaacctagtggacatgttgtcctgagatttagagctgacaaccctggtgtctggtatttccattgtcatgtagattggcacttacaacaaggtttggcttcggtctttattgaggcacccgctttacttcaggaaagggaaaagcttaatgagaactatctggatatatgcaaagccgctgatattccggtagttggtaatgctgcaggtcattcgaatgattggtttgacttaaaaggattaccaagacaacctgagccattaccaaagggatttactactgaaggatatttggcattgattatttcaaccattatcggtgtctggggcctatattccattgctcagtatggtattggcgaggttatccctaacgatgagaaggtgtaccacacgttaagggaaatcttggctgaaaatgaaatagaggtttctcgcggctaa

SEQ ID NO: 76434 - DNA, 621 bp, Saccharomyces pastorianus
atgaatagcgagtacgattacctgttcaaactgctgttgatcgggaattccggtgtcgggaagtcctgtttacttttgaggttttcggacgacacatataccaacgactacatctccacaatcggagtggacttcaagattaagactgtagaactggacggcaagactgtaaagctacagatttgggacactgcaggtcaagaacgtttccgtactatcacttcatcttactaccgtggttcgcatgggatcattatcgtgtatgatgtcactgaccaagaatccttcaacggcgtgaagatgtggctgcaagagattgatcggtatgcaacctcaacagtgttgaagctattggtaggtaacaagtgtgatttaaaggacaagcgtgtcgtggaatatgacgtggcaaaggaatttgcggacgcgaataagatgccgttcttagagactagtgctttggactccaccaacgtcgaggatgcgtttttaaccatggctagacaaatcaaggaaagtatgtcccaacaaaacctgaacgaaaccactcagaagaaggaagacaaagggaacgtcaacctgaagggacagagtttaaccaacaccggtgggggctgctgttga

SEQ ID NO: 76435 - DNA, 1374 bp, Saccharomyces pastorianus
atgagagaaatcattcatatctcgacaggtcagtgtggtaaccaaattggtgctgcattctgggaaactatctgtggtgagcacggtttggatttcaatgggacatatcacggccatgacgatatccagaaggagagactggacgtgtacttcaacgaggcatcttctgggaagtgggttccaagatctattaacgtcgatctagaacctgggacgattgacgcagtacgcaattctgccatcgggaatttgtttagacctgacaattatatctttgggcaaagttctgcgggcaacgtgtgggccaagggtcactacacagaaggtgctgagcttgtagacagcgtcatggatgttattagacgagaggccgaaggatgcgactcccttcaaggtttccagatcacacattctcttggtggtggtaccggttccggtatgggtacgcttttgatctcgaagattagggaagagtttcctgatcgtatgatggccaccttctccgtcttgccctctccgaagacttctgacaccgttgtcgaaccatacaatgccacgttgtctgtgcaccaattggtagaacactctgatgaaacattctgtatcgataacgaagcactttatgacatctgtcaaaggaccttaaagttgaatcaaccttcttatggagatttgaacaacttggtctcgagcgtcatgtctggtgtgacaacttcattgcgttatcccggccaattgaactctgatttgagaaagttggctgttaatcttgtcccattcccacgtttacatttcttcatggtcggctacgctccattgacggcaattggctctcaatcatttagatctttgactgtccctgaattaacacagcaaatgtttgatgccaagaacatgatggctgctgccgatccaagaaacggtagataccttaccgttgcagccttctttagaggtaaagtttccgttaaggaggtggaagatgaaatgcataaagtgcaatctaaaaactcagactatttcgtggaatggatccccaacaatgtgcaaactgctgtgtgttctgtcgctcctcaaggtttggacatggctgctactttcattgctaactccacatctattcaagagctattcaagagagttggtgaccaattttccgctatgttcaaaagaaaagctttcttgcactggtatactagtgaaggtatggacgaattggaattctctgaggctgaatctaatatgaatgatctggttagcgaataccaacaataccaagaggctactgtagaagatgatgaagaagtcgacgaaaatggcgattttggtgctccacaaaaccaagatgaaccaatcactgagaattttgaataa

SEQ ID NO: 76436 - DNA, 4056 bp, Saccharomyces pastorianus
atgctgagaccggcctataaatcgctcgtgaaaacatccctgttacaaagacggttaatatcttcaaagggatctaagctgtttaaaccatctccggactcaacaagtacaatattaatatctgaagacccccttgtaacaggctcgtccccaacctcatctacaacatcgggtataataagttcaaatgatttccctttgttcaacaaaaacaggaaagacgccaagagcagcatatcctaccaatggaaaaatccttcagaattagagtttgaccctttcaataaatcgcatgcctcagcagtaacctcgatgacaagaactagagacgttatgcaattatggtctctgttagaagcatgcttgcaatcgaatctaatgaaaagagcgttctctatattggagtcactatacctggtacctgaacataagcagcgatttatcgaggattataacatgtacttgaattcaatttccaaaaatgaccctaatttccctattttaaaaatgaacgaaaaattaaccaatgatttggagacaagttttaaagacgttaattataatgacaaaactttggcaataatgattcatcacgctttgaacttccattcaacgacaagctcgatgcttttgaagcctataatctctgcctacttgaaaatgagcgtgaatggtattagggaaattttctcctgcctagatattttgaccatttcagatctgaatattttaatgaatgacttaaaggttataacaccatcgcaactgccaaattctgtaagaccaatattagaatcacttacgctatctcctacacctgtaaataatattgaaaatgaggagggtttgaacaaagtggaagctgagaacgattcaaaattgcataaagcatcaaatgcaagctctgattctataaaaaaaccttccttggatcctcttcgggaagtttcattccacggttcaacagaagtcttgtcaaaagacgctgaaaagcttatagctgtagacactattggaatgagagtaatcaggcatactttgctgggattatcattaacgccggaacagaaagagcaaatttctaaattcaaatttgatgccaatgataatgttttgaaaatgaaaccttcgaaaaacgacgataataataattctataaatttttttgagatttacaattcactgccaacattagaggaaaagaaggcattcgaaagcacattaaatatatttaaccaagatagacaaaaggtacttgaaaaccgtgcaacggaagccgcaagagagcgctggaagcacgattttgaagaggcaaaagctagaggtgacatttcaattgaaaagaatttaaacgttaagttgtggaaatggtataatgaaatgttacctctagtgaaggaagaaattaatcattgtaggtcattattgtcagaaaagctatcagataagaaaggcttgaataaagttgacacgaaccgtcttggatatggaccatacttaaccttgattgaccctggtaaaatgtgtgtcatcaccattttggaactattaaagttaaattctacgggtggtgttattgaaggtatgaggaccgcaagagcggttatatcagtgggtaaagctattgaaatggaatttagatccgagcaggttttgaaaagcgaatctcaagcgttcagagatgttaacaagaaatcaccagaattcaaaaaactggtacaaaatgctaaatctgtattcagatcatctcaaattgagcagtcgaaaattttgtggcctcagagtattagggccagaatcggttcggtattaatctcaatgttgattcaagtcgctaaggtatctgtgcaaggtgttgaccctgtgacaaaagctaaggttcacggtgaagctccagcttttgcgcatggttatcagtaccacaatggttccaaattgggtgtcttgaagattcacaagactttgattcgtcaattgaacggtgaaagattgattgcctctgtccaaccacaattattaccaatgttggtggaacccaaaccctgggttaattggagatcaggtggatatcattatacacaatctaccctattaagaacaaaagactcacccgaacaagtagcatatttgaaagctgcttccgataatggtgatatagaccgcgtttatgatggtttgaatgttctgggtagaacaccgtggactgtcaacagaaaagtttttgatgtggtttcacaagtttggaataaaggtgaaggtttcctagatattccaggtgcacaagacgaaatggttttaccaccagctcctctgaagaactccgaccctaccattttgagagcctggaaacttcaagtcaaaacaattgctaataaattctcttcagatagatcaaatagatgtgatacgaactacaaattggaaattgcaagggcatttttgggcgaaaagctgtactttccacataatttggactttaggggacgtgcttatcctttgtctccacatttcaatcatcttggtaatgatatgagtcgtggccttttgattttttggcacggtaaaaaattaggaccttctggtctcaagtggttaaagattcatttgtcaaatctgttcggatttgataagttacccttaaaggatcgtgttgcatttactgagtctcatttgcaggacatcaaggattctgcggaaaatcccttaacgggagatcgttggtggactactgctgataagccatggcaagcattggccacatgctttgaattgaatgaagttatgaaaatggataatccagaggagtttatctctcatcaaccggttcatcaagacggtacttgcaatggtttgcaacattatgctgccttgggtggtgacgttgaaggggctactcaagtgaatttggttccgagcgataaaccacaagatgtttatgctcatgttgcaaggttggtgcaaaaaagattagaaattgcagcagaaaaaggagacgaaaacgccaaaattttgaaggataagattactagaaaggttgtcaagcaaaccgtcatgacaaacgtttatggtgttacctacgtcggggctacttttcaaattgctaaacaattaagcccaatatttgatgatcgtaaagaaagcttagacttttctaaatacctaaccaaacatgtttttagtgctatccgcgagttatttcatagtgcgcatttaattcaggattggttaggtgaaagtgcgaaaagaatttccaaatctatcaggttggatgttgatgaaaaatcgttcaagaacggtaataaacccgacttcatgtcatccgtcatatggacgacaccactaggactaccaattgttcagccatatcgtgaagaaagcaaaaagcaagttgagaccaatttgcaaactgtctttattagcgatcctttcgctgtcaaccctgttaatgcaagaaggcaaaaggcaggtcttccaccgaacttcatccattcgctggatgcttcacatatgttgctaagtgcagcagaatgtggaaagcaaggattagattttgcatcagttcatgattcttactggacgcatgcatctgatatagacactatgaatgtggtgttaagggaacagtttatcaaactccatgaggtagatctggttttaagattgaaggaggagtttgaccaaaggtataagaattacgtcaagattggaaagttgaagagatctacggatttggctcaaaagattattagaatccgtaaagatttatccagaaaattaggaagaagtactacattagcagatgaaatttattttgagaaaaaaaggcaagaattattaaacagccctctaatagaagatagaaatgttggtgaaaagatggttacaactgtatcattatttgaagacatcactgacttggacgcacttgaactagaaaacggtggagatgaaaatagcggtatgagtgttcttttaccgttgagattacctgaaatcccacctaaaggtgattttgatgttacagtattgagaaacagtcaatattttttctcgtga

SEQ ID NO: 76437 - DNA, 1107 bp, Saccharomyces pastorianus
atgaaactggatagtatagacattacacactgtcagttggtcaaatctactagaactgctaggatttataggtcggatacatatgccattaaatgtctagcactagatttcgatatcccgccacataacgccaaattcgaagtatcgatattaaacaaactgggcaacaaatgtaagcacatcttacctcttctagagtctaaggctaccgataataatgacctattgttgctgtttccctttgaagagatgaacctttatgagttcatgcaaatgcactataaaagagatagaagaaaaaaaaatccctattacgatttgctaaatcccagtatcccaattgttgcggaccccccagttcagaaatatactaatcaattggacgtcaatcggtattctttgtcctttttctggcaaatggttgaagggattgcattcttacatgagaacaagatcattcaccgcgacatcaaaccgcaaaatatcatgctaacaaacaataccagcaccgtatccccaaagttgtacataattgattttggcatctcttatgacatggcaaataactcacaaacaagtgcggaacccatggacagcaaggtgacggatataagcacaggaatttacaaggccccagaagtgctttttggagtaaaatgctatgatggtggcgtggacgtgtggtcgttgttgataattatttctcagtggttccagagagaaacaagccgtatggggcacgttccggccatgattgatgacggcagcgacgacatgaactcagatggaagcgatttcagactgatttgctcaatattcgaaaagttgggcataccgtccattcagaaatgggaagaggttgcgcaacacggctcggttgatgcatttgttggtatgtttggtgcagatggcgatggcaagtatgtactggaccaggagaaagatgtacagattagcatcgttgagaggaatatgcctcgactggacgagattgcggatgtcaaagtcaagcagaagttcattaattgtatcctggggatggtctcattttcaccaaacgaaagatggagctgtcaacgaatcttgcaagaactagaaaagccataa

SEQ ID NO: 76438 - DNA, 870 bp, Saccharomyces pastorianus
atggtttcccaatttgctattgaggtgcgtaacctaacgtacaaattcaaagaaagttccgatccgtcagttgttgatatcaatcttcaaatcccatggaatacaagatctttagttgtgggtgccaatggtgctggtaaatccacccttttgaaattactaagtggtaagcatctttgccttgatggaaaaatcctggtcaatggtcttgatccattcagtccattatctatgaatcaagtggacgatgatgaaagtgttgaagattcgacgaactaccaaacgaccacttatctaggtacggaatggtgccatatgagtatcattaatagggatatcggcgtcttggaactattaaaaagtattggattcgatcattttagggaaagaggtgaaagattggtcagaatcctggacatcgatgtacgttggagaatgcacaggttaagtgatgggcagaagagaagagttcagttagccatggggctcttgaaaccttggagagttttactacttgatgaggtcactgtggatctcgatgttattgccagagcaagacttctggagtttttaaagtgggagaccgaaaccagaagatgctcagtggtctacgctacacatatttttgacggcttggccaaatggcctaaccaagtataccatatgaaatcaggtaagattgtggataatttagattatcagaaagacgtagagttctctgaagtagtcaatgctaaagttaatggacaagtggcctttgaaaatgacaacaataaggttgttattagtaaagtgaatagtttgcatccattagcactagaatggttgaaacgtgataatcaaattcctgacaaagagattggtatataa

SEQ ID NO: 76439 - DNA, 1494 bp, Saccharomyces pastorianus
atgccattaaggtcattatttcatactaatcacagtagccacgacaaagacgcgttgacaagaggaggttataacgcatatctggaatcactttctcgttgtgacagtggaaaggcagaagaacaaaaaggaaaagttatatcaaagttattagagaaaaaagatgtccgagctttgaggtacataggtttagggcctctggggtttgtaaacaactcattaagaaaagattgttggtatgaattattggcgtcccagttgcttattgatgatgcaacagagtacattacaccagtggaaaaacataaagatgaaggtcaggtgatattggatgcagaaaggtcttttggtggaattgtcgacaaaaacttgaaactgcaattgagaaaactactggtggagttaattactcgggtattgagaaagtacccaacgttgaactattaccaaggttatcatgatattgtgtctgttttcatcatgtgttttagttggaatgtcacaaaagagaacggactggaactagaaaatctctcattgcaagaagaaattgatatggaaaggctgttttattgcatcgaagcatttaccctattatatctgagggatttcatgatgaactcactagatttttcatttgagcaattgagagtaatctcttcattgataaaggaatcaaacatgaaattctataatctattcaaatttgacgaaaatgagccccttttcgctattgggtcaatattgacaatctttgcacataatttgaaacctatagatagcggtgacaacaatcttcataaaattcttttccagatatttgacatgacaatatcgatgcaatctatgcgtttacctttgatcatatacaagaacctgctattgcaaaatgcgtctgaaatttcgaagcaaatagaagctaattctgatttcttcgagaacgattttgacctgcgccatggtgctatacaaacagttttacagaaaaaactgtatgatgaggcgctttgggaagaagtcttgcaaataactagaaaagatgcgactactgccagcaagaaggctttgaaacgggtgagtcttaataaatatagtgcattactcaatacagcatgtggaaagccaggatgcttcgatatgagcaccattatcttctatttgagcgaacaaacaaagatgaacgagcattacaaggaagaaaagtatcatggtgtcgccgccagatccaagacaagggcgttggtccaaagacttggccattttttaccctccaaatataacaggtggagcaaaatttctttacttatcgggattgtagctatcctgtaccaattacggactacaaggtcgttgagtttagtactcaatctacgttacatgatctccacaaagttgaaagacttatcacatataaatataaatttgcaccacgttagtcacatctgggtggatccgattagggacattttgaaactggggcatccaactagatag

SEQ ID NO: 76440 - DNA, 1296 bp, Saccharomyces pastorianus
atgtctgatgcggctccttcattgagcaatctattttatgatccaacgtataatcctggtcaaagcaccattaactacacttccatatatgggaatggatctaccatcactttcgatgagttgcaaggtttagttaacagtactgttactcaggccattatgtttggtgtcagatgtggtgcagctgctttgactttgattgtcatgtggatgacatcgagaagcagaaaaacgccgattttcattatcaaccaagtttcattgtttttaatcattttgcattctgcactctattttaagtatttactgtctaattactcttcagtgacttacgctctcaccggatttcctcagttcatcagtagaggtgacgttcatgtttatggtgctacaaatataattcaagtccttcttgtggcttctattgagacttcactggtgtttcagatgaaagttattttcacaggcgacaacttcaaaaggataggtttgatgctgacgtcgatatctttcactttagggattgctacagttaccatgtattttgtaagcgctgttaaaggtatgattgtgacttataatgatgttagtgccacccaagataaatacttcaatgcatccacaattttacttgcatcctcaataaactttatgtcatttgtcctggtagttaaattgattttagctattagatcaagaagattccttggtctcaagcagttcgatagtttccatattttactcataatgtcatgtcaatctttgttggttccatcgataatattcatcctcgcatacagtttgaaaccaaaccagggaacggatgtcttgactactgttgcaacattacttgctgtattgtctttaccattatcatcaatgtgggccacggctgctaataatgcatccaaaacaaacacaattacttcagactttacaacatccacagataggttttatccaggcacgctgtctagctttcaaactgatagtatcaacaacgatgctaaaagcagtctcagaagtagattatatgacctatatcctagaaggaaggaaacaacatcggataaacattcggaaagaacttttgtttctgagactgcagatgatatagagaaaaatcagttttatcagttgcccacacctacgagttcaaaaaatactaggataggaccgtttgctgatgcaagttacaaagagggagaagttgaacccgtcgacatgtacactcccgatacggcagctgatgaggaagccagaaagttctggactgaagataataataatttatga

SEQ ID NO: 76441 - DNA, 3090 bp, Saccharomyces pastorianus
atgggtatcaggagattagttagtgttataacgcggcccataattaataaagttaactcatctggtcaatactcgagagtactcgctacgcgtgaagaccaggataaagcttcccccaaatatatgaacaatgataagatagcaaaaaaaccttacacatatcgccttttctctattcttggcattttaagcatttgctcgcttttattgatatcgctactgaaaccttttaatggtgcagatgctcctcagtgtgaatctatctatatgtttccatcttacgcaaggatcgatggatttgacgagaggtatacaccactggcacacaagtatcatctttacttgtatcgagaacaaagcgtagaccgagaacctttaaatggtgatgagttacaacttgatggtatccctgtactttttatacccggaaatgcaggttcttttaggcaatgcagatcgattgcttccgcttgctccaatatatattttgattccaataccagggcgactctgcgtaacgaaaatgtgcgaaatttggacttctttacggcagatttcaatgaagatttcactgcgtttcatggtgaaacaatgcttgatcaagctgaatacctaaatgatgccattaagtacatcttgtctctttacgaaaggacccctgattacccacatccaaaaccgcagtcagttattatcgtgggacattccatgggcggtattgtatccagggtcatgctaactttgaagaaccacgtaccgggaagtataagcaccatattgaccttatcatcacctcatgctgcttcaccagtaacctttgatggtgacattttaaagctttacaaaaatacaaacgaatattggagaaagcagttatcccaaaacgattcttttttctctaagaacatttcattggtttccattacaggcggtatattggatactactttacctgcagattatgcatctgtagaagatttggttagcttagaaaatgggttcaccagcttcacaactactattccagatgtttggactccaattgatcatttagccattgtttggtgcaagcaattaagagaggtactagcgcgccttttattggaaagtatagatgcctccaaacctgaaaaagttaagccattgaatcagagattgcaaatcgctagaaaactattgctttcagggtttgaagactactcatggatgaatagtaagttaaattatcctcaagaaaacttacaagaatttagtgacaacttcttttctgattacgctactttggaaatgaacgatgtcctagattttgaaatgtttaacctggaaaagtggcacaacaattatacaaaaataaatattccgagtaacatctcctccactgaacacctgcatttcacattattaactagtctcgatatgcctatgatctatttctgtacagagtccagggtgaatctaagctgtataacagctgttgatagtattctaacagtgcccaggtcttcaaaagatactcagttcgcagctgattcttcttttggagaaggaaaaaatccgtttaaagccgttagtgttggcaagaatatactacagaagtacgactacttgatgataagcaaacccacttacggtgaattttcagaacaagaaggcatggaggacaatcaggggtttcttttggcattactgcgcaacgtctccaatgtacaaatagtcaatactacaccttctcaaatattgctctttggagaacaactacacttggatggcaaagacatcgagcaggttataagtttcagtaatttgtgggattctttattatcgtacaaattagaaaccaagattgaggcaagcaacgaaggtattgcttccgaagagacattgtttcagcctttcataaggcaatgggtttacgaacctttcgagtctaaatggcatctaaatattataaacaaaagtctcgatataaatatgcataatgtagcaccgtttatcccattaaatgaaagcgaaccgagatcgctacaattaagtttttttattccacccggaatgtccttagaagctaaaatgactattaattggtctttaactttgaaaatgctgtttatcaggtacagattagcactagcatcttttccagtcgcgtttatagcactcgtactgtcataccagttctactggtacaacaagacatctgagtttccttcctttgatagcactttgggatatattttaagaaagcacggaatattaatgttttttacgctgttcttagcttcgcctgtggttaataataagttggtacaacgaatactttatttattggatcctgtcggtttaaattatccatttctgctatccgagagaaacatgcatgcaaatttttattatttggggatcagagattggtttatgtcaactattggaattctctttggggttatgacagttggattactagcactagtttctaagatttttggatccttggaaattttagtaatattccttcaacggaagttatcaaagaaaaacactgaagataaagaggcttttgatactattgaacataaagcgtatggtaagggaagattaatggcatctgtgcttttattactgttggtattttttcacataccataccagatggcgtttgttatctcattagtaatccaaattgctacctgcattagagtagcgctgttgaaactatcaaacaacgagcagaaattgaacttactaaattataatatgacgttgcttctgcttttattatttgttagtgccattaacatccctatcattattgttttcctgcataatgttgccatcaaatgggaaacttcatttagatcccatcacaatatactagcagtggcaccaattatttttttggttggaaataattctattttcaaaatgccaaacagcgtacctttagacacgtgggatggtaaagttaccatcattttatttgtgtacttaaccgttttcagtttcatttatggaataagaaatctgtactggatacaccacttggtgaacataatatgtgcctggttgctatttttcgaaacaatacattag

SEQ ID NO: 76442 - DNA, 1512 bp, Saccharomyces pastorianus
atgtctgacttccaattagaaattctaaaaaaactagatgaattggatgagatcaagtccacactggcaactttccctcagcacggctctcaagatgttctttccgctttgaactctttgaaagcccacaacaagttagagttttccaaggtcgacacggttacatatgacttgaccaaagaaggtgctcaaattttgaatgaaggttcgtacgaaattaaactagtcaagctcatccaagagttgggtcaacttcaaatcaaagatgtgatgtccaaactaggccctcaagttggtaaggtcggtcaggctagagctttcaagaacggctggatcgccaaaaacgcctcaaacgagcttgaactctccgcaaaattgcaaaataccgatttaaatgagcttactgatgaaacgcaatctattctagcgcaaatcaagaacaactcgcatctggatagcattgacgccaagattttgaacgacttgaagaaaagaaagttaattgctcaaggtaaaatcacagatttcaacgttaccaaagggccagagttctcgaccgacctcaccaaattggaaaccgatcttacctccgacatggtctccaccaatgcatacaaggacttgaagttcaagccttacaatttcaattctcaaggtgtgcaaatatcttcaggtgctcttcaccccttaaacaaagtcagagaggaatttagacaaattttcttttccatgggattcacagagatgccctcgaaccaatacgtcgagacaggtttctggaacttcgatgccctttacgtcccacaacagcatcctgctcgtgacctgcaagacactttctacatcaaggacccactaaccgctgacttgcccgatgacaagacatacatggacaatatcaaagccgttcacgaacaggggagattcgggtccatcggttatcgttacaactggaagccagaagaatgtcaaaaattggtcttgagaactcactccacagccatctctgccagaatgctgcacgatttggccaaagatccaaagcccaccagattgttttctatcgaccgtgttttccgtaacgaagcagttgacgccacccatttggccgaattccaccaggtggaaggtgttcttgccgactacaacattactctgggtgacctgatcaagttcatggaagagtttttcgaaagaatgggtgtcaccggtttgagattcaagcctacctacaatccttacaccgagccatcaatggaaatcttttcttggcacgaaggtttgcaaaaatgggtcgaaatcggtaactctggtatgttcagaccagaaatgctcgagtccatgggtctaccaaaggatctaagagtccttggttgggggttatccttggaaagacctaccatgatcaaatataaggttcaaaacatcagagaactgttaggtcataaagtctctttggactttatcgaaaccaatcctgctgctagattggacgaagacttgtacgaataa

SEQ ID NO: 76443 - DNA, 1500 bp, Saccharomyces pastorianus
atgttaagaatcagatcactcctaaataataagcgtgccttttcgtccacagtcaggacattgaccattaacaagtcacatgatgtagtcatcatcggtggtggccctgctggttacgtggctgccatcaaagctgctcaattgggatttaacactgcatgtgtagagaaaagaggcaaattaggcggtacctgtcttaacgttggatgtatcccctccaaagcacttttaaataattctcacttataccaccaaatgcatacggaagcgcaaaagagaggtattgacgtcaacggtgatatcaaaattaatgtagcaaacttccaaaaggctaaggatgacgctgttaagcaattaactggaggtattgagcttctgttcaaaaaaaataaggtcacctattataaaggtaatggttcattcgaagacgaaacgaagatcagagtaactcccgttgatgggttggaaggcactgtcaaggaagaccacatattagatgttaaaaacatcatagtcgctacgggctctgaagttacacccttccccggtattgaaatagatgaggaaaaaattgtctcttcaacaggtgctctttcgttgaaggaaattcccaaaagattaaccatcattggtggaggcatcatcggattggaaatgggttcagtttactctagattaggctccaaggttactgtagtagaatttcaacctcaaattggtgcatctatggacggcgaggttgccaaagccacccaaaagttcttgaaaaagcaaggtttggatttcaaattaagcaccaaagttatttctgcaaagagaaacgacgacaagaacgtcgtcgaaattgttgtagaagatactaaaacgaataagcaagaaaatttggaagctgaagttttgctggttgctgttggtagaagaccttacattgctggcttaggggctgaaaagattggactagaagtagacaaaaggggacgcctagtcattgatgaccaatttaattccaagttcccacacattaaagtggtaggagatgttacatttggtccaatgttggctcacaaagccgaagaggaaggtattgcagctgtcgaaatgttgaaaactggtcacggtcatgtcaactataacaacattccttcggtcatgtattctcacccagaagtagcatgggttggtaaaaccgaagagcaattgaaagaagccggcatcgactataaaattggtaagttcccctttgcggccaattcaagagccaagaccaatcaagacactgaaggtttcgtgaagattttgattgattccaagaccgagcgtattttgggggctcacattatcggtccaaatgccggtgaaatgattgctgaagctggcttagccttagaatatggcgcttccgcagaagatgttgctagggtctgccatgctcatcctactttgtccgaagcatttaaggaagctaacatggctgcctatgataaagctattcattgttga

SEQ ID NO: 76444 - DNA, 480 bp, Saccharomyces pastorianus
atgagcttacccgatggattttatataaggcgaatggaagagggggatttggaacaggtcactgagacgctaaaggttttgaccaccgtgggcactattacccccgaatccttcagcaaactcataaaatactggaatgaagccacagtatggaatgataacgaagataaaaaaataatgcaatataaccccatggtgattgtggacaagcgcaccgagacgattgccgctacggggaatatcatcatcgaaagaaagatcattcatgaactggggctatgtggccacatcgaggacattgcagtaaactccaagtatcagggccaaggtttgggcaagctcttgattgaccaattggtaactatcggctttgactacggttgttataagattattttagattgcgatgagaaaaatgtcaaattctatgaaaaatgtgggtttagcaacgcaggcgtggaaatgcaaattagaaaatag

SEQ ID NO: 76445 - DNA, 1536 bp, Saccharomyces pastorianus
atggctttccaacaaggtgtattgtcaaggtgttccggtgtccttagacaccatgtgggacattctcgccatatcaataatattctttatagacatgccatcgcgtttgcatccatcgctccacgaataccaaaatctagtttccatacttctgcaatcagaaacaacgaagcattcaaggacccgtacgatactttaggcttgaagaaatctgctacaggtgcggaaatcaaaaaagcatactacaaactggcaaagaagtaccacccggatatcaacaaggaaccggatgctgagaaaaaatttcacgatttacagaacgcttatgaaattctgtcagacgaaacgaagaggcagcagtacgatcaatttgggcccgctgccttcggcggcggcggtgccgctggaggtgccagtggtggtagtggctctccctttggttcccaatttcatgatttctcaggattcaccagtgcaggcggctcgccatttggcggtatcaattttgaagacctgtttggtgctgcatttggtggtggtggccgcggtagcggtggcgcaagcaggtcgtcatctatgttcagacaatataggggcgacccaatcgagattgtccataaagtgtctttcaaggacgcagtgtttgggtccaagaacgttcagttaagattctctgcgctggacccttgtagtacctgttcagggacgggaatgaaaccaaacacgcataaggtcagttgtagcacttgtcacggaacaggaaccactgttcacattaggggcggatttcagatgatgtcgacttgtcccacttgcaacggtgaaggtaccatgaaacggcctcaggacaattgtaccaagtgccacggtgagggtgttcaggtcaacagggcaaagacaattacggtggacttgccacatggattacaggacggcgacgtggtcaggatccctggccaaggctcataccctgacatcgctgtagaggcggacttgaaagattcagtcaagttatcaagaggtgatattttggtgagaattcgtgtcgacaaggatcccaacttttcgataaagaacaagtacgatatttggtacgacaaggagattcctataaccacagctgcacttggtggtactgtcactatccctactgtggagggacaaaagatcaggataaaggtcgctccagggactcaatacaatcaagtgatatccattcctaacatgggtgttcctaaaacatcaaccattcgcggtgatatgaaagtccagtacaagatcgttgttaagaaaccgcagtcgctggcagaaaaatgcttgtgggaggcactggcagatgtcaccaacgatgatatggccaagaaaaccatgcaaccgggcacagccgcgggtacagccattaatgaagagatactgaagaaacaaaaacaagaagaggaaaaacacgcaaaaaaggatgacgacaacactttgaagagactagaaaatttcattaccaacacattcaggaagatcaaaggtgacaaaaaaaattaa

SEQ ID NO: 76446 - DNA, 2079 bp, Saccharomyces pastorianus
atggggaagagagtatacgatccaattcatgatactttccaactacgagaagacaattctgacgaaacaaaagcagattctccaatgcaatctgtaaaatcgggatcacaagaagaagcatccccaagctccattcaatcagagaccgagactgtgactacaaaaagcattccagttatacacgagattgaaatcgacgataaaaatgatgatgactccacgcaaagtgaagaagaaaataccaacatcttgctcaacttcgaaccttctacagtgcctgaagcaacaggagcaagtacggcaacggggccagtgacaactaacactgttagaaggaaacccaaagaaagcaatgccagtaaatacaatcgtcatttgaagaaacctgacggcgagccattcaatagaaaggacattcagttcagtttcatgcaagaactgttgatggacaagaggcaaatcttcactaatgttctaaaacccctatacaagaactctattgtacccattaatatcgatggcgataaattatcaatcaacgtgaccgacaaagagtacgatgcaaggacatttgtatttaacgataaattgacgttcgcacaattgtatgtgttgacaatagccacttctatcaaatgttccaaaattctcagagataaactattattagaccaacaagtagcattttctacttgtgttttagcgttattggtcaacattggtaggttgaacaccactataaatttttatttagaaatgacatcgcaattgagaacttttcactccgtgccagttttacaattacatgccaatgatccgaaacttttgcaggatacacctagactgaaatctattctgaaaaatctgccgtggggcaatgagcaactctcattgatggagacttacaaaaaggtcgaccaaaatgatggtgaagtggacaccgttaacaaatttaacattattaatatgttgtttagcatatgtgataattccggcctaattgacaagaggtttctttccaagtatgtggaagtcgaatcgaaagctcaggagcaagatatggtagatgaacagaatgaagtaaaagaaacggaaggggaaaatgaaaaacaagaatcaaaagcagcttatgcaacaacattatttgatatactggactattcgaaatacgagccaaaggatagatcaaacatattgatttggctgctatatattcatttagagacaaacttaagccaggaggaggtcgaagaatcagtaagattcttcaatggattggaagatggtgcacctgctggaaagttcattttaagatgtacggaacgcagttacgacacggatcctgaagatgaattagagttcggagccaaccaacgcatcaagagaagagaattcatgagtaagatggaggaaggtaggaagcgcgagcgtaccaatgttacagaggtgaaaaagcccagtatcggtggtgacaagagtgaagaggacggtgaaggggaagatgacaagagcgaagagactgtagaggagactagatcacttttgacgcctacgcccatactggaatcttcttcacccatgacattgaacaggaaaaaagtcacaccacaactgcccaaagtaacgccagcagcaccaacagaaacagaagaagaaatcacctccgctgctatcattgacaaaaacgatttaaatctaacaccattgaaaaaatacaatagttcagctacggtaaacaaggtcgacaagctaatatcgctagatctgaacaagcatgtgtcagaaaatggtaagacacaagaggagtttctcgccgatttgaaaaaatcccaggtgccaaacaggttgaaaagacgcgatattgggttaatcaagatattcaatgaatttgaagacatccccgtagcgtcagtgcttgggattcgcggtaaaaagagaaagaaattcaaagataatttgcttggatttgagacggatttcatgaaaaatctcggcgcttcaaagaaagtacttttaaataaaatcgaacgcgcggaaattgatgacgaagaagcaaccgccatgtttaagctggagtga

SEQ ID NO: 76447 - DNA, 375 bp, Saccharomyces pastorianus
atgcttcttcttgtgatcccgattttacagattgcattggagaatctgcttttgtttcgtcagaattgtcttctcgtagttggaaagtatcatgaattggatcgtatactctcttccccatctttaattagagtgtcgcctttatttagctttcgattttacttagttaatcatgaactgtttccaataccatatcagcattcattgggcgttctttacttacttgtaccgttaccgcattcgagggtaacctgtttttcgttgtacacgatatgctacagaattgtcttaatatgggctaagaaaaaaaaaagtctgattatttctgatactgcaaaatatatactggcttggttaagaaaagtgttgctttag

SEQ ID NO: 76448 - DNA, 447 bp, Saccharomyces pastorianus
atgcccaaatcccgaccaaaaaggaccattgcgtcttcctcgtcagttttttatggaagttcacctttccaaaatgatggctacatcaaagtaatggaactcgtatcacacattgtcattgaaataaatcattcacctaccgcaacaacggatgaaacgagaaagcagaataatccggagctgaaagtgaaagaaccagtttgtaacctcaagaagtgggaaaataacactaactttatattggaagatcatacgaagaataaaacaaaactttctagcacagataggatacgtaagtggtttagaagacatatattaaaggaagagatcgaaatcctttcccatggaaaacaattgagtagtattgatgaggattattgcccttcaaatgttcttgtaggatgttcaagagatctaaataaactcagatcatttcaaaatttttag

SEQ ID NO: 76449 - DNA, 1641 bp, Saccharomyces pastorianus
atggttagttcaagtgtttccattttggggactagcgccaaggcatccacttctctaagtagaaaggatgaaattaaactaacccctgaaacaagggaagctagcttggacattccatacaaacccattattgcatactggacggtgatgggtctctgtctgatgattgcctttggtggattcatttttggttgggatacaggaaccatttcagggtttattaaccaaacagatttcaagagaaggtttggtgagttacaaagggacggcagttttcaactatcagatgtcaggacagggctaattgtcggtatcttcaacataggttgtgctttaggtggcctaacgctgggacgcctgggcgatatttatgggcgtaaaatcggcttaatgtgtgttatactggtgtatgttgttggtatcgtgatccagattgcttcctctgacaaatggtaccaatattttattggtagaattgtttctggaatgggtgttggaggtgttgctgtgctgtcgccaactttgatctcagaaatttccccaaagcacctaagaggcacttgtgtctctttttaccagctaatgattacccttggaattttcttgggctactgtaccaattatggtacaaagaaatattcaaattcaatacagtggcgggttcccttgggtttgtgttttgcgtgggcaatctttatggtgattggaatggttatggttccggaatcgcccagatatttagtagaaaaaggtaagtatgaagaagctagaaggtctttggccaaatcaaacaaggtcacagttactgatccaggcgttgtttttgagtttgatactatagttgcaaatatggaattagaaagggctgttggaaatgccagttggcacgaactcttctcaaacaaaggagcaattctaccaagggtaataatgggaatcgttatccagtcactgcaacagcttactggctgtaattattttttctactacggcacgaccattttcaatgctgttggaatgcaagactctttcgagacttccattgtccttggggctgttaattttgcttctacatttgttgcactatacattgtggataaatttgggcgtcgaaaatgtttattgtgggggtctgcctcgatggcaatttgtttcgtcatattcgccaccgttggcgtcactagattatggccacaagggaaagaccaaccttcttcgcaaagtgctggtaatgttatgatcgtttttacttgtttcttcattttctcttttgccattacttgggctcctatcgcctatgtcattgtggcagaaacttatccattaagagttaaaaatcgtgccatggccattgcggttggtgcgaactggatgtggggtttcttgattggatttttcacaccctttatcactagatccataggattttcttatggctatgttttcatgggttgcttaatcttttcgtacttctacgttttcttctttgtttgcgaaacaaagggattaactctgaaggaagttaatgaaatgtacgaagaaagaataaagccatggaagtccggaggttggattcccagttctagaagaacaccacaaccaacaagcagtacaccattagttattgttgatagtaaataa

SEQ ID NO: 76450 - DNA, 648 bp, Saccharomyces pastorianus
atgtcaggcttgagaactgtttctgcttcatccggtaatggaaagagctatgactctattatgaaaattttattgattggtgattctggtgttgggaaatcatgtttattggttcgttttgttgaagacaaatttaacccgtcatttatcaccaccattggtattgatttcaaaataaagactgtcgatatcaacggtaagaaggtaaagctgcaactttgggataccgctggtcaagaacgtttccggacaatcaccacagcgtattatcgtggtgctatgggtatcattcttgtatatgatgtgacagacgagagaacatttactaatatcaagcaatggtttaaaaccgttaatgagcatgcgaacgatgaagcacagctactgttggttggtaacaagagcgatatggagacgagagtggtaacagctgatcaaggtgaagccttggctaaggagctgggtataccattcatcgagtccagtgctaagaacgatgacaatgtcaacgagatttttttcaccttggcgaagttaatccaagaaaaaatcgacagtaacaagcttgttggcgtcggtaacggtaaagagggcaatattagcatcaatagtgggagcggaaacagttctaaatcaaattgctgttga

SEQ ID NO: 76451 - DNA, 1329 bp, Saccharomyces pastorianus
atgagtaatttcattagaaggctagttgggaaaatgaaagcgatttcaacaggtaccaatgctattgttagtaagaaggactccatttacgcaaactggtccaaagagcagctaatacgaaggatcactgaactagaaaacgcaaataagccacattctgaaaaattccagcacatcgaggataacaaaaagcgcaaaatttcgcaagaagaggttacgagaagcaaggctaaaaaggctccgaaaaagtttgacttttctaaacataataccaggttcatcgccttgagatttgcctatttgggatggaattacaatggcttagctgttcagaaagaattcacaccgttacctacagtagagggtaccattttggaggccatgaataagtgtaaacttgttccctcgatggttttacaagactataaatttagcagatgtggcagaacagacaagggagttagcgccatgaaccaagttatatcgttaaaagtccgttccaatttaacaaatgaggaacagcgggatccgaccaacgacagcagggaaataccctatgttcacgttttaaatcaattactacccgacgatattcgtatatcagctgtctgcctcagaccgccacctaactttgacgcaagattcagctgtgttcaccggcactataagtacatctttaatggaaaaaaccttaatattgaaaaaatgtctaaagccgcatcatattttgttggagagagagacttcaggaatttttgtaagcttgatggctcaaaacaaattaccaattttaaacgaacaataataagctcaaaaattcttcccctttctgaaactttctattgttttgatctcattggttcagcattcctatggcaccaagttcgttgcatgatggccattcttttcttagttggtcaatcacttgaagtgccggaaattgtcttgcgtctgactgatattgagaaaacccctcaaaggcctgtttacgaaatggcaaatgatataccattattgttatatgattgtaaatttcctgaaatggattggcaagaacctactgtagatgactataaggcaataaaattcacgacagctactgaagcattgacgttacactacgaacttaaggccgcagtatgcaatatttttaaagatgttttgcccacagcaaatacaaacaacttctcaaagacaattattaatttgggcgatggaagaggtaaagtagtcggtagctatgtgaaactagaggatagaagcgttatggaacctgtcgaagttgttaatgctaaatactccaagaaaaagaacaacaaaaataagtaa

SEQ ID NO: 76452 - DNA, 615 bp, Saccharomyces pastorianus
atggcaccaaagaaaccttctaagagacaaaatctgagaagagaagtcgcaccagaggtgtttcaagattcacaagctaggaatcaactagcgaatgttcctcatcttaccgaaaaatctgcccagcgtaagccttctaaaaccaaggttaaaaaagaacagtctttggctagactttatggtgcgaagaaggacaagaaggggaaatattctgagaaagacttgaatattccaacactcaatagagctatcgttccgggtgttaaaataaggaggggaaagaaaggtaagaaattcattgctgataacgacactctgactttaaaccgtttaataacaactattggtgacaagtacgacgatatagctgagagtaagcttgaaaaggctagaagattagaagagatacgagaattgaaaagaaaggaaattgaaagaaaggaagcgcttaaacaagataaactagaagaaaaaaaagacgagattaaaaagaagtcttctgtcgcaaggactatacgtagaaagaataaacgtgatatgttgaaaagtgaagcaaaagctagtgaaagtaaaactgaaggaaggaaggtaaaaaaagtctcatttgctcaatag

SEQ ID NO: 76453 - DNA, 1608 bp, Saccharomyces pastorianus
atgtgccttgaaccaatctctcttgttgttttcggatccctggtgtttttctttggcttggtgaagtatttcaaacgtggagaacggcaaagaacaagaggaattttacagccagagtacaaagataagtattattacagtaaagaaaaaggggaagaaatgggcgaggtagcaaacgtaaatgaaattccggtaaagataagaaatcagaagtatcctgcgaaagaacacaacttgagggttaaagatttgttgttaaatcgcaatccgaagctatcaaagatatccacagcattttttattgctggtgaagaattagagggaaacaagtattgtgacaccaacaaagattttagacagaatagatatttttatcatttgtcaggtgttgatatacctgcttcggcgatattgtttaactgtagcacagataagctgacattgtttttgccaaacatcgatgaagaagatgtcatatggagcggtatgcctttgagtttggatgaagcaatgagagtgtttgacattgatgaggccttgtacatatctgatctggggaaaaaatttaaagaattgcaagacttcgctatctttacaaccgatttggacaatgttcatgatgagagtattgcaagatcactgattccttcagaccctaacttcttttatgctatggatgaaactagagcaattaaggattggtatgaaattgaaagcatcagaaaagcttgtcagatttcagacaagagccatttggccgttatgtccgcgttgcccatcgaattgaacgagttacaaatacaagctgaatttgaataccatgcaacccgtcaaggtggtcgttctttgggctatgaccccatttgttgttctggaccggcatgtggcactttacattacgtcaagaattcagaagatatcaaaggtaaacattccatcttaattgatgcaggtgcagaatggagacaatatacaagtgatatcaccagatgtttcccaacttcaggcaaatttactgcggaacatcgtgaagtttacgaaaccgttcttgacatgcaaaaccaagcaatggaaaggattaaacctggtgctaaatgggacgatttacatgcactgacacacaaggtccttattaaacatttcttaagtatgggtattttcaagaaagagttttctgaggacgaaatctttaaaagaagagcttcttgcgctttttatccccatggactagggcatatgttggggcttgatgtacacgacgttggtggtaacccaaactatgacgacccagatccaatgtttagatatttaagaatccgccgtcctttgaaagaaaatatggttatcactaatgaaccaggttgctactttaatcaatttttgatcaaagaatttttggaaaagcaccccgaaagattggaagttgtcgatatgagcgtattgaaaagatacatgtatgtcggtggtgttagaattgaagatgatatccttgttaccaaagatggttacgagaacttaactggtattacttctgaccctgatgaaattgaaaaaatcgttcaaaaaggtttgaagaaaccccgttcaggtttccacgtaatcgtttag

SEQ ID NO: 76454 - DNA, 1062 bp, Saccharomyces pastorianus
atggtcgatacgcataaactagcagacgacgttcttcagctattggataaccgtatcgaagataattatagggtttgtgttatcctagtcggttctccaggctccggtaagtctactattgcggaagaactttgtcaaattataaatgaaaaatatcacacatttttgtcagagcatccaaatgttattgaggttaatgataggttgaaacctatggttaacctagtagactctttaaagacgctccagcccaatgaagtagctgaaatgattgaaaatcaggggctgtttaaagatcatgttgaggatgttaattttcaaccagtcaagtactcagcccttacatcaaataatgaagaatgtaccgcagtagttgccagaggtggtactgcgaatgccataagaatcgcaacagttgataatccagtcaatgttaacaagttggcccaggatagtatcaatatagcgcaaatagtcccaatggatggttttcacttatctcgcagatgtctagacctattcaaagacccacaaactgcccataaaagaagaggttcgccctcaacgtttgacagtaacaatttcttacaattgtgtaaaattctagccaagacgtccctatgtaaggtctcctcacatcataaattttactccacgtcaagcgtttttgagaagttatccaaaacttttagccaaacaattcctgatatctttgttccaggatttaaccatgcactaaaagacccaactccagatcagtactgtatttccaaatttacaaggatagttatacttgaagggttatacctactgtatgaccaagaaaactggaagaaaatatacaaaacattagctgatacgggagcacttcttgtttataagattgacatagactatgaggccaccgaagaaagggtggccaaaaggcatttgcaatcagggttagtcacgactattgcagaaggacgagagaagtttcgcagcaatgatttgttgaatagcagggatatagataatcatttaattaaggtagataatatcgtccatatccgcaacgactag

SEQ ID NO: 76455 - DNA, 666 bp, Saccharomyces pastorianus
atgagtgaccaaatcaacgttttgtcaatgcaacaacaacaacagcagcagcagcagcagcagcaagtctatatgtctcctcaagcagaaaacttgaatcatatgtacttgttagttaacaagctagtgaaacagttgagggaaaatcaagcagaaaaggcaaaaatactaaggaacatagacatattatccggaagcttaaacaagtatgagacatctgaagaacctcacgataccacggaaaatattgcattatttaatagatttctagaacaaagagggaaagctcctattactgagaaagagcaactaagcaacaatctggatgaaaatgcgaaagatgacgttatgctaggagtgttgaagcgccaaaattcaatgctccggaaaagtttacaggaatccaagcaggtaacccttgaatccatggatttattgtcttactccgaagactctttaaattacattgtcgcccaattaagaggaaacattctaatgcatcataaagacactatcaaattgattaggcagaaatttcagacggagacaattcccctcgaagatgaagagttcaaaatgtatttggaaaatgttaatggtctgcaaaaattgacagacatatctcacacttacagattactactgaggttacatgcacaagattga

SEQ ID NO: 76456 - DNA, 258 bp, Saccharomyces pastorianus
atgctcaacgtgagtatgataaccaaatggtttacagaaagcacttgcaagagtttattgacaaatacagatacaatgctgccaaatcacaggaagctcaatcaagaattaagaaattggaaaaattgcccgttttggagccacctgaacaagacaaaaccattgatttcaaattccctgaatgtgataaattgtctccaccaattatccaattgcaagacgtttcctttggttatgatgaaaacaacctattattga

SEQ ID NO: 76457 - DNA, 1500 bp, Saccharomyces pastorianus
atgagcggagaaacgtttgagttcaatattagacattctggtaaggtttacccaataacactttccactgatgctacttcagcagatttgaaaagcaaagcagaggaattgacccaagtcccaagtgcccgccaaaaatacatggttaaaggtggcttgtctggcgaagagtccattaaaatatatcccttaatcaagccaggatcgacagtaatgctattggggactccagatgctaacctgatttctaaaccagccaaaaagaataatttcattgaagaccttgcgcctgagcaacaagtccaacaatttgctcaattgcctgttggtttcaagaatatgggcaacacctgttatctgaatgctaccctacaggctttatacagagtgaacgatttaagggatatgattcttaattataacccttctcaaggtgtgtctaacagtggtgcacaagatgaagagattcacaaacaaatcgttattgaaatgaagcgttgttttgaaaatttacagaataaaagtttcaagagtgttttgccaattgtgttattaaacacgctaagaaagtgttatccacaatttgctgaacgtgattcacaaggtgggttctataaacagcaagacgctgaggagttgtttacacaactattccatagtatgagtagtgtttttggtgacaaattttccgaagatttcaggattcaatttaaaactaccatcaaagacacagctaatgataacgatattactgttaaagaaaatgaaagcgattctaaattacaatgtcatatttctggtactacaaatttcatgagaaatgggctcctggaaggtttgaatgagaaaattgaaaaaagatcagacttgactggcgccaattccatctatagcgtcgaaaagaaaatatcaagattaccaaagtttttaactgttcagtacgttagatttttctggaaaaggtcaaccaacaaaaaatctaaaatattgcgtaaggtcgttttcccatttcaattagatgttgcagacatgcttaccccagaatacgcagcagagaaggtaaaagttcgtgacgaactgagaaaagttgaaaaggagaaaaatgaaaaggaaagagagatcaaaaggcgtaaatttgacccatcatccagtgaaaatgtcatgacaccaagagaacaatatgagacacaagtggctcttaacgaaagtgaaaaagatcaatggctcgaagagtataagaaacattttcctccaaacttggaaaaaggtgaaaacccatcttgtgtttataacttgatcggtgtcattacacatcaaggtgccaattctgagtctggacactatcaagctttcataagggacgaactggacgaaaataaatggtacaaatttaatgatgataaagttagcgttgttgaaaaggaaaaaattgaatctttagccggtgggggcgaaagtgatagtgcactgatcttaatgtataaaggatttggtctgtaa

SEQ ID NO: 76458 - DNA, 189 bp, Saccharomyces pastorianus
atgtatactttttcttattcaacccataacgagcttcttgaattcttccatctcttcgtaacaattcaatggcttgcccttattggccaaaagacactcagtcaattttgcctttatagaaatgctgccgttgtcggtttttttatcagatttacctttggcacccccatatttctccaacttttgtaa

SEQ ID NO: 76459 - DNA, 513 bp, Saccharomyces pastorianus
atgggttcaaacacttccaaagtgggtgctggtgcagaaaaacaacaagtctatactccgctaacacagatcgatttttcacagtctttggtttctcaattggattcatcgaaggaatcagactatgtcaccaagcaaaatgcagaaaagttcattgagaagaaggtttcacaaaggctatctaacctagaagttgaaacgttaaagaagtttgaagatactttgaacaattcactattatcagacgacgacaaggatgccgttgatggaatatcatcaagttcattgaataatcaaatcgagtcgttgaacaagaaactaacattatttgatcaattagagttacaaaagttggagaaatatgggggtgccaaaggtaaatctgataaaaaaaccgacaacggcagcatttctataaaggcaaaattgactgagtgtcttttggccaataagggcaagccattgaattgttacgaagagatggaagaattcaagaagctcgttatgggttga

SEQ ID NO: 76460 - DNA, 2364 bp, Saccharomyces pastorianus
atggattctccatccaattctatccagaatttgcagcaagaagcccagggcagctcttccgcacagcttgctgaccatgatcatgatcgcgtatcaatggctatgcccttacaaaccgatcaaagtgttagtgtttcacaatcttctgataatttaaggagatcaagacgtgttcctaagccaagaacgagcatttatgatgaatacgaggaagagttaaaggaaagggcgaataaacccaagaggaagagacctgctcctcctaagaaaaaggcaccttccacacagaactctaaatcaaatgataaagtagagaaaaagaagactacctcaattgctaaggatggcaaacctacactgaagactaatgacaaaaaagtggcgccgaaacccaaaccagcccatgaacaagtagaacccgctttgatccctagcaattggacttctgtaatacccttgcttacttctgatttcaagaaccagtatagtgtcatctctaggttaaaaaatccgaacatgaagcctgtgccatatgctggagatatcattaagctgatggcgttcataaataagttcagttcttttttccattctgacctacaaaatttatcattccaagattttgaggtcggtttagatttgtatcccggcgatcctaatggaagcgcagctggtatagtgaagggtcctgaagacacctcattattgctatatcctgattttatggccatcaaggatatcgtctattgccaagacaaaatgaatttactgttcctatccttgttagatttaacatttactgaaaattttgatggtaaaagtgccaagaagaaaggtccattaacaacctgggagaatctaaaatcgtcctccaagaaagtattttccaatcctctttatcggttaagacttgtagctcgcgaatgggggtatccacgagaatggcgtcaacaactccccagtgaccaagatatctccaaacctaaaactgctctttttgaacaagatgaacaaacaccagtggtggatcccagtcatccagaaattttaacgccaaatatatatacctggaatgctaatgaaccactcccattggaatcagatcctttgtataatcgagaaatggacaagaatggaattttggcgctcaaaccaatggatcgcgttgttttattgagggcgttaactgactggtgcgcttcccattcatctgctattcatgacgagatatacaaattaactcatggtaaaaaagatcccgtttttggcatccaaacacaacaagtgcctaggtatacaattgaaggggtagataataccataaatcagtttaaaaaactctgctcactaattcaatcaagatatgaaatcagaagtaagaaaaaacattttgttaaacaactaaaagagggtaaaaaaccagatttatcaaggaagctagaaatactgaaggaaattaaagcggaattgaagaacgctgtaaaatccgaaaaggatgaacttttgttctcattgtacgacaagtgggtcccattgtttgaaggcgaattacctgatcaaccattagccaatcctttttcggaaagactttataaattgcgattacaagagttcttccttggtagagttccccatataggtgatttttatatgccaagattacacagttatggggactcactcgaaatgagcaccttcactgatttgagaaatctacaagcattgctatcgaaattcaaaaataatgaatacaacgcttttacactgtttgaaaatgatggacaatcgatgagtgcccaattcaaattgttttaccatgacacaccatcgttggcgcatgatgttgcacgaggcagaaatacatcggggaaggtttattggtatgaattatgccacgattcagcaacactgctggagttcttggagttcttggactataaaattgttaaacctcaagatgagaaaaaggagggaaatgaaaaagaaaaagaaggactgaataatgaagcgcgcatattggagcagaaatctaccactgataataatccctccataaatacaaacccgctaccaaaagacgcaaaatataacactgcgagaaagaagttacagatattaaaggaatttttatctgattactatttcattctttgtcagtttgaacaaatgaaagtgcaatttgcagacatgaagccaggcaagagacagttgagaaggatacagcgacagactgtaaactataatacggaatatgatagcgaggaatatgtcgatgatgaagaagacgacgaagctgatatttatgatgacaacgacaatgattcttcttttgatgatggtagagttaaaaggcagcgcacttag

SEQ ID NO: 76461 - DNA, 1341 bp, Saccharomyces pastorianus
atggacgacaaagtttcagaaaaggagagctccccaaaacaaacagaggaggattctgaaggtaaaatggcacatgtgcagcctgcttcgtacgtgaataaaaaaaaatatgcttttgggaagacattaggtgctggtacatttggtgtggtgagacaagccaaaaacactgaaacaggggaggacgtggccgttaaaatcctgatcaagaaagcactaaagggaaacaaggttcagctagaggctttatacgacgagttagacattttacaaagactacatcatccaaatatagtggcatttaaggattggtttgaatcaaaagacaagttctacattatcacgcaattagccaaagggggtgaattgttcgatagaattttgaagaagggtaagttcactgaggaagatgcagtgagaattttggttgaaatattgagcgcagtcaaatatatgcattctcagaatattgttcatagggacttgaaaccggaaaatttattgtatatagataaaagtgacgaatctccactgatagttgctgattttggtatcgcaaagagattgaaaagtgatgaggaactcctctataagccggcaggctcactgggttacgtggctccagaggtacttactcaggacggtcatggtaaaccttgcgacatttggtcgataggtgtcattacgtatactttgctttgcggttattcggcgtttagagccgaaagggttcaagatttccttgacgaatgcacaactggtgagtatccagtgaagtttcataggccttattgggattccgtttccaataaagcaaaacaattcatcttgaaggctcttaatttggatccttcaaagagaccgaccaccgcagaactcttggaagatccatggattatttgtaccgaattgaagacgcacaatttattgcctgggttaaaggaaggattggatgctcgtcaaaagttccgtaattctgttgagagagtcaggttaaacatgaagatccagaaattaagagatctgtatcttgaacagacagagagtgattcagattttgacgaaggaagtcaagcaaacggttcagttcctccattgaaagcaacggataccagtcaactatccaagaagctatcagaagaagaacagtctaagttgaagtccgagttaaccagcgaagcttttgcacaattagttaacacagtgcttgccgaaaaggaaaaatttttaaatattaacagagtctgtagttctgatagcgatctccctgggagtgataaaaagtctttggatgagacgaaggagaaaccagaggggaaggataccaaaacagaagaatga

SEQ ID NO: 76462 - DNA, 588 bp, Saccharomyces pastorianus
  modified_base (575)..(575): a, c, g, t, unknown, or other
atgacagatccccacttgaacacgccccaagtgagcacgtcacccacatttgaaagatcacaggacttcctcaacatcgacgaaccgccctgtgcacaggaaacacctagtgtttctacattcaacctcccgggtccaagcgctcccgctcaaagtgtagacaagccagtccccatgattagacggcggtctaccaattatatggacgcactaaattccagggaacaagcccgggaacgcgaaagcagtatcggggagcacgccccgggagccgaacgtaggagtagcggacccatggatttccagaatactatccacaatatgcaatacaggaccactaacgactctgacctgagccacgctggcgtggatatgggtgactccatctcccatacaccgatctgttctcgtgctggcaacagacccattttcaaaaactcgtaccttgacaacaacagcaatggtaacagcccaagagtcccacacggctctcgtccacagttgggcacgcgtagaaagtcgtcttttaagtacgaggactttaacaaggacatctataaccagcttcacatgtntggagagaagtaa

SEQ ID NO: 76463 - DNA, 699 bp, Saccharomyces pastorianus
atgtggtgctattctcactttttattaatttttgtttccttcgtgacttcttttgcacataagctcccagctaataactcaacgactaatggaggtaccgacggaatagctgtcccagttatagaaactactattgattcagggatgtattctgagaacggtactgatttgatgacacccgaagatcttcctgatttgctgtcagatggtatagtattatcttttgctaatactacagaaacgggctcggattcggactccacgttaattgacagtgaagatcttcagagatgtatagatataccggaccgctcatgctctgctcaacgaggcaatttgtgttcatacagtttttgggatattcctttcagtttcttgaatacagtccatgatatattcggcatgactaatatgggtaattgcgcagttatggctggtaataagggtgctttttattataaatactatcctgttgaacctaactgcaattcaactatacaccaaaagacgattgacgatgctttacaacaagcaactgaacaactgaatggtgactttaacaacatatattttttccatgtcgaccgtggtggattgtggcagggtggtctgatggttggaactcgcgtctttacctggtttgctggcgccaagtgggctgaacataaaggtttcatagaggcaggtttcacctcgtag

SEQ ID NO: 76464 - DNA, 2202 bp, Saccharomyces pastorianus
atgggcttcagtagcggtaaatcaactaagaaaaagcctctgcttttcgatatcagacttaaaaatgttgacaacgatgtaatactcctcaaaggtcctccaaacgaggccccctcggtgcttttatctggttgcatcgttttatcgattaacgaacccatgcagatcaaaagcatatcattgagactttatgggaagatacaaatagacgtaccattagagaggccccaggacgctagttcttcgtcgttgtcttcatcgccgccaaagatcagaaagtacaacaaagttttttataattacgcatgggataatgttaacctcaaggagtatctgagtggtttaagagggcaatctggccttgcgggcagtagctcatcaagtaatatcttgggcactcgccaaagagctcagtccacaagttccttgaagtctttaaaggggtcctcctcaccctcttcatgtactttagataagggcaactacgattttccctttagtgctattttgcctggttcgttaccagagagcgtagaatctttgccaaattgcttcgtgacatatagcatagaatccgttattgaacgcagcaaaaattatagtgatttgatctgtaggaaaaatattagagttctgagaaccatttcacccgctgcagtggagttatcagaaactgtttgtgtagataactcatggcccgacaaagtggattattctatttcagtacccaacaaagccgtagctattggttcagccacccctataaatatttccattgtacctctttcgaaaggtttgaaattgggctcaatcaaagtcgtattatttgagaattatcaatattgtgaccccttccctccagtaatttctgaaaataggcaagtgacagaactaaatcttgaagatcccttgaacgagtcatctgaagaatttaatggtaatagttgctttgtaaataaccccttttttcagcctgatcattcattccaagacaagtgggagattgataccatcctacaaatcccgaacagcttatcaaactgtgtgcaagattgtgatgtccgctctaacattaaggttcgccataagctcaaatttttcatcatcctaattaacccagatggtcataaatctgagttaagagcgtccttaccgattcaactttttatttcaccatttgtggcactttcaataaaaccattgtcatcctcgagtttgtattcgctttttagcaccactaaccagaaagacgaaaattcgtcacaagaagaggaagaggaatacctgttttctagatcagcatcagtcacagggttggaattattagcggatatgcgtagcggtggctctgttcctaccatttcagacttgatgacgcccccaaattatgaaatgcacgtatatgatcgtctttatagcggttctttcactcgcacggctgttgaaacgtctggaacatgtactcctttgggaagcgaatgttcgactgtcgaggatcagcaacaggatttagaagatttacgtatacggttgacaaaaattagaaatcaacgtgacaatctagggctaccaccgtctgcctcgtctgctgccgtttccagatcgctatctccgttactaaacgttccagcaccagaggatggcacggagagaatcttacctcagagtactcttggtcccaatggtggctctgtgccaggagtacatagtaacgtatcacctgttttactttcaagatccccagccccaagcgtgtcggcccatgaagtattaccagtgccctcgggcttaaattatccagagacccaaaacctgaacaaggttccatcgtatggcaaggcaatgaaatatgatattattggtgaggaccttcctccttcctacccttgtgcgatacaaaatgtgcaaccaagaaaacccagtagggtacattccaggaactcttcgacaacattgtcatcttctataccaactagctttcattcctctagttttatgagtagcactgcttcccctatttccataattaatggctctagaagtagttctagtggggtatctcttaatacacttaatgagttaacttcgaaaacttcgaataacccatccagtaatagtatgaaaaggtcaccaacaagacggagggctacttctttagctgggtttatgggaggttttctatcaaagggtaacaaacgatag

SEQ ID NO: 76465 - DNA, 1008 bp, Saccharomyces pastorianus
atgcactcacaccattcacactccggtgactatagtgcccacggtacggaccctttggattccgtggtcgatcaggtggtcaacctcaactttcacacgtactgtttgacagagcacataccaagaattgaggccaagtttatataccccgaagagcagtcattgggcaagaatcctgaggaagtcataaccaagctagaaacatcgttcaagaatttcatgagtcatgcgcaagaaatcaagactcgttatgctgatagacccgatgtgcggactaaattcattataggaatggagatcgaaagttgtgacatggctcatatcgaatatgcaaagcgactcatgaaggagaataatgatattttgaagttttgtgtgggttcggtccatcacgtcaacgggatcgctattgatttcgaccaacaacaatggtacaattcattgcattccttcaatgataatttgaaagattttcttctgtcttacttccaatcacagtacgaaatgctgatcaatattaaaccgttggtcgtgggtcacttcgacctttacaaattatttttgcccaatgacatgctagtaaaccagaaatcgggcaactgcaacgaagaaaccggagttcctgtagcttcactggacgtcatcagtgaatggccagaaatatacgatgcagttgtaagaaatttacaatttatagactcctatggcggcgcaattgaaatcaatacgtccgcattaagaaagggcctcgaggagccgtaccccagcaaaaccttatgtaatctggtcaagaagcactgtggatccagatttgttctaagtgatgacgcacacggcgtggcgcaagtgggtgtgtgctatgacaaggtaaagaaatacatagtagacgtgctacaattagagtacatttgctaccttgaggaaagccaatcaccagagaatgtgttaactgtaaagagattacccatttcgcaattcgttaatgatcccttttgggccaatatataa

SEQ ID NO: 76466 - DNA, 846 bp, Saccharomyces pastorianus
atgaaagctaggaaatcgcagagaaaagcgggcagtaaaccaaatcttatccagtctaaattgcaagttaataatggttcgaaatcgaataaaatagtcaagtgtgataaatgtgagatgtcatattcctcgacatcaatagaagatcgcgcgatccacgagaaataccacactttacagctgcatggacgtaaatggtcgccgaattggggttctatagtatacaccgagcgaaaccattcaaagacagtgcatctatcaagatcgacagggacaataacgccattgaactcgtcacctttgaaaaaaagtagtccgtctattacccatcaggaggagaagattgtatatgtgagaccagataagtcgaatggtgaagtccgagccatgacggagataatgacgctagtaaacaacgagctgaatgcgccacacgatgagaatgtcatttggaacagtaccacagaagaaaaaggcaaagcgtttgtatacataagaaatgacagggcggtcggaataataattatagagaacctttatgggggcaatggtaaaacatctagtcgtggacgatggatggtttatgattctagaagattggtacagaatgtgtaccccgattttaagattggcatatcgagaatttgggtgtgcaggacagcaaggaagttgggtatcgcaaccaaattgattgacgttgcgagagaaaatatcgtttacggtgaagttattcctaggtaccaggtagcatggtcgcaacccacagacagcggtggaaaactggctagcaaatacaacggcattatgcataaatcaggcaagttactattgccggtatacatatga

SEQ ID NO: 76467 - DNA, 2037 bp, Saccharomyces pastorianus
atgcactctcatagacaaaagtggggccgccagacggatatagcgagggtgctcgacgatatagaacacgacctctatctaccgcaacggctatcactcgatggtgcaactggtactgacgaatcacatgtgcaatacggtatagtcaaagactgctctgtgcttacgtgtggctgctgtatatctgaatcgctattcaatgatttatgcagggaaacttcgaacaagcaaactgcgtgtcccatctgtcagcgagaaaatgttcgactactttcagccatcaagccgctgcgagatttggctcgtcagattgacttcttcagaagtactaccggacagggcgaaagcgaaagcgatgagctccccgctatagtaaagacttcaccatcatcatcatcactatcgctaacgccatcgcgctcttcctccactgctgggctagaagctgataacaagacactatcagaccctacagttaaggagaaatcatcactgctcgaactcttccatattgtggcttcgaagatgcataatgcgaatacagaggtagggtcggaccacccactcacgactggcaccacccgtgatcaagaagaacacaccactaaggagaattactcaagcagcttactcgagcccaactatgacgaccacgcgaactggaaaatcctggataatgcctcgaacacaagaactgtgccgatagataacaactcctctttgatgtctacggacgttacaataccatccacagcaaactaccaaacaaatagtgcacatgatctggacgaagaaaaggagtacttttttgccaactgtttccccatgtacagaaaaaaatttcagttcaacacacaccccaaattcctagggacgaaatccaaattatccatcaaccaaagcatttctcccgaatgcaccaaatttgctctaattactgaacacaagtgggaaatttattcgattaatccgaaggacaactctcctcaactagtatcatgtggcaagtctagtggagaatatggtcccaacttcaaccaactaacagagcaatcgtcatcttcactctccactacttctcaagcgtcaaaaaagaaaaagaaaaactggagccaacgtttttgcaaactttccaatgatttcttgataatatcgggttcgcaaaatattcttaatgtacacgatatacaccaaaacggcaaactcatctatacctacgtgtcgagattccccatccgatgcatagacatagatccaaggtcgcagataatagcctacggaatcaccggaaaggatagacatacaggcgcggaacaagcattagtcgtgatccaacaaattaccagaaataaagtgactttggagcccgagttccccccaccaatcaccataacacttccatacagagatcccatcaataccatacaactttcgcacgacgccaagtatctgacatgttcgaccgcgctagagtcgcggttcttgatcatatctttgcagaaaataaacgaaccaagactgataatgaaaagtgttcggtccatagacacttccttagaatctgaaggtatcactgacacaaagcttttcccaggaaatccaaatctgatgtgtatcacatcaacagcattcaattcatctccactggtcataaacaccaaaatcacccaaattaacggtgtacggaccgtggcacaaccatccatgcttataagggtagatgagattggatgcaagattcacaagtgcgaaatatcaccaagaaacgacgcaattgccttcctcgaccgcaacggatcagtttacatcatgtgtgcccccaccatgatggacaacaacgaaaaaagaaggacaatcctcgttgaaaccgtggcaaatgcctacagggcttatgaatcagctactttgcggtttaacccagagggcaacaagctttatattctcgacagaaaggggactttctttgtggaagactttgcatatggcttgccccaatctcgcgagatcaccaaatgtaagcaaatattccacaaataa

SEQ ID NO: 76468 - DNA, 3108 bp, Saccharomyces pastorianus
atgccagttgagtttgctaccaatccttttggcgaggccaaaaatgcaacttcactgccaaaatatggtacacccgtaactgccatttcatctgtgctgttcaataacgtggactccatttttgcttacaagtccttttctcaacccgatttgttacaccaagatctaaaaaaatggtctgaaaagcgtggtaacgaatcacgtgggaagccatttttccaagagctggatatcagatctggcgctggtttggctcctttagggttttctcatggattgaagaacactacagcaattgttgctccagggttttcgctgccatacttcattaactctttgaaaaccgtctctcatgatggtaagtttcttttgaatgttggtgctttaaactacgacaatgctaccggctctgtcaccaacgattatgtaaccgcattggatgctgcttccaagctgaagtatggtgtcgtgactccgatttccgctaacgaggtacaaagtgtcgccttactggcattggcgattgccactttcagtaataactccggagctatcaatttatttgacggattaaactactcgaaaaccgtcttgccgttggtcgaatctgttcctgaggcatctattttggcaaaactatccaaagttattgcaccagatgctgcctttgatgatgtcttggataagtttaatgaattgactggattgagactacataatttccaatacttcggtgctcaggatgctgaaactgtgtttatcacttatgggtctttagaatccgaattgttcaactctgcgattagtggtaataattccaaaatcgggttaatcaacgtcagagtaccattaccttttaacgttgctaagtttgtcactcacgttccatctactaccaaacaaattgttgttataggccaaactttggatggttcttcgccttctttcttgagatctcaagtttcagccgccttattttaccacggccgcacctcaattagcgtttctgagtacatctatcaaccagatttcatttggtccccaaaagctgtcaaatcaattgtatcgtcattcatccctgaattcacttacaatgccgattcatctttcggcgaaggattcatttattgggcctctgataagagtatcaatattgatgttgcctccaaacttgtgaaagctctgtctttggaagatgggaaatttgtgtctttgagaacaaaatttgataacttggctaatgctggtaccttccaagctcaatttgtgacctcgaaggaacagatacctgtttcaaacatcgattctacgaaattatcagtcgttgaagatgtcagtttattgaagcatttagacgtagctgctaccgtcgcagaacaaggttcaattgcgttggtttcccaaaaggcagttaaagatttggatttaaattctgtagaaagttacgtcaagaatttgggaattcctgaatcattcctaatatctattgcgaagaaaaacatcaaattgtttatcatcgatggtgagaccattaacgacgagtccaaattgtccttgtttatccaagccgttttctggaaattggcctttggtctagatgtcgcagaatgtaccaaccgtatctggaaaagcattgattcaggtgcagacatttcagcagcctcgatttctgaatttctcactggtgcattcaaaaacttcctcagtgaggttccgctagcgctgtacactaaattttctgaaataaacattgaaaagaaagaggatgaggaagagcctgcagctttaccaattttcgttaatgaaacatctttcctcccaaataacagtaccattgaagaaataccattacctgagacctctgagatctctgatattgccaagaagttgtccttcaaagaggcatatgaagttgagaataaactaagacccgatttacccgtcaagaacttcgtcgtgaaagttaaagaaaatagacgtgttacgcctgctgattatgatagatatattttccatattgaattcgatatttctggtactggaatgacttatgacatcggtgaagccctcggtattcatgccagaaacaatgaatctttggtcaaagaattcttaaccttctatggtctaaatgaatccgatgttgtcttagtccccaacaaggacaaccaccatttgttagaaacaagaaccgtcttacaagcatttgtggaaaatttggatattttcggtaaaccaccaaaaagattttacgaatcattgattccatatgccactaacgaagaggagaagaaaaaattagaggatttggttactcctgccggtgcagtagatttgaagagatttcaagatgtggagtattatacatatgctgacatttttgaattgttcccatctgttcgcccatctcttgaggaacttgttactatcattgaaccattgaagagaagagaatactcaattgcctcctctcagaaagttcatccaaacgaagttcatttattgatcgttgttgttgattgggtggataataaaggaagaaaaaggtacggtcaagcttctaagtatatctcagaccttgctgtcggttcagaattggtcgttagcgttaaaccatctgttatgaaattaccaccatctccaaagcaaccagttattatgagtggtttaggtactggtttggcaccattcaaggccattgttgaggagaaattatggcaaaagcagcaaggttatgagattggtgaagtcttcctatatctaggttcaagacacaaaagagaagaatatttatatggtgagttatgggaggcttacaaagatgcaggtattatcacacatatcggcgctgctttctcaagagaccaacctcaaaaaatttacattcaagatcgtatcaaagagaatttggatgaattaaaaactgcaatgattgataataaaggttcattttacttgtgtggccctacttggccagttccagatattactcaagctttgcaagacattctggctaaagacgccgaggaaagaggcatcaaagtcgacttggatgccgcaattgaagaattaaaggaagcatcaagatacattttagaagtctactaa

SEQ ID NO: 76469 - DNA, 870 bp, Saccharomyces pastorianus
atgacagaacaagttaacagtgacactaccagtgacattaccactaccattaccacagtttacatttcgaacctgccattcacggcgagtgagcgagacctgcatgccttcctaaacaactatggcgccagttcagtgttgattccaacgcagaccgtccgcagattcagcaaaaggcacaatagcaaccctcgcaaaccactaggcatagcatttgcccagttcgcaaacaatactctggctttgaaggccattcaagacttgaacggaaccgttttccaaaatcagaaactatttctaaagttacacgttccttacgaggcagactctactccagacacggatgtaaagaagcccaaagaaaaaaataaggttaagaagacaccagagactgccgcggatacggtttactgtcacgacctgccagacgatataaccgacagtgagatccgtgagttgttccagctctactcgcctcaagaaatctggatttacaggtccaagatgtacaggagaaagtgtattccttttgcaccacaccaaattactgccgctttggtcactttgcaatctgaaaccccaattggggacatttgtgacagtgtggccaagacagctactttgaggggcaaatcgataatagtgaagcccgcttacgtctctaagattcaagaaattaaacaattggtcaaggacaacttaaccaatgcgcgcgacccacctccagcagcattggcagagccagcgccagcgccagcgccagtagagccagcggagcaagtgcaggaagggcaagacaatgcggaaaccaatgatgtcccacctccgcctgcttcgtcttccgatcgtccaaccgtggctgctacttag

SEQ ID NO: 76470 - DNA, 180 bp, Saccharomyces pastorianus
atggctaagtctaagaaccataccgctcacaaccaaaccagaaaggctcacagaaacggtatcaagaagccaaagacctacaagtacccttctttgaaaggtgttgatccaaagtttagaagaaaccacaagcatgccctacacggtactgctaaggctttggctgctgccaagaaataa

SEQ ID NO: 76471 - DNA, 264 bp, Saccharomyces pastorianus
atggtcgctagccgcgctcgggaaaaccagcgatattctcaatgtaggaagtctaccattttccctttaggctttgccataatctctggatacatacaatttcagaatatttcaatactgcatatttcaagattcaacccattattttataacatttttcattcaatattcaagaaccccggaacaacaatacagttagaaagtacgttatattatcatgaagtccccatttcgcccattggaaatgcaggtagccaaatctga

SEQ ID NO: 76472 - DNA, 444 bp, Saccharomyces pastorianus
atgggcatgttggaactagttggtgagtactgggaacaactaaagataaccgttgtgcctgttgtggccgcggccgaagatgacgataacgagcagcatgaagaaaaggcagcagaaggagaagaaaaagaagaagaaaatggggatgaagatgagggtgaagacgaagacgaagacgaagatgatgatgacgacgaagatgaggaagaagaggaagaagtcactgatcagttggaagatttgagagaacatttcaagaacacggaggagggtaaggcccttgtgcaccactacgaggagtgtgctgagagagtcaagatacagcaacaacaacccggctacgcggatcttgaacacaaggaggactgtgtggaggagtttttccatctacagcactatttggacactaccacggcacctagattatttgacaaattaaagtag

SEQ ID NO: 76473 - DNA, 939 bp, Saccharomyces pastorianus
atgggccgtacaacttctgagggaatacacggttttgtggacgatctagagcccaagagcagcattcttgataaagtcggagactttatcaccgtaaacacgaaacggcatgatgggcgcgaggacttcaacgagcaaaacgacgagctgaacagtcaagagaaccacaacagcagtgagaatgggaacgataatgaaaatgaacaagacagtctcgcgttggacgacctagaccgcgcctttgagctggtggaaggtatggatatggactggatgatgccctcgcatgcgcaccactccccagctacaactgctacaatcaagccgcggctattatattcgccgctaatacacacgcaaagtgcggttcccgtaaccatttcgccgaacttggtcgctactgctacttccaccacatccgctaacaaagtcactaaaaacaagagtaatagtagtccgtatttgaacaagcgcaaaggtaaacccgggccggattcggccacttcgctgttcgaattgcccgacagcgttatcccaactccgaaaccgaaaccgaaaccaaagcaatatccgaaagttattctgccgtcgaacagcacaagacgcgtatcaccggtcacggccaagaccagcagcagcgcagaaggcgtggtcgtagcaagtgagtctcctgtaatcgcgccgcacggatcgacccatgcgcggtcgctgagtaagcgacggtcatcgggcgcgctcgtggacgatgacaagcgcgaatcacacaagcatgcagagcaagcacggcgtaatcgattagcggtcgcgctgcacgaactggcgtctttaatccccgcggagtggaaacagcaaaatgtgtcggccgcgccgtccaaagcgaccaccgtggaggcggcctgccggtacatccgtcacctacagcagaacgggagcacgtga

SEQ ID NO: 76474 - DNA, 288 bp, Saccharomyces pastorianus
atgacttcttccctggttatatacatttttctatggtcaagactcatttgccaaatatttccgtgcgagcggccgggtcagcctttcgcctaccacatattaggcgaggcaaaaaaaaaaaaaaatagaaaacgagaaaatcgcacttgcagcataggaaatacttgcacacagacatacacatacacaccgtacgcaaagaaggcaaggcagcaagaaaaactgtgggaacgtagaaatgaacgtacctacggcgccaactcccaacaaacatttgaacatacctga

SEQ ID NO: 76475 - DNA, 345 bp, Saccharomyces pastorianus
atgagcgcgagtgacaaaacaaagctctgcaataagggcatgagcaggacatcgcgaaccacaactttcgtaatcacacccgccttccgtgagagagacgatgagggtgccaattccctgtgtaaagctttcttgaacactttctcgaacctcaaatcaggtatgttcaaatgtttgttgggagttggcgccgtaggtacgttcatttctacgttcccacagtttttcttgctgccttgccttctttgcgtacggtgtgtatgtgtatgtctgtgtgcaagtatttcctatgctgcaagtgcgattttctcgttttctatttttttttttttttgcctcgcctaa

SEQ ID NO: 76476 - DNA, 375 bp, Saccharomyces pastorianus
atgatcagaagggcccctaccaccttgcagctcagtcacgacgacgtaacctctctgatcgatgacctgaacgagcagaaactcaagcagcagctgaatatcgagaagacaaaatacttccaaggaaaaaatggcggatcgctgcactccaatacagactttcaggacacatcgcagaatatcgaagacaacaataacgataacgataacgatatcgatgaagatgacgacatgtcatcttacaacgacaaagcagcctcggtagcgcacaccagagtcctcaattccttgcatctgtccaccgacagcaataccgcccacgagacgtccaatgcaaacgacaaccacaaccccttctacatccgcgaggaataa

SEQ ID NO: 76477 - DNA, 1674 bp, Saccharomyces pastorianus
  modified_base (145)..(190): a, c, g, t, unknown, or other
atgagcgacactgaaaaggataaggatgtccctatggtagactcgcacgaagcgaccgaggagccacccaccacaagcaccaacacgccatctttccctcacttagcacaggaacaggcgaaggaggaatctgccacattgggannnnnnnnnnnnnnnnnnnnnnnnnnnnnnnnnnnnnnnnnnnnnnaactggaggagaaggcccttaggttcctggcaaagcaaactcacccggtgattattccgtcgtttgcctcttggtttgatatttcgaagatccacgagatcgaaaaaagatccaatcccgactttttcaacgattcatcaaggttcaagacaccaaaggcatataaggacacaagaaattttatcatcaacacgtaccgtctttcgccgtacgaatatttgaccattaccgctgtgagaagaaatgttgccatggatgttgcctcgatagtgaagattcacgccttcttggaaaaatggggcttaatcaattatcagattgaccccaggaccaagcccagtcttattgggccaagttttacgggccacttccaagtggtcctggacactccacaggggttaaagccatttttaccagagaatgtgatcaagcaagaagtggaaggaggagatggagcggaaccacaagtcaagaaggaattccccgtcaatctcacaatcaagaagaacgtttacgattctgcacaagacttcaatgcattacaagacgaaagtagaaactccaggcagattcacaaagtttacatttgccatacatgcggtaacgagtcgatcaatgtgcgctaccacaatttgcgtgcacgggacaccaacctgtgctcccgttgtttccaagagggtcatttcggtgccaacttccaatcttcagatttcatcagattagaaaacaacggaaactcggttaaaaaaaactggtcagaccaggagatgctactattgctggagggtattgaaatgtatgaagaccagtgggagaagattgctgaccacgtgggtgggcacaagcgtgtagaagactgcattgaaaaattcctaagcttaccgatcgaggacaactacatccaagaagttgttggttcaacgctgaatggtaagggtggcgacagccgcgatggtagtgtgtccggttcgaagttgatggaatgcgtgaatgatgctgtccagacgctactgcaaggcgacgacaaattgggtaaggtctctgataagtcgagagagatctccgaaaagtacattgaagaaagccaagcgataatccaagagttagtcaagctgaccatggagaaattagagagcaagtttacaaagctgtgcgatctagaaacgcaactggagatggaaaaactgaaatatgtgaaggaatctgaaaagatgctgaacgaccgattatcactgagtaaacagattcttgacctgaacaagtcgctggaggagttgaatgtgtcgaagaaactggtactgatctcggagcaagtagactcgggcatacaactagtggagaaggaccaggagggcgatgacgaagacggcaatacggccacaggacatggcgtgaaacgtgtaggcaaggaaggcgaggaagtaggcgaaggcgactccattgcaaaattgcagccccaggtgtacaaaccgtggtcattgtaa

SEQ ID NO: 76478 - DNA, 603 bp, Saccharomyces pastorianus
atggcaggtatcaagttgacgcataagctttatcagtattatcaattagccacaagctttttgtatgctgcattattgatacggtggctgatattaatgccactggtagggtctcggtttttaccgggaggaatccacgaattcttgatatatttgatgttttgttccagcatcatggaagttatttggttgcttagattccacgggttcaaatatggtttgctttcaagaacgtttttgaaagacttagattttatctatttagtcagcgtgatccatttttatgacgattatgagcatgcattgatcctgaagaatgcatcatactctagtttcattatttccttatctttatcacaggcatattgccattggtgcaaactttttaaacgtaagggcgtaaaggaaagaacacttgtctggaaggttaacacatttgttacgttgccaattctctacctgagtgaatttgcattgttactattaaatatccaggttaagaactatcattctaccccgactttggacataatcaacagggtggttttactagcatacttccctgtactactaacagcatacaaaaaactattaacaaaatga

SEQ ID NO: 76479 - DNA, 714 bp, Saccharomyces pastorianus
atggttcttcaatacccccagaataaaatattggttttatcagatcacccacacaacttttcaaaaacacaatttttgcaagacctgtttcattgctctagcacgggcatcagtatagttaaggaccaaacttgggaaaatagatactataaagtccattttgatctttatattgactcttgcaaagacataccagtatgggtggaagaatttataacgcctgaatgtgaaccgcttagaaatgtcatggcaggaattatcttaataacggacatccggcaaacaaaacctcaagaactgctgcaccaattcatgatagctgcccatcgaaatactttcgttgtgttggtcaatgtgaacgaagaagtcgagcaagatgaaattgatgaactgaatgagatatggagcaatgcctttacaaacgtcatcgaattcgtaaactggaaaaggtcaaaaccaactgttaaccataacgactatggagaaaaattggggcttgataggatccaggagattatagatacccacgactggttaaattgtgaagttctaccggctactaaaataagggaggaaattcctaatgaaatgcccctcgaacaaataattaggaatttgcaaagtgcaaggctaaaatataagtctatcgagaatagtagtgaagctgatgcttttgcaaatgaaatggctgacgaactatccagatatttatga

SEQ ID NO: 76480 - DNA, 1446 bp, Saccharomyces pastorianus
atgtctcactcacttacttccgttttccaaaagattgattctttaaagcctcagttcttcagcagactgactaaggctattcaaatccccgctgtttcttcggatgaatcactaaggtccaaagtcttcgataaggccaagtttatctccgagcaattatcacaatcggggttccatgacattaaaatggtggatctgggcattcaacctccaccaatttctacgccaaatctgtctctacctcctgtgattctatctaggttcggcagtgacccttcaaaaaagactgtgttggtttacggtcactatgatgtgcaacctgctcaattggaagatggttgggatactgagccattcaagcttgccattgatgaggctaaaggtatcatgaaaggaaggggtgtcaccgatgacactggccccttattatcttggattaacgttgtggacgccttcaaagcctccggacaagaattccccgttaacttagttacttgtttcgaaggaatggaggaaagtggttctttgaaattggatgaattgattaaaaaggaagctaatggttactttaaaggtgtagatgccgtttgtatttccgataattactggctaggcactaagaagcctgttttgacttatggtctaagaggttgcaactactatcaaaccatcattgagggtccaactgcagatttacactctggtatctttggtggtgttgttgctgaaccaatgatcgatttaatgcaagttctcggttcccttgtggattctaagggtaagatcctgattgacggtattgacgaaatggttgctcctctaactgagaaggagaaggctctatacaaggatatcgaatttagcgtcgaagaattgaacgctgcaactggctctaagacaagtttgtacgacaagaaggaagacatcttgatgcacagatggaggtatccttcgttgtccattcatggtgtggaaggcgccttttccgctcaaggtgcaaagactgtcattccagctaaggtcttcggtaagttttccattagaaccgtccccgacatggattctgagaaactgacctctttggtgcagaagcattgtgatgccaaattcaagtccttgaactctccaaacaagtgcagaacagaattaatccatgatggtgcttattgggtttctgatccattcaacgcccaatttactgctgctaaaaaggccacaaaactggtctatggtgtcgatcctgattttaccagggaaggtggttccattcctatcactttgactttccaagatgccttgaacactagtgtcttattgctgccaatgggtagaggcgatgatggtgctcattcaatcaatgaaaagttagatatttcaaattttgttggtggtatgaagacgatggctgcttacttgcaatattactctgaatcgccagaaaactaa

SEQ ID NO: 76481 - DNA, 537 bp, Saccharomyces pastorianus
atgatcgatcataaaaaattagagaagaatcaacctgtagttaacgcaaaggcaacctttcacaatgtggcgactaaatctactcctgtggctcgtatcgagaaactacttccagcggtaaaacacatgtatcaaacaagaggccctgctgcgttcgtccagggaacaacagccaccatatttaggcagatagctaacacctctattcaatttactgcatacacagcatttaaacggttgttacaagcaagaaacgacaaggcatcctcagtaataacggggttagccacatcttttacactcgtggcaatgactcagcccattgacgtcgtaaaaacaaggatgatgagtcaaaatgccaaaactgaatataaaaatacgttaaattgcatgtatagaatatttgttcaagaaggcatggccacattctggaagggctccatctttaggtttatgaaagtcggtatttcaggaggcttaacgttcactgtttatgaacaggctagtttgttactaggcttctcttccaggtcttga

SEQ ID NO: 76482 - DNA, 1086 bp, Saccharomyces pastorianus
atgagcactcccaggaaggccgccggtaacaacgaggatacagaagtctcagagatcagaaccccctttcgggagagagcccttgaagaacaacgtctcaaggatgaggtactgatcagaaatacgccaggttatagaaaacttttatctgcttctactaagtctcatgacatcctcaataaagatccgaacgaagtacgaagttttttacaagacttaagccaagtgttagcacgcaaatcacaaggcaacgatacaactactaataaaactcaagcacggaatctaatagatgaattagcgtacgaagagagccaaccagaggagaatgagcttcttcggagcagaagtgagaaactgacagataacaacattggcaatgaaacgcaacctgattatacttccttatcgcaaacagtatttgcaaaattgcaggaaagagacaaaggcttgaaaagtaggaagattgacccgataataatacaagatgttcccacgataggacacgaggatgaattgacagtgcactctccagataaagctaacagtatctctatggaagttttgcgcacgtcgccaagcattggaatggatcaggtagatgaaccgccagtacgtgatccggtaccaatttccataacgcaacaggaagaaccactatctgaagatttaccaagcgacgataaagaggagacagaagaagcagaaaacgaagattattcgtttgaaaacaccagtgacgaaaatttggatgatataggcaacgatcctatccgtttaaatgtccctgcggtgagacgttcttctataaaaccgctgcaaataatggatctaaaacatcttacaaggcaatttttgaatgagaataggataatattgccgaaacaaacgtggtctactatacaggaggaatctttaaatataatggatttcttgaaacaaaaaatcggcacgttacaaaaacaggaattggtagattcgtttatcgatatgggtattatcaataacgttgatgatatgtttgagctcgcgcacgaattgcttcccttagaacttcaatcaagaattgaaagttatttgttctaa

SEQ ID NO: 76483 - DNA, 888 bp, Saccharomyces pastorianus
atgcctgtttatgaacacttattgcccgttaatggagcatggagacaagacgtcaccaattggctgagcgaggacgttccttcttttgattttggtggatatgttgttggttccgacctaaaggaggccaatttgtactgtaagcaggatggtatgctgtgtggtgtcccctttgcgcaagaagtctttaatcagtgcgaattgcaagttgagtggttgtttaaggaaggctccttcttggagccttcgaagaatgactctggtaagattgttgtagctaaaattactgggcccgctaaaaacattctattagctgaaagaaccgccttgaacatccttagtagaagtagtggaattgccaccgcctcacataagataatcagtttggcgcgttcgactggttacaaggggaccattgcggggacaagaaagactacaccaggtttacgtagattagaaaagtattccatgcttgtaggtggctgcgacacgcacagatacgacctttcctctatggtcatgctcaaagataatcatatttgggctactggttctataacaaacgcagttaagaacgccagggccgtgtgcgggtttgctgtgaagatcgaagtggagtgtttgagtgaagatgaagccacagaggccattgaagctggtgcagacgttatcatgttggataatttcaaaggtgacggtttgaaaatgtgcgcccaaagtcttaagaacaaatggaatggtaaaaaacatttcctcttggaatgtagtggaggcttgaatttggacaacctcgaggagtatttgtgcgatgacattgacatttacagcactagtagcattcatcaaggcacaccagtgattgatttctcattgaaactggctcattga

SEQ ID NO: 76484 - DNA, 1989 bp, Saccharomyces pastorianus
atgagttataaggctaaccaaccatctcctggggagatgccgaaaaggtcaccttccatcctggtgacagatgcaagaacatccaagaatagaatgagtgcaccgttcgctggacacgctgctggtagtaggaagaatatggaaaacgcaggagttacgaagtctcaaggagttcgctcttccgctattggcccttctccgctgcagagttttactcatccaagaaggcgatcgtctggcaggtttagcgatatatccatagataatattctttctgataattcagatattccctctgccagaagagaggaaaggctatccagctcttcaagcgataggcctcgccaatatgagcggttaagttcgcgtagaaagatgatcaatcccctgcctccaagaacatcgaagacgtcacaaaagttagtgttgataccggaagacgacaacttgaaccactttcaaactctaccaacgaacgcgctggataggcaaagaccgaaagtgggctctatgaagtctaattccttcgatcggctacctcgatactcaaaagaaaagtccatggcaagaatcaccgcatataatgttgctgatggcttcaatctcaaccaattgtataagtttctgcaggaaactcatgaggtttcaccaagattgtatgatgagtgtctatacgttgcgtatactttgccacttctaccaggtaaaggcggttttagaatcaaatcaaatttatctaagaaaacagtgggtggaaagacattaattgataatttaattgatacaagcgaacagagagatcatcattatgaatattactcaggtgtggaaactgtggaagatgcaaataataattacgaactagaaaccagtggaaataacaataacgctaatcaagacaccacaacagttcccgatcatctaccaaatccagttggtcagcaagactcttttaatcctatggaaccacaattttttgcggaagaaactcccttagagatagagaaacgggaaaggacagaaagaataaacatgctgaagaaggaggaaaacgacagtgatgcaagttgtggcaacgataataataataaaaataatgataagagtaaactttatgctgttgagggaaacgatcagtatgtacagtcctctcgttcaccagcttcgccatcatcaatatctacgccatcgccaccatcttcatcacagaatgattttgatcgtgtatataaaatgcatagggacaatgaccatgaaggcaatgatagacatgcagaaattttcatttttcactacggcgttattgttttttggaactttactgaaattcaagagaaaaatattcttggtgatataacatttgcagattataagaatttaatgatccggccgctggatgaacaggatattgaaactgaacaattccatttcgaatatgacagggataccgagagaccgagaattttcaatgatattgtcacattacgttcaggtgaccacattatcgagctgacactatcacatgcgattgcgcaatcttcgaaattatcaaggtttgaatccagaatttcgccgattttaatatcagtcacaaaactacctaaaagactagcattatatggtacccttgggttaaaaagggaacagcttttgaaaaaatcagggaagctctttaaattgagagtggatgttaacctttcatccaccatattggatacacccgagtttttttggtcgttcgaaccaagtttgcatccactgtacgtggcaatgagggagtatttagaaattgaccaaagagtacaagtattaaatgatcgttgcaaagttttcttggaattctttgatatatgcgttgactctgttgctgaaagaaacatggctcgtgttacatggtggtttattcttgtcattttatttggagttatattttcattaacagagattttcgttcgttatgtaattattcatcgtcatacttctacatag

SEQ ID NO: 76485 - DNA, 372 bp, Saccharomyces pastorianus
atgattgctacacctataagattagcaaagagtgcatatgagccgatgataaaattcgtcggtacaaggcatcccttagtgaagcatgcaactgaggtcgttgttcatccttgcgctaccaacggaatgttacctggcagcaaagagtgtattccagtgagtaaattcatggaaaattataaaccattccgtgtagtgccaataaagcatagcgctaatgctggtctcagctcgtcaaagacctctgtattcgttaacaggccattgcaaaaagatgagcttgcttccattttcgagctacctgctaggtttcggtacaaacctattaacgagcatgaattggagagcataaatagcggtggtgcatggtga

SEQ ID NO: 76486 - DNA, 801 bp, Saccharomyces pastorianus
atgaatcacgatcctttcagttggggcaggcccgcagactctacttatggtgcttacaatacacaaattgcgaacgcaggcgcctctcccatggttaatacacagcaaccaatagtaacaggtacttccgtcatatcaatgaaatatgataatggggttatcattgcagcagataatttaggttcatatggctctcttctaagattcaatggcgtggagaggcttattcccgtgggtgataacaccgttgtgggcatttcaggtgatatttctgatatgcaacacattgagagattattgaaagatctagtcactgaaaatgcgtatgacaatcctctagcggatgctgaagaagcgctcgaacccagctatatttttgaatatctagctaccgtcatgtaccagcgaagatcaaagatgaatccactttggaatgccatcattgttgctggtgtacagtctaatggtgatcaattcctaagatacgtaaatcttctaggtgttacgtattcgtctcccaccttggccacaggttttggggcacacatggcaaacccactgttaaggaaagttgtagatcgagaatctgatattccaaagaccactgtacaggttgctgaagaggcgatcgtaaatgcaatgagagttctttattatagagatgcccgttcttctagaaacttctcactggccataattgataagaacacaggtttaactttcaagaaaaacttgcaagttgaaaacttgaaatgggacttcgccaaggatattaaaggctacggtactcaaaaaatttag

SEQ ID NO: 76487 - DNA, 1641 bp, Saccharomyces pastorianus
atggtggttttggctgcttctatcactacgcgtcaggggaaacctctcttgtccaggcaattcaaagatctgtccaaggatcgagtcctagagttgctgtccaatttccagaacctagtctccgagatctcgtcagaccacacatttgtcgaggacaagcacgtccgctacgtgtataggccctttgataactactacattattcttatcacaaaccgccagtccaatattatcaaggatttggccacattaaatctgttttcacagacgatcaactcctacttgtctagtttccaagaccaagagatttttcacaatgcctttgagatcttgtcctcgttcgacgaaattgtgtcaatgggcgggtacaaagagaacttgtcctttactcaagtgcaaacatacttgtctatggagtcgcacgaagaaagaatccaggaaattattgagcgtaataaagagatcgaagctactgaggagaggaagcgccgtgctaaggaaattgctagaaaagaacatgaaaggaaacacgggtttatgtcttcaaatggcgattacgacggcgccaataggttcatgggaagtaaagatcctaacgttacaaacgccatcaacagttactactcccatgcttctcccgcagcacaacagtcttatctacaaagttcccatgccgctgctgctgaggtggccccagtggcctccccaatggctacgtctcagcgtgcgggacattctgctactggcggtatgaaattgggtggtggtgccggaagaagagcgggtgccgcaccacgcccaagtgcaatttcttcagcctcttctggcacaccacctcctccggaggaggacgtcccagagaacaatggtattttgatctctatcaaggaggtaatcaatgcagaattctccagagatggtaccattcactcttctgaattgaaaggtgttttagaactaagaattaatgaccatgacttatctcactcgaacctaaaactagctgattctattgacgttcgcgataaatccttccagtttaagacccatccaaacatagataaacaatcgttcctatccactaaacttatctccctgcgtgataaatctaaggctttcccagccaacgaccaaagcctgggtgttctaagatggcgtaaagtcgctcccgcagaagatgactcattaattccattaactctaactacatgggtttccccctccgaatcacaacagggctttgatgtcattattgagtatgagagcgtcctggaaacagaactcgctgatgtgatcttcaccattccagttttccctcaggagccagtagacataaatacagagtcttctacatgctctgacgctgaagttgtcaacatggaccaagaaatgggaacctccattaagattagcaaaattgctgccaacgatgcaggtgcgctagcattcactatcgaagctccatatgaagatgcattgtacccaatgaccgtttccttccaagagtccacgagggataaattagctaagagtttcaccggtatggccatacaatctgttgtcatggccaatgaccacgatcaagagctcccttacgacgtcatcacctctttgaaatcagatgaatatcttgtccaatag

SEQ ID NO: 76488 - DNA, 825 bp, Saccharomyces pastorianus
atgccctcgttagccgaattgaccaagtcgttaagcatagcctttgaaaacggcgattatgccgcgtgtgagaagctcttgccccctatcaagatcgaacttatcaagaataaccttttaatacctgacttatccattcaaaatgacatctatttgaatgatttgatgattactaaaaggatcctggaagtaggtgcccttgctagcatccaaactttcaattttgacagcttcgagaattacttcaaccaattgaagccttactactttagcaacaatcataaattatctgaatctgacaagaaatcgaagctgataagtctgtatttgttgaacttattgtctcagaataacacaaccaagtttcactcggaattgcagtatctagataaacatatcaagaacttggaagacgattcacttttgtcttaccctatcaaactagacagatggctcatggaagggtcgtaccagaaagcatgggatcttctgcaatcggggtcgcagaatatatcagaattcgactcttttaccgatatcctaaaatcagctataagagacgaaattgctaaaaataccgagctatcctacgactttctccctctctccaacataaaggctttgctctttttcaacaacgaaaaagaaactgaaaaatttgcactagagagaaactggcctattgtcaactcgaaagtttacttcaataaccaatcaaaggagaaagctgattacgaagatgaaatgatgcatgaagaagaccaaaagacaaacattatcgaaaaagcaatggattatgccataagtattgaaaatattgtgtaa

SEQ ID NO: 76489 - DNA, 306 bp, Saccharomyces pastorianus
atggatggactggtgacgcaagcaacgatccaattacgattgttccagctgaggatggttccggtgcaggtgctgctgttattgctgcattgtccgaaaaaagaattgccgaaggtaagtctcttggtatcattggcgcttaatgaaaaaaatgtaatgaaatataaatgtgtttttccctcccttaatattattattcttatgagtgatgtccttatgttttttttgcggtctagtatatgtaaatatagacacacacatatatatatatttatgtgtataatcctagctaataaacatttttag

SEQ ID NO: 76490 - DNA, 1458 bp, Saccharomyces pastorianus
atggttcatttaggtccaaagaaaccacaggctagaaagggttccatggctgatgtgcccaaggaattgatggatgaaattcatcagttggaagatatgtttacagttgacagcgagaccttgagaaaggttgttaagcactttatcgacgaattgaataaaggtttgacaaagaagggaggtaacattccaatgattcccggttgggtcatggaattcccaacaggtaaagaatctggtaactatttggccattgatttgggtggtactaacttaagagtcgtgttggtcaagttgagcggtaaccatacctttgacaccactcaatccaagtataaactaccacatgacatgagaaccactaagcaccaagaggagttatggtcctttattgccgactctttgaaggactttatggtcgagcaagaattgctaaacaccaaggacaccttaccattaggtttcaccttctcgtacccagcttcccaaaacaagattaacgaaggtattttgcaaagatggaccaagggtttcgatattccaaatgtcgaaggccacgatgtcgtcccattgctacaaaacgaaatttccaagagagagttgcctattgaaattgtagcattgattaatgatactgttggtactttagttgcctcatactacactgacccagagactaagatgggtgtgattttcggtactggtgtcaacggtgctttctatgatgttgtttccgatatcgaaaagttggagggcaaattagcagacgatattccaagtaactctccaatggctatcaattgtgaatatggttccttcgataatgaacatttggtcttgccaagaaccaagtacgatgttgctgtcgacgaacaatctccaagacctggtcaacaagcttttgaaaagatgacctccggttactacttgggtgaattgttgcgtctagtgttacttgaattaaacgagaagggcttgatgttgaaggaccaagatctaagcaagttgaaacaaccatacatcatggatacctcctacccagcaagaatcgaggatgatccatttgaaaacttggaagatactgatgacatcttccaaaaggactttggtgtcaagaccactctgccagaacgtaagttgattagaagactttgtgaactgatcggtaccagagctgctagattagctgtttgtggtattgccgctatttgccaaaagagaggttacaagactggtcacattgccgctgacggttctgtctataacaaatacccaggtttcaaggaagccgccgctaagggtttgagagatatctatggatggactggtgacgcaagcaacgatccaattacgattgttccagctgaggatggttccggtgcaggtgctgctgttattgctgcattgtccgaaaaaagaattgccgaaggtaagtctcttggtatcattggcgcttaa

SEQ ID NO: 76491 - DNA, 579 bp, Saccharomyces pastorianus
atgctctttgcatattcaggttgccttgcccctcaatgcatacctgatattagtagtttcaaggcgcttccattccgtgacactgagagtcggtttactaccgactcttccgtaatctcgagccgtttttcaagtagctttacgagtagttcgagcaaaattattattatcacttctattttttcctcaaaaatggataacgaacatgtaggtgcctctctaattgtttctttgagcatggctagtctaatcttaactaatgtgttcagttttagctctactagctattcctcgcaaccatctgattatattgcatgctccctcagtggtattgatgaccaacctgtggctgaaccttctggatacacacctgttggctcctcatctccacattctagttgtattacttctggtttggatgcaataggttaccaatcttcacttaatgaaggccaatcgacgaatgcatcttccagattcgtcacaaaagtttacagtcattctgccttaactcatataattttacatttactcagtatccttcagaagttttacttacaagtaagcaccatttcttaa

SEQ ID NO: 76492 - DNA, 369 bp, Saccharomyces pastorianus
atgatggttgaccccttatacaaaggtggattaacaaagccactttgttcatctggattacgtccaataacagacagttgcgtagtaataccaaacttcgataactcggtacgatcaatcattgtagtgaatattttggtttttgctggaattttatattcacagtttcgaaacacgttaagtatttcttcattgtggtgtcccaacactagagcagtctttctttttatatgtccttgtcttctatatttttatcaaggaatatttagcactgatgagcaaattggcactttcaacattatttggatgctatggcgccttacaattgagttgattatacggaatttgaatgccgaaaaagaacgttaa

SEQ ID NO: 76493 - DNA, 363 bp, Saccharomyces pastorianus
atggtcaaattaacttcaatcgccgctggtgtcgctgccatcgctgctactgcttccgcaaccaccactctagctcaatctgacgaaagagtcaacttggttgaattgggtgtctacgtctctgatatcagagctcacttggcccaatactacatgttccaagccgcccacccaacggaaacctacccagttgaagttgctgaagccgttttcaactacggtgacttcaccaccatgttgactggtattgccccagaccaagtgaccagaatgatcaccggtgttccatggtactccagcagattaaagccagccatctccagtgctctatccaaggacggtatctacactatcgcaaactag

SEQ ID NO: 76494 - DNA, 621 bp, Saccharomyces pastorianus
atgagtttcctaagcatttttacttttttcagcgtccttatttctgttgcaacagccgtcagatttgatttgactaatgttacctgtaagggcctacatggacctcattgtggtacctacgttatggaagtcgttggtcaaaacggtacatttttgggtcaatctacgtttgttggcgccgacgtcttgactgaaagcgctggtgatgcttgggcaagatatttgggccaggaaacaagattcctcccaaagttgactactattgctagtaacgagacaaagaacttttctccactcatcttcaccaccaatatctacacttgtaaccctcaatccattggtgatgctatggttccttttgctaacactgttactggtgaaattgaatataactcttgggcagacactgctgataacgcttccttcataaccggtttagctaaccaattgttcaactctaccaattatggcgttcaagttgcttcctgttacccaaattttgcttctgttatcttaagcaccccaactgtgaatattttcggtaaggatgacacattaccagattattgtaccgccattcagctaaaggccgtttgtccaccagaagctggttttgattaa

SEQ ID NO: 76495 - DNA, 1677 bp, Saccharomyces pastorianus
atgagaagaaaaaatcgactgtttatattagttgtactactgggaattgtgttagtagtatattactctcagttgaattcgttagatttggtagaaccagttcaaagtagcagcagtggcaatggtggctgctggagttactatgaaggtcttacgcccgggtggttgaatgacttctacgacgtaaatcaaataaccccgaatcctgcaaaagatgtgattgaactggttacgaggattaagattttttttaattgcttgcagcaggttgatgggcataatattcagcgtttgagggatattgaaaagaagctctttccgtatattaactttgaaaaattagaaactgatgaaagtgccttctggcacacaactacgagatggaatggcgaggtttaccatgcgtctgtgttggaatttgaccccaaaaaccatcaattccttcgttctaagcccatcaatttcgatacagggctatctttttgggagaattggttgcacactgcgactcaaagtggttcgaaaggcatagttattagtgcttctgacgtgcagttgaatgaaaccatacgcttattgaaagtgttgaggttcatcaaaaatgattatcctatacagattgttcataatgcagatctgagtcaagattccatgaaatctattatcaaatatgcgagaagtctagacaccgctgaatatcctgctcaagaattatggtttttaaatgtacatagtctgctaaacccgaaatattcgaaaaaatttaccacctattccaacaagtggttagcattgaccttctcatcctttgaaattcctattctaatggactcagatacagtgccctttgtttcaatagaaaaattttatgaattagaggaatttcaaaagactggagttctattctttaaagatcgggtaatatcagatgatctatttgaatcctctgaattaaaaattctaagggaaattgtctatgggtgtattgggcttgatttagaggatgaatccaagatacatgagcaagtagaggatccagtggttgcacaggttctggaaaacatgtttataaagaaatataaacatcatttggaaagcggcctggtaatattgcataaaggaaagcatctcttcagtatgcttacttcaatagctttacaattttctccaattgcagaatattttcatggtgataaggactttttttggctgggcgaattactttcgaacaatcgctttacgttccatcctgtggatgcatcaaacattggtcagttgggcaatgtagtttcaaaagagagtaccggtgagttttaccagatttgttctgtgcaactatctcatacagacagggacgggtccttgctatggctaaacgggggccttaatatttgtaaaaaaacttcatgggaatacgattatgagcatagacagagactaaatgatatgttccaaaatgcagatgaattacgtgaatattatgcatcaccagtaaaacttgaagggattataataccagatactagtatatcaggatggattaactcaggagagtgttttttgttcaattattgcacattattcaaggaaggtgagtttggaaagttgatcaaatttaaagaagacgaaaagctccggctttcacaaatagtcgacatatggaataaagatatttga

SEQ ID NO: 76496 - DNA, 1398 bp, Saccharomyces pastorianus
atgcttgggatcacgtatgccgttaactctacaaagcaattgatattttgctgcctcaaatatctcacactactaggatatattcttttatcaaacaggaaaaaagggcagcgtaccaacatgtataaaagggttattagcatttctggtttattaaagactggagtcaaacgtttttcttctgtctattgcaaaacaaccatcaacaacaagtttacatttgcaacaactaatagtcaaataagaaaaatgtcttccgttactgggttttacattccaccaatctctttctttggtgaaggtgctttagaagaaaccgctgattacatcaaaaacaaggattacaaaaaggctttgatcgttactgatcctggtattgcagctattggtctctccggtagagtccaaaagatgttggaagaacgtggcttaaacgttgctatctatgacaaaactcaaccaaacccaaatattgccaatgtcacagctggtttgaaggttttgaaggaacaaaactctgaaattgttgtttccattggtggtggttctgctcacgacaatgctaaggccattgctttattggctactaacggtggggaaatcggagactatgaaggtgtcaatcaatctaagaaggctgctttaccactatttgccatcaacactactgctggtactgcttccgaaatgaccagattcactattatctctaatgaagaaaagaaaatcaagatggctatcattgacaacaacgtcactccagctgttgctgtcaacgatccatctaccatgtttggtttgccacctgctttgactgctgctactggtctagatgctttgactcactgtatcgaagcttatgtttccaccgcctctaacccaatcaccgatgcctgtgctttgaagggtattgatttgatcaatgaaagcttagtcgctgcatacaaagacggtaaagacaagaaggccagaactgacatgtgttacgctgaatacttggcaggtatggctttcaacaatgcttctctaggttatgttcatgcccttgctcatcaacttggtggtttctaccacttgcctcatggtgtttgtaacgctgtcttgttgcctcatgttcaagaggccaacatgcaatgtccaaaggccaagaagagattaggtgaaattgctttgcatttcggtgcttctcaagaagatccagaagaaaccatcaaggctttgcacgttttaaacagaaccatgaacattccaagaaacttgaaagaattaggtgttaaaaccgaagattttgaaattttggctgaacacgccatgcatgatgcctgccatttgactaacccagttcaattcaccaaagaacaagtggttgccattatcaagaaagcctatgaatattaa

SEQ ID NO: 76497 - DNA, 1125 bp, Saccharomyces pastorianus
atgagcaacgttactacgccgtggtggaaacaatgggaccctgataccgttacacttaccgctgaaacccctgatgatgtgtggaagacctgtgttttgcaaggtgtttattttggtgaaaacgagtacaatggtcacttaggtgccagaatatcttccgtctttgttattcttttcgtgagtacttttttaactatgttcccattaatctcaacaaaagtgaaaagattgagaattcctttatatgcttaccttttcgcaaaatattttggttccggtgttattgttgcaactgcatttatccacttaatggaccctgcttatggtgcgattggtggtaacacttgtgtaggacaaaccggtaactggggtctttattcatggtgtcctgccattatgctaacgagtttgaccttcactttccttactgacctgttcagtagcgtctgggttgaaagaaagtatgggctttcccatgaccataccaacgatgaaattaaagacactgttgtgaataacgctgcagttgtttcaactgagaatgagaatggtaccgcaaatggatctcatgacaccaagaatggaatagaatattttgaaggatcagacgctacatccgtggatgttgttcaatcatttgaaacacaattttatgcctttttaattttagaatttggtgtgattttccactccgttatgatcggtctaaatctgggaagtactggtaaagagttcgccaccctataccctgtcttagtgttccatcaatcatttgaaggtttaggtattggtgcaagattgtcagccattgaattccctagatcaaagagatggtggccatgggccctatgtgttgcgtatgggttaaccacaccaatctgtgtggccatcggtttgggtgttcgtaccagatacgtcagcggttcttacactgcccttgttatctctggtgttttggatgccatttctgctggtatcttattgtacactggtttggttgaactactagcaagagactttatgttcaatcctcatagaacaaagaatttaaaagagttgtccttcaacgttatatgcactcttttcggtgctggtatcatggctttgatcggtaagtgggcttaa

SEQ ID NO: 76498 - DNA, 900 bp, Saccharomyces pastorianus
atgacggatatagggagaaccaagtctagaaattacaaatgttcttttgacggttgtgagaaagtctacaacagacctagtttgcttcagcaacaccaaaattcgcataccaatcaaaagccgtatcattgtgatgagccgggatgtggcaaaaaatttataagaccgtgccatctacgagttcacaaatggactcattcacaaatcaagcccaaagcgtgcacattatgtcaaaaaagatttgtcacaaatcagcaattaagaaggcatttaaatagtcatgaaagaaaaagcaagcttgcatcaagaattgaccgtaaacacgaaggagtgaatgcgaatgtgaaagcagaactcaatggcaaggagggaggttttgacccaaaattaccttccggctctccaatgtgtggtgaagaattctcgcaaggtcatttgcctggatatgatgacatgcaagtgctacaatgcccatacaaatcatgtcaaaaagttaccagcttcaatgacgatctaataaatcatatgttgcaacatcatatagcaagtaagcttgttgtaccatctggagatccatctctgaaggaatcgcttccaacctctgagaaatccagcagcaccgacactacatccattccacaactttcatttagcactactgggacaagcagtagtgaaagcgttgatagcactacggcacaaaccccaactgatccagagagttactggtcggataaccggtgcaaacatagtgattgtcaagagcttagtccattcgcatctgtatttgatctcattgaccactatgaccacacgcacgccttcattcctgagacgctggtaaagtacagctacattcatttatataagcctagcgtctgggatttattcgaatactga

SEQ ID NO: 76499 - DNA, 1461 bp, Saccharomyces pastorianus
atggttcatttaggtccaaaaaaaccacaagccagaaagggttccatggccgatgtgccaaaggaattgatgcaacaaattgagaattttgaaaaaattttcactgttccaactgaaactttacaagccgttaccaagcatttcatttccgaattggaaaagggtttgtccaagaagggtggtaacattccaatgattccaggttgggttatggatttcccaactggtaaggaatccggtgatttcttggccattgatttgggtggtaccaacttgagagttgtcttggtcaagttgggcggtgaccgtacctttgacaccactcaatctaagtacagattaccagatgctatgagaactactcaaaatccagacgaattgtgggaatttattgccgactctttgaaagcttttattgatgagcaattcccacaaggtatctctgagccaattccattgggtttcaccttttctttcccagcttctcaaaacaaaatcaatgaaggtatcttgcaaagatggactaaaggttttgatattccaaacattgaaaaccacgatgttgtcccaatgttgcaaaagcaaatcaccaagaggaatatcccaattgaagttgttgctttgataaacgacactaccggtactttggttgcttcttactacactgacccagaaactaagatgggtgttatcttcggtactggtgtcaatggtgcttactacgatgtttgttccgatatcgaaaagctacaaggaaaactatctgatgacattccaccatctgctccaatggccatcaactgtgaatacggttccttcgataatgaacatgtcgttttgccaagaactaaatacgatatcaccattgatgaagaatctccaagaccaggccaacaaacctttgaaaaaatgtcttctggttactacttaggtgaaattttgcgtttggccttgatggacatgtacaaacaaggtttcatcttcaagaaccaagacttgtctaagttcgacaagcctttcgtcatggacacttcttacccagccagaatcgaggaagatccattcgagaacctagaagataccgatgacttgttccagagtgagttcggtatcaacactactgttcaagaacgtaaattgatcagacgtttatctgaattgattggtgctagagctgctagattgtccgtttgtggtattgctgctatctgtcaaaagagaggttacaagaccggtcacattgctgcagacggttccgtttacaacagatacccaggtttcaaagaaaaggctgccaatgctttgaaggacatttacggctggactcaaacctcactagacgactacccaatcaagattgttcctgctgaagatggttccggtgctggtgccgctgttattgctgctttggcccaaaaaagaattgctgaaggtaagtccgttggtatcatcggtgcttaa

SEQ ID NO: 76500 - DNA, 1767 bp, Saccharomyces pastorianus
atgtcaacacttagcgatagtgataccgagactgaggtcgtgtcgagaaacttgtgtggaatcgtcgacataggttctaatggtattcgttttagtatatcttccaaggctgcacatcatgcaagaattatgccttgtgtttttaaagatagggttggtctttctctatacgaagttcaatataatacacatacgaacgcaaaatgccctattcccagagatattataaaagaggtttgttctgccatgaagagattcaaattaatttgcgatgattttggtgtacctgaaactagtgtcagagtaattgcaacagaagccacgcgagatgctattaacgcggatgaatttgttaatgctgtttacggtagcactggctggaaagtagaaatattaggccaggaagatgaaactagggtcggcatatatggtgttgtttcctcatttaatacagtaagaggtctatatctagatgtggcaggcggtagtactcagttatcctgggtaataagctcgcacggagaagtcaagcaatccagcaaacctgtatctttgccatatggagctggaactcttttgagaagaatgagaacagatgataatagggcacttttttatgagattaaagaagcgtacaaagatgcgattgaaaaaattggtatacctcaagaaatgatggatgatgccaagaaagaaggtggatttgacctttggacccgtgggggtggtttaagaggtatgggacatctgcttctttaccagtcggaaggttatcccatccaaacaataattaacggatatgcttgcacttatgaagaattctcgtctatgtcagattatctattcctaaaacaaaaaataccaggttcttcaaaagagcataaaatatttaaggtttctgatagaagggctttacaacttcctgccgttggttttttcatgagtgctgtttttgaagcgattccccagatcaaagctgtacattttagtgagggtggtgttcgagagggttcactttattctcttcttccaaaagaaattcgtgcacaagatccattgctaattgcgtcccgtccttatgctccattacttactgaaaaatatctatatctattgagaacatcaatcccacaagaagatataccagaaatagtaaacgaaaggattgctcctgctttatgtaacctagcatttgttcatgcctcttatccaaaggagttacaaccaacagctgcattacatgttgctacaagagggataatagccggctgtcatggattatctcacagagctagagcgctgataggaattgctctatgtagtagatggggcggcaacattccggaatctgaagaaaaatacacccaagaattagaacaagtagttctacgcgaaggtgataaagctgaagcattgagaattgtatggtggacgaagtatattggtacgattatgtatgtgatttgcggtgttcatccaggtggtaatatcagagataacgtatttgatttccatgtttctaagcgtagtgaggtggagaccagtttaaaagaattaatcattgatgatgcaaacactacaaaggtaaaagaagaatccacgcgtaaaaatcgcgggtatgaagtggttgtgagaattagtaaggacgatcttaaaacaagtgcttccgttcgttccagaattatcacgctacaaaagaaagtacgcaagctatctagaggaagtgtagagagggttaaaattggcgtgcaattttatgaagaataa

SEQ ID NO: 76501 - DNA, 738 bp, Saccharomyces pastorianus
atggaatcaaagatgagtgaagaagaagcgcataaaacagtggaggtggatgacgtcggggttcaattggatgagggcgatgaagaagaccttttggagtatgatgatgaactcgtggaggaacaaccatcggacgcccatatacgcaacgtggcagagactttaatgaaaagcgaattgcccaaagtcaccgtggaatataaagatactacatttctgttgttcacgtcggatgataagaacgaaagtaacaacccaataatatgtgaaaaagctgctctttatcagcgacccatgggggaattcatggaatccattcgtaaatttatgggaaatcgttttggcaggttggcttttgctacgaaggagttggttttacaactgaaaagcctcgatttgaccttgttcgaagataatgtctacaacaaccatatttcattcagcgatgtttatactatatttaaaatcctgaaggaaagatcggagtctaattttgaaactgatataccgacgcacttggctattgaattaagtacaaggccaagatttgtctctcggtacaacgccttggttgaattaactgaaagctcagctacgttgaaaaacataaagccattttctaacgatgaaacgcatcccttaattgtggatgacaatgaccaatatacacaccagaatacttcagaagtcattgtaatggacatagatgatgacataggtgaggattctgaagactaa

SEQ ID NO: 76502 - DNA, 2115 bp, Saccharomyces pastorianus
atgattattgaacgttgggaagtaaagttatctaaatgtaaccaaaatgtgggcggctattctgttctgtcaggaaacttaaaagaaaacatcaaactgggaagacgagcacaaaaatatttgaaagagctaagaaatttgcaacttaaaccactgaaaatcggagggtatgaaaattgcggcacgatcaatggtgaagagtattttttggaggtaattcacatcacctctggaagacaaaaaatagatgtagccgttggcaaaacatggaatgtgactaacattgagaatgacaacaaagaagaactacagtatgagttattcaaggaaaagttaaaagtcgagaaacaggacatgttattttttagctggatgaaaagtctttcagttcaattaaatgctcctcttcaccaaaaaatgacggaacacggtttggcagacgataacacgaggttagagtggttcaacatcccatttctcagaagaagtcaatacaggaaaaaggtaccatatccgagtttaagacaaatgtcctctgtactggaagtgcaatgcaacacactaacggaggaaaagttgaacttctgcgttggattttctgataaacctttgtcagaatggaagccccaaatttttgagcaaacctacaatagataccgtttacaacagatctcacctgagaaatctttcaaatataagagtaggtgcagtaagtaccatttcaagaccagttcgcaaagctgggttgtgaaagtcccagaacatgatcaacagcttaatacgtttgaaaaacgttatgatgaactctttgatgctcaatttaataaactagaattttttaaaataagaatgaaaaaattgaaaaagaataagccaattgagaaaaagaactataaaatatggtgtctagaaaaagaagacttaaaggatttggtatgggatcctctgaaaagaatttgcaatcattctaggtatgcaatattcgagcatgttaccataaatagggaggcctattcgatcaaaccattaaggttaacttttcaaaaattagattccggctcccttgacctgatcgataatcaaaaaaagacgtttggtagtataaagcttgcaatgagtatgccagatgtaaaaaaaactgaaaatcagccaattgaagaaagtgaaagacacgatgaaactgctattgaaaccgaagaatttgatgaaaatgattgtctttcatctaaggcggatattaatacatcattagctcctcaaaagagatctttcatcgataatgaactaatgtccatgttagtcaccaaaaaaaaaataaagaaggacaaggatgttagtgacaccggtatatcttccacttcatacttgataaattctgggacatatgcaaattctcatattgaaattcctacctctaattcagtttacaatggaaaggaagattgctcatttaataactactcagtaaagcattcaatattggaagaagatattgagaataaatgcatagccgtaaatgaaaacaaggtgattgagaaccaaaaggtaattcagtcattatgtaaaaactcccatctagaccttatcgaacaaccttactttggagaatgcgatttcattataaaccattcaacatgtgtatataaaattcaggcgagccgatttatgcaactcagaaataacggctcattgcattacgataaagcgataaacgatcttttaactgaatttcagagagtcattataattgtggagttttctgaaataatacaagacgttgatcctgatcttttctggaaaatcaaactttatttattgaattcacgtgttgatgtttttttcattcatgagactactgacttttttattgattggatgaaatatttcattgcaaaatgggccttttcatataacgatgagaaagaaaaaaatattgcaaatgccgatattcttctagatttgggatttaacatcctcttagtacggaaaattttccagacatatagtctcgaagaattttttatggcaataataaaggaagaaagcaaagctgttaaaatgcttacggtttcacaaatgactcgcctgaagaagttattaaccttagaatggtaa

SEQ ID NO: 76503 - DNA, 1110 bp, Saccharomyces pastorianus
atggttgtattcgaaataactatacttggggccaatggaggacccaccgaatacggaacacagtgttttatacttaagcctgctagaacagaggatccagaattaatagctgtagacggtggtgcaggaatgtaccagctacgagaaatgttggtccaagggcgaaatgaaaatgaaggtgatgatgagcttgttccaagcttttatgaacatgatcgagagccgatagagttttttattgattccaaactgaacatacaaaagggtttatccaagtccttgctacaatcattaaagaggcagggagagcattttgaaagcgccaatacaatgaagaaaacttacgaggttttccaaggaattacggactactacattacccatccccatctggaccatattagtgggctggtagtaaactccccctcaatatatgagcaggaaaacagtaaaaagaaaactatttggggattaccgcatactattgacgttttgcaaaggcatgtctttaatgacttaatatggccagatttaacggcagaacgttcaagaaaattgaagctaaaatgcttgaatccgaaggaagttcaaaagtgcactatctttccttgggatgtaataccgttcaaagttcatcatgggataggcgtcaagactggcgcgccggtatacagcaccttctatatcttcagagacaggaaaagcaaagactgtataatagtttgcggagatgttgagcaggaccgcagagaatctgaagaatctctacttgaagaattttggtcttacgttgctgaaaatataccgcttgtgcatctcaagggtatattagtcgaatgttcatgcccattatcttccaagcccgagcaattgtatggtcatctatctccaatatatttaatcaacgaattatccaatttgaacactttatacaacagtagtaagggattaagcggtttgaatgttatcgttactcacgttaagtcaacacctgctaaaagagacccaagactaaccatactcgaagagttacgatttctagctgaggagaggaacttgggagacttgagaatatctattgcgctagaaggccacactttgtttctataa

SEQ ID NO: 76504 - DNA, 594 bp, Saccharomyces pastorianus
atggaactccgtagtttttctagacagcctgatggcatacttgctaccccaagattgggaagggaggaagtattggaaggtgaacatccgcaagatgctagattagcccgacaaagcatttggttaagcccaagtttaattgcggagtatatacagcttttcttcaattttattataggaactataggactgtctcttgctattaaattcattttgatgataagaaacgatgttaacttaaaactggagcataacgtgagggaagcattagataaaattgcaacttgtaaatcaagatattttgaaaaccagtgcgaacctcatatgagggttccagcattggaggtacgttgcaatgaatggtcaaaatgtatgaacaaggaaatagtgtctggctccgattaccaatgggctaaagcatgggctcgtactctggcggaggtaataaatgctttttttgaagcgttcagtatacgatctttccttttcattttaattagcatcataggtataatatttgttaccaatacgagtttcggatcatacagggtttatctcaataataaagatacaaaatcggttcgccatgcatag

SEQ ID NO: 76505 - DNA, 1164 bp, Saccharomyces pastorianus
atgggtgttagtgcaaatttgttcgtaaagcaaagagggtcgacaacagctctgaagcagccaaaggaaataggattctattcaagaactaaggatgaagaatatttaattagcgatgatacgaatttgaattactactatcttccagacgctgaattggacaggaagttggatctttcatcaggatttcagaaatttaaggattattacaaagattttgaagacaggtgttccctgcgtgggctattagaaaccatagaaagctctgaaagacataaaggaaaaaaaattaatgctgatataattacttttagaggaatagcacggaaattaatttcatgtgcatttgactctccatcttttaatacagttgatcttcgtatcgtttcattcaacggccaactttttatcaaggaagtgcctgaagctgtcaatgcagctaaggcttcctctgcaactgaagcagggcgtaatataaatcaagatctgaatgtatttacagggtacaagtttgaaactttggctactctttccaatccgttgcagtatacaccccgtgaagtgatagaaaaaagaactaaaaggattgtatcgcatggagatgaatacattagtgttgtgagaactggtgtaggtaactgcaagttaattcttggtgctgaggtggattgtatatttgactttaaagaaaacggtagagacaatttaaaacattatgccgaattgaaatgtacgcagcaagttgcgaacatatcggatacgcataagtttgagcgtaaactgttccggacctggctgcaatgcttcttagttgggatcccaaggatcatatatggttttaaagacgaccattatgtattaaaaactgtggaagagttttcaacggaggaagtacctgttttattaaagaacaataatccacaagttggaagtgcatgtttagaagccattaaatggtatggtctccttactgagtggcttttgaaaatgataccaagagatgaggatcctcattctcaaataagagcatttaagttggttttcgaaaataatcacctaagattatccgaaattgaagaaagtgatgaggaatattcaggtttgattgatggagaacatatattaacgaacgggtttaaggagtggagaaaatctttgaaataa

SEQ ID NO: 76506 - DNA, 2175 bp, Saccharomyces pastorianus
atgacgaaactattttcagaggttaaggaaagcatagaagggatcaagatgccatctaccttgactattaatggaaaagccccaattgtggcttatgctgaactaattgctgctcgtattgtgaatgcgttagctcctaactccatagctattaagttggtggacgataagaaagcacctgctgccaagctcgatgatgctactgaagatgtcttcaacaagataactagcaaattcgccgccatcttcgataatggtgataaagagcaagttgctaaatgggttaatctggcccaaaaggaattagttatcaagaactttgctaaattatcacaatcattggaaacactagattctcaattgaacctaagaacctttattcttggcggcttgaagtattctgctgctgatgtagcatgttggggtgctttaagatctaatggtatgtgcggttccatcatcaagaacaaggttgatgtcaacgtttctcgttggtacactttgttagaaatggatcctatcttcggcgaagctcacgatttcttgagcaaatctttactagaattaaagaaaaatgctaatgtgggtaagaagaaggaaactcacaaggctaactttgaaattgatttgccagatgccaaaatgggtgaagtcgtcactcgtttcccacctgaaccttctggatacttacatattggacatgccaaagctgccttgttgaaccaatattttgctcaagcttacaagggtaagttgattattagattcgatgacaccaacccatcgaaggaaaaggaagaattccaagattctattttggaagatttggatttattaggaatcaagggtgatagaataacctactcatctgattacttccaagaaatgtacgactactgtgttcaaatgatcaaggatggtaaagcttactgtgacgacactccaactgaaaagatgagagaagaacgtatggatggtattgcttctgccagaagagaccgttctgttgaagaaaatttaagaatttttaccgaagaaatgaaaaacggtactgaagaaggtttgaagaactgtgttcgtgccaagatcgattacaaggctttgaacaagactctaagagatcctgtcatttacagatgtaatctaactcctcaccacagaaccggatcaacttggaagatctacccaacttatgatttctgtgtcccaattgttgatgctattgaaggtgttacccacgctttacgtaccattgaatatagagaccgtaacgctcaatatgattggatgttacaagctttgcgtttgagaaaagtccatatttgggatttcgctcgtatcaatttcgttagaaccttgttgtctaagagaaagttacaatggatggttgacaaggacttggtcggaaattgggacgatccaaggttcccaactgtcaggggtgtgagaagaagaggtatgactgtcgaaggtttgaggaacttcgtcttatcccaaggtccatccagaaatgtcattaacttggaatggaacttgatctgggctttcaacaagaaggtcattgatccaattgctccaagacacactgctatcgtcaacccagttaaaatccacttggaaggctccgaagctccacaagaaccaaagattgaaatgaaaccaaaacacaagaaaaacccacctgtgggcgaaaagaaagtcatttactacaaagacattgttgtcgacaaagatgatgctgacgtcatcaatgttgatgaagaagtcactttaatggactggggtaatgtcattattactaaaaagaatgacgatggctctatggttgccaaattgaatttggaaggtgatttcaaaaagaccaagcacaagttgacttggttagctgatactaaagatgtcgtccctgttgatttagttgacttcgaccatttgattaccaaggacagattggaagaagacgaaagtttcgaagatttcttgactcctcaaacagaattccacacggatgccattgctgacttgaatgttaaggatatgaagattggtgatatcatccaattcgaaagaaagggctactacagattggatgctttacccaaggatggtaagccatatgtcttttttaccatcccagatggtaaatctgtcaacaagtatggtgcaaagaaataa

SEQ ID NO: 76507 - DNA, 1677 bp, Saccharomyces pastorianus
atgtctgatttagatgaggatttattagccttggctggtgccgatgaatccgaagaagaagatcaagttttgacaactacatctgccaaaagggcaaaaaacaacgaccaatctctttccaagaaaaggagaattgaagtcggcagtgtagaggatgatgatgaggaggacgattataacccttactctgtaggaaatgcagactacggttccgaagaagaagaagaagctaatccttttcccttggaaggaaagtacaaggatgagagcgacagagagcacctggaatccttacctgaaatggaacgtgagactctattatttgaaagatctcaaatcatgcagaagtaccaggagaggaaactttttagagcacgtggaagagatatgaaggaacaacaacagagagccaagaacgacgaagattccagaaagaccagagcttccactagatcaacccatgctactgggcattctgataccaaggcttcaaaactttcgcaattaaagaaacaaagggcgaggaaaaaccgtcactacagcgataatgaagacgaagacgatgaggaagattacagggaagaagactacaaggacgatgaagggagtgaatacggggatgatgaagaatacaatccttttgatagaagggatacatacgacaaaagagaagaagtggagtgggctgaagaggaggacgagcaagacagagagcctgagatttctgatttcaacaaactaaggatcggtcgttcatttgtcgcaaaattttgtttttatcccgggtttgaagatgcagtcaaaggttgttatgggagagtcaatgttggcacagataaacgtaccggcaaaacttcttaccgtatggtgagaattgagagagttttcttgcaaaaaccttacaatatgggtaagttctatactaaccagtatttcggtgttacccaaggtaaagacagaaaggtttttcaaatgaattattttagtgatggtttgtttgccgaagacgaataccaaaggtatctcagggcattggataattcgcaaatgattaaaccttctttacattctttgagtaacaaaacgaaagaggttatggattttgtcaatacaccattgactgataaaactacagatgaggttgttcgccataggatgcaattcaataaaaaactatctggtacgaatgcagtcttggagaaaactgtattgagagaaaaattacaatatgccaaggagactaataatgaaaaggacattgcaaaatactctgctcagttaagaaactttgagaaacgaatgtctgtatacgagaagcatcatgaaaatgaccaatctgacattaaaaaactaggcgagttgacctctaagaatagaaaattgaatatgagtaacatcagaaatgcagagcatgtgaaaaaagaagacagtaataactttgattcaaagagcgatcctttcagcaggctaaaaaccaggaccaaagtttactatcaggagatacaaaaggaagaaaacgcaaaagctaaagaaattgcacaacaagaggagctacaagaagataaagatgctaaagataagcgtgagaaagagctacttgtggcacaattcaggcgccttggtgggttggagcgcatggttggtgaattggatatcaaatttgaccttaagttttag

SEQ ID NO: 76508 - DNA, 1203 bp, Saccharomyces pastorianus
atggtttcgtgccaaggaacaaggccatgcatagtaaaccttctcactatgccaagtgaggataaattgggtgaagagatatcaacgagggtgattaatgagtattcaaaactaaaatctgcctgcagaccaataattaggccttcaggtatcagagagtggacaatattggcaggtgttgcagctattaacagagatggcggtgcgaataagatagaaatactttccatagctactggtgtgaaggctttgccagattcagaactacaaagaagtgaggggaagattctgcatgactgtcatgcagaaatactggcattacgaggtgctaatacagttttattaaaccgtattcaaaactataatccatcaagtggtgataaattcattcaacataatgacgagatacctgccagattcaatttaaaggaaaactgggagttggcattgtacatctcgagattgccctgtggtgatgccagcatgagtttcctgaatgataattgcaaaaatgatgatttcatcaaaatagaagatagcgacgaatttcaatacgtcgaccgtagtgtgaaaacaatattgaggggacgcttgaatttcaatagaagaaatgtcgttaggactaaaccaggaagatatgattccaatatcactttatctaaatcctgttctgataaattattaatgaaacaacggtcgtcggtactgaattgtttaaattatgaactctttgaaaaacctgtatttttaaagtacattgtgattcctaatttagaagatgaaacgaaacatcatctagagcaatcatttcacactcgtctaccgaatctagataatgaaattaaattcctgaattgcctcaaaccattttatgatgataaattggatgaggaggatgttcctggtctaatgtgtagtgtcaagctctttatggatgactttagcaccgaagaagcgattcttaatggcgtgaggaatggattttataccaaatcatcgaaaccactgaggaaacactgtcaatcgcaagtaagccggtttgcacaatgggaactattcaaaaaaataagaccagagtatgaaggaataagctatttggaatttaaatctcgtcaaaaaaagagaagccagttaattatcgcaataaagaacattttatctcccgatggttggatacccaccagaacggatgatgtgaagtaa

SEQ ID NO: 76509 - DNA, 546 bp, Saccharomyces pastorianus
atgaatactgaaggtgcttctttaagtgaacaattgctggatgcagctagaagaaacaatctggatcttttggagaccgtatttgatagcttagataatgatcctgagaagattgcaaagctaattaacgaatccaaagaaccactggggaatacagcgttacatttatgttgtaagtatggatcctgggaagttctcgacaagattctcgatcaagacggtgaaatcgaaatagacccacaaaacgacgttgatggcgacactccgttacatgttactgtcagatacagtcaagaggaacctgagcatggaacttttattgctagaaacttaattgaagtgggtgcggatcctagggtgagaaactataacaatcaaaagccagttgatttggttcatggtgatgaactggatgaattaattgaccttttgcagggtgccgagttagcgattgatagtaccaatggatcaggtgataacaatgaggatggggaaatgatagatgatggtccatctgacgatgacgaagaagatgataaaaaatga

SEQ ID NO: 76510 - DNA, 3015 bp, Saccharomyces pastorianus
atggatattaatgaattgataataggtgctcaatcagctgataaacacactagagaagttgcggaaacgcaattgttacagtggtgtgattccgatgcatctcaagtgtttaaagcgctggcaaacgttgccttacagcacgaagcttctctagaatcgagacagtttgctttattgtcgttaagaaaattgatcaccatgtattggagtccaggatttgaatcataccgttctacatcgaacgtcgaaatagatgttaaagattttatccgagaagtgctactgaaattatgcttaaatgacaatgaaaataccaaaataaaaaatggtgcatcttactgtattgttcagatatctgcggttgattttcctgatcaatggccgcagcttttaacagttatttatgatgctatctctcatcagcattcattaaatgcgatgtctttattgaatgaaatttacgatgatgtcgtatctgaagaaatgttctttgaaggcggaattggcttggcgacaatggagatcgttttcaaagtactcaatacagaaacttctactttgatagccaaaattgctgctttgaagctacttaaagcatgtcttctacaaatgagctcccataatgagtatgatgaggcgtcacgaaaaagttttgtctcccaatgtttagctacttctttacagatattgggacaattgttgactttgaattttggaaacgtagatgttatttctcagttgaaatttaaatccattatatacgagaatttggtttttattaaaaatgatttctctagaaagcatttctcaagtgaattacaaaaacagttcaaaataatggcaatccaagatctggaaaacgttacccatataaatgcaaatgtcgaaactactgaaagtgaaccccttttagaaacagttcatgattgttctatttatattgtagaatttttgactagtgtttgcactttgcaatttagtgttgaagagatgaacaaaattataacatctttaaccattctttgtcagctaagttctgagacaagagagatatggacaagcgatttcaatacatttgtatcgaaggaaacaggcctagcagcatcatataatgttagagatcaagccaatgaattttttacttcattacccaatcctcaactttccctaattttcaaagttgtttccaacgatatagaacacagcacgtgtaattattcaactttagaatctttactatatctcttacagtgtattttgcttaatgatgatgagataactggtgaaaatatcgatcaatctttgcaaattttaataaaaacgttagaaaatatcttagtatcacaagaaataccagaattaatattggcgcgtgcaattttgactattcccagagtactagacaaatttatagatgcattacctgatatcaaacccttgacatctgcattcttggcaaaaagtcttaatttggcgctaaaatctgataaagagctcattaaatccgcaacattaatagcatttacgtactattgttattttgccgaactagattcagtccttggaccagaggtctgctcagaaacccaggaaaaagtaattcgaataatcaaccaggttagtagtgatgccgaagaggacactaatggggctttaatggaagtattaagtcaagtcattagctacaatccgaaagaacctcattcaagaaaggaaattttacaggctgaatttcatcttgtgttcacgatctcatccgaggatccagcaaatgtacaggtcgttgtacaaagtcaagaatgcttggagaaactattggataatatcaatatggataattacaaaaattacattgaattatgtctcccatcatttattaatgtgctagattccaacaatgcaaacaattatagatactcacccctgctatcattagtcttggaattcatcacagtttttttgaagaaaaaacccaacgatggatttttaccagatgaaataaatcaatacctatttgaaccattagcaaaagtattagcgttctctactgaagatgagaccctacagctagccacggaggcattcagctacctgattttcaacacagatacacgagctatggaaccaaggttaatggatatcatgaaggttctagaaaggctgctgtctttggaggtatcggattcagccgctatgaacgtcggtccattggtagttgccatattcacaaggttttcaaaggaaatccaaccgttaataggaagaattttggaagccgttgtggtaaggttaattaagacacaaaacatttctactgagcaaaaccttctttctgtattatgcttcttaacgtgtaatgatcctaaacaaacggtggattttttgtctagtttccaaattgacaatactgatgctttgacattggtgatgcgaaaatggatagaagcctttgaagtcattagaggtgaaaaaagaatcaaagaaaatatcgttgctttgagcaaccttttcttcctgaacgacaaaaggctacagaaagtggttgtcaatggtgacttgataccatacgaaggggacctgatcattacaagatcaatggctaagaaaatgccagacaggtatgtacaagttccactttataccaagatcattaaattgtttgtttctgagttaagcttccaaagtaaacaaccgaatccagaacaattgatcacaagcgatattaagcaagaagtggtaaatgctaataaagatgacgacaatgatgattgggaagatgtagatgatgtactcgattacgataagttgaaagaatatattgatgatgatgtcgatgaagaagcagacgacgattcagacgatataacgggactcatggacgtgaaggaatctgttgttcagctactggtaagattctttaaagaggttgcaagcaaagatgtgagtggcttccattgtatttacgagactctatccgacagtgaacgtaaagttctttcagaagcccttttgtag

SEQ ID NO: 76511 - DNA, 852 bp, Saccharomyces pastorianus
atgcggcaaaataagcgccgtctatataaaagaaagaaagtgttaaataaactgaccacagaaggtggcaaaaataatacgagatttagaagtcagataatggacccgattggaataaacaaagtcttggaccatttagcaccctcagagcttatcaaacctgttaagagttgccataataaaccttcagtgttggtgttggatgacaggattgtggatgcggcaaccaaagatctctacgtgaatgggttccaagaagagattcagtatcagaatcctacaccggagaacttgcaacatatgttccaccaaggtattgaaatattggattcggcaaggatgatcaacgtgacacatttagcgctttggaagccttcttcttttaagttggggaatcctgtggactttgctctagatgataactacgatacgttttggcagagcgatggagggcaaccacaccaattggacattatgtttagtaagagaatggacatctgtgtcatggcaatattcttttcgatgattgcggacgagtcctatgctccaagcttagtgaaagtttacgcggggcatagtccttctgatgcgaggttttataagatgcttgaagtgagaaatgtgaatggctgggtggcactaaggtttctagataatagggaggacgaccagctgctgaaatgtcaattcatcaggcttttgtttccagtcaaccatgaaaacggaaaagatacacatctgagaggcataaggctatatgttccatctaatgagccacatcaagatacccatgagtgggcacagaccctcccagaaactaacaatgtcttccaggatgctatattacgttaa

SEQ ID NO: 76512 - DNA, 2883 bp, Saccharomyces pastorianus
atgtccgatttggaaaccgtagctaaatttctggccgaatcagttattgcttctaccgctaaaacttcggaaagaaatttgaggcagttggagacgcaagatggattcggtttaactttattgcacgttattgcttccacaaacctgccgttatccaccagattagcaggtgctttgttcttcaaaaatttcatcaagcgcaagtgggtagatgaaaatggtaatcatttgctgccggctaacaacgtagaactgatcaaaaaggaaatcgttcctttaatgatcagtctaccaaataatttgcaggtccaaataggagaggcaatttccagtattgctgactctgattttcctgataggtggcctacacttttgagtgatttagcttccagattgagtaatgatgatatggtgacgaataaaggtgtccttacagtggcacattctatttttaaaagatggagacctttatttagatcagatgaactttttttggagattaaattggttcttgacgtgtttactgctccatttttgaacttattgaaaacggtcgatgaacagataacagcgaatgaaaataacaaggcatcgctaaatattttatttgatgtattgctagtattaattaaactatactacgattttaattgtcaagatataccagagttttttgaggataacattcaagtgggtatgggtatcttccataagtatttgtcatattctaatcctttattggaagaccctgacgaaactgaacatgcgtctgtcctaataaaagtaaagtcctctatccaggagctggttcaattgtacacaacaagatatgaagatgtctttggacctatgatcaatgaattcatacaaataacttggaatcttctgacctcaatttcaaaccaacctaaatacgacatcttagtatccaagtccttgtcatttttgactgcagtaacacgtattccaaaatactttgaaatattcaacaacgaatctgccatgaataatatcacagaacaaatcattctgccaaatgttacactacgtgaggaagatgttgaactttttgaagacgatccaattgaatatatccgtagagatttggaaggttcagataccgacactagaagaagggcatgtactgatttcttgaaggaattgaaggaaaaaaatgaagtgttagtcacaaatatttttttggcgcatatgaaagggttcgttgaccagtacatgagtgatccatccaaaaattggaaatttaaagatctttatatttatctattcactgcattggccattaatgggaatattaccaatgccggtgtttcatccacaaacaacttactaaatgttgtagattttttcaccaaggaaattgccccggaccttacttccaacaatattcctcatattattttgagagtggatgccataaaatatatctacactttcagaaatcagttgaccaaagctcagttgattgaactaatgcccattttggccaccttcttacaaacagatgaatatgttgtctacacgtatgctgccattactattgaaaaaattttgactattagagaatcaaatacgtctcctgcttttatttttcataaggaagatatttcgaatagtacagaaattcttttgaaaaatcttattgcattaatcttgaagcatggcagctcccctgaaaaactagctgaaaacgaatttttaatgagatcaatctttagagttttgcagacgtcagaagattccattcaacctttatttcctcagttgttggcacaatttattgaaattgtaacgataatggcaaagaacccatcaaatccaagatttactcattacacttttgaatctattggtgccatcttgaattacactcaaagacaaaacttaccactacttgtagattctatgatgccaacatttttaacggttttctccgaggatattcaagaattcattccatatgtgttccaaatcatcgcatttgttgttgagcagtctgcaacaattccagaaagtatcaagccgttggcacaacctttattagcaccaaatgtatgggaattgaaaggtaatattcctgccgtgacaaggctactaaagagttttataaagacagattcatcgatcttccccgatctagtccctgttttaggtatttttcaaagattgatcgcatcaaaggcttatgaagttcatgggtttgacttattagagcacatcatgcttctaatcgacatgaaccgcttgagaccatatattaaacaaatcgcagttttattattacaaagattacagaactctaaaacagaaaggtatgttaaaaaattaacggtattttttggtttgatatctaataaattaggctctgattttttgatccactttattgacgaagtgcaagatgggctttttcaacaaatatggggtaattttattattaccacattacctactattggtaacctgctagatcgtaaaattgcattaattggtgttttgaacatggttataaacggccaatttttccaaagcaaatatccaactttgatttcaagcacaatgaattccattatagagacagcatcatcacaaagtattgcaaacttgaaaaacgattatgttgatttagataacttggaggaaatctccacgtttggttctcatttcagtaagttggttagtattagcgaaaaaccattcgatcctttgcctgaaatcgatgtcaataatggtgtgagattatatgttgctgaagcactaaacaaatataatgctatctctgggaatacatttttaaataccattttgcctcaattgacccaagaaaatcaagtaaaattaaatcaattattagttggtaattaa

SEQ ID NO: 76513 - DNA, 801 bp, Saccharomyces pastorianus
atgtcagcagacgaaacggatgcgaaatttcatccattagaaacagatctgcaatctgatacagcggctgcaacatcaacggcagcagcttcacgcagtccctctcttcgagagaagcccatagagatgcccttggatatgggaaaagcgccttctccaagaggcgaagatcaacgggttacaaatgaagaagatttgtttttgtttaacagattgcgggcatcacagaatagagttatcgactccttggaaccacaacaacagtcacagtatacatcttccagtgtcagtacgatggaaccatctgccgactttactagtttctctgcagtgactactttaccgcctcctcctcatcaacaacaacagcaacaacggcagcagcagcagcagcagcagcaattggtggttcaagcccagtacacccaaaatcaaccaaacttgcaaagcgatgttttaggaaccgctatagcagagcaaccattttatgttaatgccaagcagtactaccgaattttgaaaaggcgatatgcaagagctaaactagaggaaaagctacgaatatcaagagaacgaaagccatacttacacgaatctcgacataaacatgcgatgcgaagacctcgtggtgaaggtgggaggttcttgacagccgctgagatcaaagccatgaaatcgaagaaaagtggggctagcgatgatcctgacgatagtcatgaggataaaaaaatcactactaaaataatacaagaacagccgcatgctacttccaccgcagctgcagcagacaataaaacatga

SEQ ID NO: 76514 - DNA, 537 bp, Saccharomyces pastorianus
atgaccttgtggccacatccggggtcatacaagatcaagtcagcaactttgttctgcagcagagacaagttggggtgtgctttcttgtcggaaagttccctttgcatgtatttcttatataactctctgtctatctgggctctgggcccccacacagcaggacccttgcttctgttcagcattttgaattgcactccagcgagatcagttactttgcccatcagcccatcgagagcgtcgatttcctttacaaggatgcccttacccactccaccaatagaggggttgcacgaacacttaccaatatctgttaacgatggtgtaatgagagtagtatgcgcaccagtcctagatggcgcagctgcagcttcgcagcctgcatgtccagcaccgatgaccacgacctgtgtcttggttgtgggttggaagcttgtcaaagaagatatggtcaaccgcctcctgaggacctgtaagggaaatgaagtacacgaagacgccaaggttgttacacgcagcatcgttctttggggcgtttag

SEQ ID NO: 76515 - DNA, 2409 bp, Saccharomyces pastorianus
atgctcaacattctcgttttaggaaacggtgcaagagaacacgttcttgtcaccaagctggctcagtcacccaccgtgggtaagatctatgtcgctccaggtaatggagggaccgcaaccatggatccttcgcgtgtgataaactgggatattacgccagatgtcgccaattttgctcgtttgcagtcgatggctgtggaacataagatcaacttggtcgttcctggtccagaattacctctagtcaacggcatcacctccgtgttccatagcgttggtattcccgtttttggaccttccgtcaaagccgctcagttggaagcttccaaggctttctccaagagatttatgtcaaaacacaatattccaaccgcgtcttatgatgtcttcactaatccagaagaagccatttcattcttgcaagctcatactgacaaagcttttgtcatcaaggccgacgggatcgctgctgggaaaggtgttattatcccatctagcatcgacgagtccgtccaagctatcaaggacataatggtcaccaagcaattcggtgaagaagcgggcaagcaggttgtgatagaacaattcttggaaggtgatgaaatctctctactcaccattgttgacgggtactctcacttcaatctccccgtcgcacaagatcacaagaggatctttgatggcgacaagggcttgaacaccggtgggatgggtgcctatgcccccgctcctgtggccacaccatctttgttgaagaccatagattcacagattgtgaagcctacgattgatgggatgagacgtgatggtatgccctttgttggtgtgctgttcaccgggatgattttggtgaaggattctaagacaaatcaacttgttcccgaagtgttagaatataatgtcagattcggtgacccagagacacaggctgttttgagtttacttgatgatcaaaccgatttggcgcaagtgtttttggctgctgctgaacatcgtttggattccgtaaacataggaatcgatgacacaagatctgccgttactgtcgtagtggctgcaggtggttatcctgaatcatacgccaaaggtgacaaaattaccttggataccgataaattacctccacatacacaaatcttccaagcaggtaccaaatacgattccgccaccgattctttattgaccaatggtggtagagttctttctgtgacctccactgctcaggacttgagaacagcagtagatacagtatatgaagccgtcaaatgcgtccatttccaaaattcttactacagaaaggacatcgcataccgtgcgttccaaaactcagaatcatcaaaagttgccatcacatacgcagactcaggtgtctctgttgataatggtaacaatctcgtacaaactatcaaagaaatggtcagatccacaagaaggccaggtgcagactctgatattggtggttttggtggtttattcgatttggctcaagcaggtttccgtcaaaacgaagataccttactagtaggtgctacagatggtgtcggtactaaattaatcattgcccaagagaccgggattcataatactgtcggtattgacctggtggccatgaatgttaacgatttggtggtacaaggtgctgagcctctattctttttggactactttgccactggtgctcttgacattcaagttgcctctgattttgtgtccggtgttgctaatggttgtattcaaagtggttgtgctcttgtgggtggtgaaacttcggaaatgcccggtatgtatccacccggccactacgatactaagggtaccgctgttggtgctgtattaagacaagatatcttgcccaagataaatgaaatggccgcaggagatgttcttctgggtctcgcctctagcggtgttcattctaatggtttctctttggttagaaaaattattcaacatgtagcattaccatgggacgctccatgtccatgggatgaatctaagacgttaggtgaaggtattcttgaaccaacaaaaatttacgtcaagcaattattgccatcaattagacaaagactactactaggtttagctcatataacaggtggtggtttagtagagaatatcccaagagctattccagaccacctacaggcccgcgttgatatgtcaacctgggaagtaccccgtgtcttcaaatggtttggtcaagcaggtaatgttccacacgatgacattttaagaaccttcaacatgggtgttggtatggttttgattgtcaagagagaaaacgtcaaggctgtttgtgattcattgactgaagaaggtgaaattatttgggagcttggttctttgcaagaaagaccaaaggatgcccccggttgtgtgattgaaaacggaactaagctttactaa

SEQ ID NO: 76516 - DNA, 2733 bp, Saccharomyces pastorianus
atggaccaagaaggccagccattgctttcaaaagattttcagcaggttttactggctactgcatccggaaacaattcatcgtggacagaaagggctgttctcaacaatgaaagtacagatgcagtgaaacacgaacctgcgctgggccaaaatgatgtgtttgatttagatcctttatcctttgataagtgggtaccttttttaagaagggctcttgataaaaatcaattggaccccgtaattgatgaattggaaaactcaattgaggataactttcaaggtctggaattgcaattattacaagattcccaaatgaatgataagctggaaacatctatagacgaaattgcaaacatccaaggtatggtgcaagacactttatccagtgaaatttccaaatttcaaataagattgagtgaatcagctaatgaactaattgtcaagaaacaaatgtatgttaataacaaaaaaatttcactaaaaatttcagaagcaacaattttaatcactaaggttgttagaatcttggaattatccagcaaatgtcaagaattgatcaccgaaagaaagtttttcaaagttttacaaaacttggatagtctggagaaattgtatctacaagaatttaagaattataatttccaatttttaattgaaatttacaattctataccatttttacagaaagtcaccaaggatgagtgtataaatttgataaggaattctctaaatttaaatttagggaagaacttgataaaagtggggcaagaattcgtggcaatttatgagaatgaattacttccgcaatggctcgaaacgagatctaaaatgaagttgacaaatttcaaatttaattcgcctatagagatctccatgagagatgaatcctttctagcaaagctaaacttgggtgaatttttccagttagatgactttcacgattctataatgatttttcaaaacttaaatgagttgagcgtcctctctggagagtttaacaaagaatatgaactgagaaagacaaaactaatgtatccattgatatggaagaagaataaaacagctgcatatcaaatggattcgttattacggggtacaggtactactcctggatcaaccgcgcatgacgtttccacagatgatcctttcacacaaagtctaaatttacactttttgcaggattactttttgaaaattctcggcttcttattatatgatattaatttgaataaagctacagaatttatcctcgttgataataactataattctacaaatgaattttgggatggactcatggacaggttgtcaccatatttgagttatttcatagatgagaagctgaaaacagaagaagacatgattaaattgaaagattttctttgtatttatgttgccattttagaaaatttcaaactgaacatcgaacctttatataaaattttggtttcaattttcgagaaattctgctctgtttccttgagagcttttgacgatgaatttcaaatcttgttaaacgatgatgattttatgcctttatccattaatgacaagacattatatgagaaagttttgaagatttgctggatgaaggagggcgaacacctctccctgccagatccaaccaacggagagccatttgctgtgactttgcctttttctccattatacccaatgacgtgtacacttgctaagaaaacatattctaaaataaccgcatttctttccatattttatcgtcatgagctacacactttgaataatattttggtcaaaacaatggacgatatatttaatgatatcgtcaataaaaaaattcgttctaaacttgaaagtacgtcgagagaagaaattgcacaaatcttagtcaatttagattattttatcatagcagcaaaagaatttagtaacttcatgacaagagagaatattttacaaaacccggatatggaaatacggttatcctcgataaaatatcttgcggaaagcagaaaattggcagaaacaaagttaattgaattaatcgattctaagatatcagatattcttgaaactattgaaattgactggcaaataacggaggtaaggcaagacccggatatctccatcattgatctggcacaatttttagaaatgatgtttgccagcacgctacaaaatttaccatacagcgtccaaacattattgattttccgtgaatttgactccttgacgagacaattcatggatctattattgcatgacacaccaagtacaattacacatgaaagcataatgaattttgaagttgatgtcaattatttagagagcattattcccagaattttcccctctacaccaggtactatagatagtaatggataccagtcgccaatgaccccttcgacgcctacatttccaaatgccaacggtgttgacgcaccaacattatttgaaaataatatcaaatcgctagaagctacatttatggagttgaggcagtgtatagagttattaaagactcagggaaaagattataatgaaccagaaataagattaagaaaatattcaagaattagacaggaagatgcggctcttttgttgagcaagattcagcacttcgtctcatctgtagaaggagctaacggcgatgacactagcgtaatggatagtagcagcatattcaactctgaatcagcgagtgtcattgactctaatacgagtaggatagccaaattttttaatagacgttaa

SEQ ID NO: 76517 - DNA, 573 bp, Saccharomyces pastorianus
atgagtgaacaggagccttacgaatgggctaaacacctattggacaccaagtatatcgaaaaatacaacattcagaactcaaacacattaccttcaccaccaggatttgaaggtaattcctctaaaggaaatgttacaagaaaacaacaagatgctacatctcaaactacttctttggcacaaaaaaaccaaataacagtattacaagtacagaaggcatggcaaattgcgttacaaccagccaaatctattccgatgaatatttttatgtcgtatatgtccggtacatccttacaaatcattcctataatgactgccctcatgctactctctggacccattaaagcaatattttcaacaaggagtgcattcaaaccagtgttgggtaataaagcaacacaaagtcaagtgcaaactgctatgttcatgtatatcgtattccaaggcgtcttaatgtacattggatacaggaaactaaattcaatgggtctcattcctaacgctaagggtgattggctaccctgggaacgaattgctcattataataatggattacaatggttttccgattga

SEQ ID NO: 76518 - DNA, 2460 bp, Saccharomyces pastorianus
atgtcactatggccctttggagagacgctgagtcattccggaattgattcgatacttgaagagtactatctaatttttcgtagtttggagggaaatgagacctcttcaactgacgacaagaagaatgagccttctatggagtcagagtccgaatttggtaccgagtctcgggataggagtgaccttaaccagtcatttattgataggatcttgttggaaacagctttgctggatgaactgaatggaggagccaacgacagactcgtcgacttcatttgcttgggatatttctatgacgaccgttcccagcaggtccgccacatggactacctagtggacatgttgatggcttacttgaaggacatagaccgcactggttatagaaccccatttcttttagagaattcattccatcaaacaggtgaatatgaagatcaggacgatgaagacccaatgctgtatgtcaacattatttccagtattttttgttcgaaaagtgcgcccatagtggaggcactcgtgcaaaataccccatttttgtcctctctgttcgaggttttccagtttgagaatattgaggcagaaaattgtcctatcttggctgttttccttaagattaacgaaactcttctgtttgaacagacatctagctatttggaatttttcaaatcgcaaccgaacattgtggacaagttcttatatcatattgaagtctcacccttggttgaatttctcattaaaatcatgctgactgatcaagttgaatcacctacgaacattattgacttcttgtatcaccaggatctgatacctaagtgtttgaatctcttggacaatagcaaatactcacctggtattcaaaacagtagcggagagcttctaaaagcactgatcagcatttccaccaattttaaactggatactttgtggatcggacctaaccgattgacaagacagcttgcctctccgcaatatgtcgaccaacttattaatataatcttatttcaaagaggccatgcaatgggagttaccgtatctattataattgagttgatcaggaagaataattccgactatgacgaagtagatttgttaagtaccaccatagtagacaatccgccttctcaaagagatccagtctatttgggccatttgttatataagctcactatgcatatggaagatttttatgcattactaattaaacttgaaaatgatgatgacgatgatcatgacactgcttcaaaagctcttccatctgttaagcatcatctactagaaaaccaattgcatgaatcattcaggcctttgggctttgaaagagtcaagattacagaattgatatcggaaatgttacactgttcaaatatgggattgatgaattcaaaaagaggcgaaaaaatagcacgtaccagagataaatgcagggacactcttgatcaaaactcgctagagaaagccatgaaaaatttgaatataaatgataatactattacttccaatacattagaagataaatgtaataataatgatagtaatgacagtaatgacaaccaaaaacaaaaaaaaaatattaaaaaaaagtttcatgataatgaattgtattctacttttgatacatctgatgaaaatattgatgatgatgatgatgatatgagttttgaaattccttacgtcagtgaaacgcaaaatttgaaaatacgtaaaaaccctaccattggagatttattcaaaattaaacttcatgaccttgggtttttgccaaagtttctacaattattcttaagatatccttggaataacttttggcacaacattgtatttgatattattcagcagatattcaatggtcgaatgggtttttcttataactcatttttggtctattctttgtttgatttcaaaaagtctacaagatttatcccaaaacctttgtacggcagcaaccaaaagttacctgttaaagacttccatattatctctgatttcattttacaaggccacaaggattcgtttgaattttacgaaaaagagaaaacaaatttaggttatatgggtcaattagtattaattgccgaagaaattgcgaagtattccaaaatttataagaccgatctaattgctccagatatatatgccttcttacaagatgaagtttggatgtcatattctagtgacatcttgaacgaaacaaggacaatgtgttcaataattcttggtggaggccagttctgtgccgaaagcgatgaaaatactaaccaggactttttggaaaaagctgatatgagtaaaccagctcatccatccacaatggatgagaatgaaattgatcacgaggaggatgttaagttgcatgataaagttgccgagctcatagatgaattgggtcaattaaccgaattagatattcatgataaaattaaagatgttattgttgatcatcattccgacttaaattga

SEQ ID NO: 76519 - DNA, 1734 bp, Saccharomyces pastorianus
atgggaaagctgataaagttaatcacgactctgacggtgttggtatcgttgcttcagtactgttgcgaattcaatagtgggagcatatcgtgtgaacgcacgcaaacgctttgccattataccaatccaagagtctggaacacctacttttcaagaaattgtgaattatacaaaaataaagttagtcccggtttcgatatagtggcgcgtaaatatgacacggctgtcaaacctgtcatcgatgacgctacagtaaaagtgaacaaggtcgctatacagcctgcattcaaggtcatccattcacaatgtaagaaatggaactgtggaaagtattaccaattggtccgctccccaatggtcaagactagacgatttttcttcgcaaaatacaatgcttttgtgaaacctaacatagacaaattctttactgcggagtttcgctctcatttgaaggaaagaattttaaagtgtaaaaatataggccattattactttactatcacttcaagatgcatcaaatccaaatacgactttattgttggtaatacagaggaaaaattaatgggaaagttcaagaataaggacacgcatggcattcatggttccgtcacacatgagccttcctcggaggacatggttttaaccgtaagtactatggagtctgacgaagaggagctaactacaacaagtactcaaacagtggttgaaacaattactttggaccaggaagaggctagcgctgttgctaatcatgcgcacgacgatgaggcttccacagacgttgaagactccacagacgtcaatgtcaatgaacaggctctgttgcaagaggattttgacatgtggaatgagactatattgcagaaaacacaagacgtcatacaactatttgaaaaggatgtttccaaatacatcaatggtaaattggttgaggaggccaaccactttaaagccaagtttcaatctttagatgataaatctaagaagttcttctccaagatttcgctagccattaacgatattgaatgtgtggaaggcattgatagtgaaactggcaagaaaattttcttcgataaatctggaagtactgagatttctcagtacataacaagagagttagttcgtgagtacttcaacgagacgcgctcgacgttagacgaactgacaaatgctatggagaaagatttgagcgaaatcactgatgaaatcgaaaaaaaagttaatgcaattagagaggaaaacgtcgaggtatttgaagaatggggtgatatcattgtgaatgaatggtccaaaagaatggcttatgtggatgttatcaacgctcacatgggtgcagatgatgacactacgcttgatgaagagaaagcaaagtcttctgttaactggaagaagtttttgaagggcaagaaacagatcatagaatctagagacaagctggctcaccattccgctgacttatcccgtgttaacgcgtttcggcaaaaagtgcaaaagaagatattatcgttcactcaagagagtggtgagtttttgtatattctaagatcgaaagccaacctgcaatttcaggaacgtgaaagaaaggaacgtgaaagaaaagagcgtgaaaaagctgctgcagaagagttccaaaggcagcaggagctattactacaacaggaagaagaagacgaagaagacgtatcctacacctctacttcgaccatcaccacaaccactaccatgacattgtga

SEQ ID NO: 76520 - DNA, 372 bp, Saccharomyces pastorianus
atgatgggacgaaacggtattcggctagcactgaaaagatctttcagcacttatcagccaccggtagtagagattacgaatataacgaagttatggcccactctacgacctgaagttagggatgaaatcaaggaatacttacgatggaggatgcaagaagattggagacatataccgctggaggagaccaaagcagcgtatttcttatcttatggaccctgtggtggcagatccaagggcaacgaatggaacgtagggtacacgggaatgcggatggtgttcaaccttgttttatttggcggtgcagcgactgcattttataattggaaacaagataaaaagctagaggaacaattaagggatcttgtataa

SEQ ID NO: 76521 - DNA, 1014 bp, Saccharomyces pastorianus
atgtctgaattgaaaacaggtcatgcaggccataacccttgggcttcagttgccaattccggtccgatctctattttatcctactgtggttcctccattttaatgacggtgactaacaagttcgtcgtcaatttgaaggatttcaacatgaactttgtcatgcttttcgtgcaatctttggtttgtactataaccttgattatcctacgtatactgggctatgcgaagttccgttcattaaacaaaacagacgccaagaactggttccctatttcctttttactggtcttgatgatctacacctcttcgaaggctttacaatacttggctgttccaatttacaccattttcaagaatttgactattatcttgattgcttatggtgaggttctcttttttggtggctctgtcacctccatggaattgtcatcatttttgttgatggtcctttcttctgtcgttgcaacttggggtgaccagcaagctgtggctgccaaggctgcttcattggctgaaggagcagccggtgctgttgcctcctttaacccaggttatttctggatgttcaccaactgtatcacttctgcattattcgttcttataatgagaaagagaattaagttaactaacttcaaggatttcgacactatgttttacaacaatgttttggctctacctattctattgctgttttctttctgtgtggaagattggtcttcagttaatttgaccaataacttttctaacgattcgctaactgctatgatcatcagtggtgttgcatccgtcggtatttcttactgttccggttggtgtgttcgtgttacttcgtctactacatattcgatggtaggggctttgaacaagctgccaattgccttgtctggtttgattttctttgatgctccaagaaacttcttatctattctctccatttttattggtttcctatcaggtattatttatgctgttgccaaacaaaagaagcaacaagcccaacctttacgtaaatga

SEQ ID NO: 76522 - DNA, 843 bp, Saccharomyces pastorianus
atgactgttgaatatactgcatccgatttggcaacctatcagaatgaggtgaacgaacaaattgccaagaataaagcacatcttgaatcattgactcatccaggttcgaaagtgacatttccgatcgatcaagatatttctgctacacctcaaaacccgaacttaaaagttttcttttttgatatcgacaactgtctctataaatcatccacgagaattcacgatcttatgcaacaatctatactgaggttctttcaaacacacttgaaactatcacctgaagatgctcacgttttgaataactcttactacaaagagtatggacttgccataaggggacttgtaatgttccacaaagtgaacgcactggaatataaccggcttgtggatgattccttaccactacaagatatcttgaaacctgatataccattaaggaatatgctgttgagattgagacaatcgggaaagattgataaattgtggcttttcaccaacgcttataaaaaccacgcaatacgttgcctgagattgttgggtatagcggatttatttgatggattgacatattgtgactactctaggacagatacgctggtctgcaaaccacatgttaaagcatttgaaaaagccatgaaggaaagcgggttggcaagatacgagaatgcttattttatagatgacagtgggaaaaacatcgagacaggtatcaaattgggcatgaaaacatgtattcatttagttgagaatgaagtaaatgaaattttggggcaaacaccagaaggcgctattgtcattagtgatatattggagttaccacacgttgtgtccgacctgttctaa

SEQ ID NO: 76523 - DNA, 528 bp, Saccharomyces pastorianus
atgtcgacggataccatgtatttcaacagctccaggctgttgccatcggctggcaggaacaagacaaataatctaatcaaacaaaaaactaggaataatcgtgcgaggggaaatgctgctaagaacgccaataataacaactatatcacagatataccacctcctcaaactcttcctaacggtcagaaacctaacttcggccattcttccaacaagaaaccatcatttaatcaaaagaagcactctccaccttcttccccttcctctacaactactttaggtaaaaaaaacagacagaataataaagaaacgccacgacagaacaacaaagatgatactcgtttactgagtcagaacctaaagaatctgcttctgaaccagaaacaatccccgcatggctctcaagggataataccaatgggttgtaatggcagtgccaaaaaactcagtcactcttatgcaggctccactttcgccactaatggtccaagggaggctaaaaacttgcccaaaccaagttttttataa

SEQ ID NO: 76524 - DNA, 867 bp, Saccharomyces pastorianus
atgagcagagctattactagagcacaattggacaaacttgtgcgtagcattaccaagttctaccctcaaaagtacgcagacaagagctgggacaatacgggtcttctcatcgattgttccactgcacaagtcaccactgccgatgcaaacgctaaaacaaaggtccttttgactgtagacctcacgaagtcagttgctcaagaagctgtggatgctaactgcaacgtaattgttgcttaccatccttttattttcccaagctggaacagattaagcccacatacaaacccacaacacgagacagctataaagctaatccagtacggaatatccgtatactgccctcacactgccgtagatgccgctcgtggcggtgtaaatgactggttggttaggggtttgaacaacggagagaacgtcgcaaagtcttatgccttggaaactgtaagtggcgaaactgacgacttgattggctacggtagattcgtagaattcaataaagacatctctttggagcaaattgtcaaaaatgtcaagcgtgttttacgggttccctatgtacaagtagcatctcttgctgctccatccgcatggaatcaactcaaaatcaaaaaagtcgctgtctgtgccgggagcggttctggcgtgtttaagcaactaaaagaggacgtagacctttactatacgggagaaatgtcacatcatgaagtactgaagtggaaagaaatgggcaagaccgttattgtttgcaaccactcaaatactgagcgtggattccttcaagacgttatgaagggcttgttgcaagatgagggccacgaagtagtcgtaagcaaaatggattgcgatcctttgactgttgcatag

SEQ ID NO: 76525 - DNA, 363 bp, Saccharomyces pastorianus
atgacaggtgaaagaattgaaaaggtgaaaataaatgacgaatttgcaaaatcacatttcctaacaactcagtggagagaaacaaagcgccaacgacactataagatgcccgttactgaacagggactccgcgagaggatagaatcagccataccgcaagtttaccatatcattgtgacggatctttcgtacggttgtggtcagtcgtttgatattgtggtggtcagcgacttctttcaaggtaaaagcaaactaatgaggagtcgtgcagtgaacaaggctgtgaaagaagagttgcaggagattcatgcctttagctgcaagtgctacactgaggaggaatggtctaagattgtggtatga

SEQ ID NO: 76526 - DNA, 1380 bp, Saccharomyces pastorianus
atgtcatttagattcaacgaagctgtgtttggtgataactctttcaatgaacgaatacgggaaaagttatctacggctttgaactcaccgtctaaaaagaaattagatatcttgaaaagcggaattaaggtacagaaggtggattttcctacaataccacagctagaaattctggacctagacattatcacgcagcccaagtctctggccaaggggatttgcaagatttcatgtaaggatgctatgttgcggatacagacagtcatagagtcgaatcttttattgattaacgaacaggatacacccagctttaccatgccccagctcatcaataatggatcgttcacaattcctataactatgacgttcagttccatcgagctagaagccatcacgaatatttttgtaaagaaccctggaattgggatatcctttaatgacgttgatttggattttaagtttgattgttctgtaaaaattctccaaagcaccattgagagaaggctaaaagagtccatgcatgtagtgttcaaggatgttcttccttctttgatcttcaacacgtcacagaactggttcaccaatcgcggcgagagcaccagtaccatccctggtaaaagagagcatcatcatcaacaaactacaatgtctaggaatgtaatcttggacggatcagattttcaagagctttctccaataaacatgctacgtctttcaagcattgtgtcgtcgaggtcaacactgtcactacattccactgtgatgaattctctttccgctatacctggttgcttggaaagacaaaacttgtacagatttatatcaaggatgccctctttaaacaattactactcttcgcaatcatttccacaaccaaagtcatcaaccgtatcatcaaaacaattggtaaagccattctactgttcccacaatctattacctaaaacagtgttagattccagccagtacgatttggctacgataaccaagattcagtctcgacttttcgataggagtaacagcaacgacgacaatgccaaaccaaggagaagaaagatcaaatgcaaaaagacccgcacaccatcgaacctacaatcacaaggagaacaggctgttgatgatagtactgctattgaaacagttacgtccacaccggtccaaacaccgatacccgagcttgaagaacaatctcccccatatttgaaaacaacagtatcgataagggataaatacgttataccagaaaaaatatcgctaaatttggactccaagaaagatacatctaaaaagaaaccgttttacttcataggtttgaactcgcaagaaccttcaaataactggaaatggggcatggaggatagccccccaccatatcattaa

SEQ ID NO: 76527 - DNA, 651 bp, Saccharomyces pastorianus
atggtactggtgctctcgccgcgattggtgaaccagttctgtgacgtgttgaagatcaaagaaggaagaacatccttgaacactacatgcatggactcttttagccttctctcaatggtgctttggagaatttttacagaacaatcaaacttaaaatccaaatcaacgtcattaaaggatatcccaattccagggttctttacaaaaatattcgtgatggcttctagctcgatggaactgaacgtcatagttataggaattgtgaacgatccattattgatgagctggggcatggtaaagctgggtgtatcctgttcgttaatcaataaaagattcgactctatgactgtctgtatccgcaacatagcatccttacatgaaatcttgcaaatccccttggccagagacttgggctgcgtgataatgtctaggtccagaatttctagctgtggtattgtaggaaaatccaccttctgtaccttaattccgcttttcaagatatctaatttctttttagacggtgagttcaaagccgtagataacttttcccgtattcgttcattgaaagagttatcaccaaacacagcttcgttgaatctaaatgacatgacgatgctgaagtttcttgcagttgtgttttttttgttataa

SEQ ID NO: 76528 - DNA, 342 bp, Saccharomyces pastorianus
atgagcattctatcatccacacaatccacaattttacgtataccctccggtctaattacttttctcctcagcaagctatttcttttgctccgcgtagaaccttcttcagcgtctatgtctatatcggagtcggagttattactcatgggtaatattaacgacgaatcccccaaaccgggaaagttagcttctgcaccactagcttcattgaccaatcttgttttttccattgacgtaaagggccttactcttatagctacgactatggaggattgtcttgtttcaggcacgttcatgttagtgtcaatagtatacagctggaaagaaaactcaagtagttaa

SEQ ID NO: 76529 - DNA, 1359 bp, Saccharomyces pastorianus
atggctaatactttcaagtattatcctgaaacgatgggtaattctagtggttatccaattagttggccttttccgaaaggttcggctacttctgctgttaatgttgctaggcaactgcctaaatatttaggtcatgttccctcgcaatcagttcatactcagttgccatccatggcttctttaggttacttcaatcagccaagttctacttactatgctcctcctgcaccacttcaacagcaccagcaaccacctatccttccccctccgggcctaatgtacactagtaacaataacagcaacgttattcctcctcctgtccaaatgattcgggatggacaacaacaaccacaacaatctaaccaagtaaatgggggcgtcagtgagaacttggactacgatatttctataatgtcaaaatttatcatggaaaatgcctttgttgccttcaacgcgaactatagtactgatgaccagaccactgatctttttttcaagggcatatcttctgtgttgaatgccacgagattgccttcagctactatttttttggctatagattatcttttcaagtatatcaataaattatctaatgggatacattcaattggtggcaattcgatcaatatcatttatcaaaatactatgattgcgttcatattagcaaacaagttcaacgatgataaaactttcaccaatagctcatggtcacaggcaacaggaatactgataaatgttatcaatgatttcgagagacaatggttgagaatatttaactgggaattgtatgatagtgcttttctttattttgagttcgtcaagaattttgagattttcaagcaaaatcaactcaaacctgctgtagcggttcctacgttattatctccaattgtcaacgttggtgatacgagaaacgtaaatttcaacttgaagcctacttccacaaacaacctattatctccagtttccaattatgaaacccccatgctgatgccgcataacatgttttcatcaccatcttatcagagtaactcaaggtctgaattttctagtatgaatggttattataactattacaactataatcagccaagattgaattactatcaacaattccccaatatatattcttcaccaatttcggaaactcagtttgattacgacttctacaatttcagtagtcaacaacaacagcaacaacaaaaacaacactcacttttacctgccgctccacaattacctccccctcacgtccataatcagtcttacggtcatcatcttggctggaagtcaatggatgacacaataaatcatccaagatttgagcgaaactactttccgtattcggcagtgtattag

SEQ ID NO: 76530 - DNA, 1194 bp, Saccharomyces pastorianus
atgtccaaagtgtttattgccacagcaaatgcaggtaaagctcatgacgctgatattttctcggtttctgcttgcaattcatttacggtaagttgttcaggtgacggttacttaaaggtgtgggataataagctgttagataatgaaaatccaaaagataagtcatattctcactttgtccataagtccggattgcaccatgtcgatgtcttgcaaactattgagagagatgcatttgaattatgccttgttgctaccacttcattttctggcgatttattcttctatcgtatcactagagaagatgagactaaaaaagttatattcgagaaattggatcttctagactcagacatgaaaaagcattccttttgggcattaaaatggggtgcctcaaatgacagactactttcccataggctggttgctacagacgtcaaagggaccacttacatttggaagtttcacccatttgcagatgagtcagattcttcaacactaaattggagccccacgttagaattacaaggcactgtcgaatcgcctatgactccaagtcaatttgccacttctgtggatatctctgaacgaggactaattgccacaggttttaataatggaacagtacaaatttcagaactatctacattacgcccgttgtacaattttgaatctcagcattctatgattaataattcgaattccatcagatcggtgaaattttctcctcaaggatccttattagccattgctcacgattcaaattcatttggttgcatcactctatatgaaactgaatttggtgaaagaataggctccttatccgtaccaacccatagctcgcaggcaagtctgggtgaatttgcacattctagctgggtcatgagtctatcgtttaatgattctggtgaaacattatgcagtgccggatgggatggtaaattgagattttgggatataaaaacaaaggaaagaatcactacattgaatatgcattgtgatgatattgaaattgaagaggatatcttagctgttgatgaacatggagattctttagctgaacctggtgtctttgacgtgaagtttttgaaaaaaggttggagatctggtatgggagctgatttaaatgaaagtttatgctgtgtttgtttagatagaagtatcaggtggtttagagaagctggcggtaaataa

SEQ ID NO: 76531 - DNA, 951 bp, Saccharomyces pastorianus
atggcagctaattctgtagggaaaatgagtgaaaaattaagaatcaaggtggacgatgttaaaatcaaccccaagtatgttttatacggtgttagtacaccaaacaagcgcctttacaaaaggtattccgagttttggaaactgaagacacgattggagagagatgtaggaagcaccatcccatatgacttccctgaaaagcccggtgtattggacaggatgtggcaaagaagatatgatgatccggaaatgatcgatgaaagacggatcggactagagaggttcctcaatgaattgtataacgatcgttttgattctcgatggagagacacaaaaatagcgcaagacttcctgcagttgtcaaagccaaatgtttctcaagaaaagtcacagcagcatctagaaactgctgacgaagtgggatgggatgagatgataagagatattaaattggatttagataaggagagtgatggcacacccagcgtgcgtggagcactaagggcacgtacgaagctccacaagttacgagagcgactagaacaggatgtgcaaaagaagtctcttccaagcacggaagtgactcgtcgcgccgctctattgaggtccttgctcaaggaatgcgatgacattggtacagcaaacatagctcaggaccgtggacgacttctgggggttgccaccagtgacaactcttcaaccacggaagttcaaggaagaacgaataacgatttgcaacaggggcaaatgcaaatggtgcgcgatcaagaacaagagttggttgcactgcaccgaattatccaggcacaacgtggattggccttagagatgaacgaggagctgcaaacacagaatgagctacttacagcacttgaagatgacgtcgataacactggtaggaggttacagatagccaacaagaaggctagacattttaacaacagtgcttga

SEQ ID NO: 76532 - DNA, 669 bp, Saccharomyces pastorianus
atgagcaacgaagattacggatacgactacgattatttatttaagatagttcttatcggcgactccggtgtgggtaaatctaatctgttgtcgagatttacaaccgatgaattcaacattgaatccaaatccacgattggcgtggaattcgctacaagaaccattgaagttgaaaacaagaagataaaagcacagatttgggacacggcaggtcaagaacgttacagggccatcacgtctgcgtactaccgtggtgctgtaggtgcacttatagtgtatgatataagcaaatcaagttcatacgaaaattgcaaccactggcttaccgaactgagagagaacgcagatgacaacgtggctgttgggttgatagggaacaaatcagatctggctcatttaagagcagtaccaaccgatgaagcgaaaaatttcgcaatggaaaaccaaatgttatttactgagacaagtgctttaaatagtgataatgtagataaagcatttagagaactgatcgtagccatcttccaaatggtaagcaaacatcaagtagacttaagcgggtcgggtaccaacaacatgggctctaatggcgctccaaagggtcctaccatcagcttaacaccggcaccaaaggaagacaagaagaaaaaatccagcaactgttgttaa

SEQ ID NO: 76533 - DNA, 1149 bp, Saccharomyces pastorianus
atgcctaaaaagcaaacgaatttcccagtagataacgaaaacagaccttttagatgtgatacctgtcaccgtggtttccatcggttagaacataaaaagagacacttgagaacacacactggggaaaaacctcatcattgcgcatttcctggttgtgggaaaagtttcagtagaagcgatgaactgaaaaggcacatgagaacgcatacagggcaatctcaaaggagattgaagaaagctagcgtacagaaacaggagtttttgacagtaagcggaattcctaccattgcatcgggcgtgatgatacaccaaccaataccgcaagtcctaccagcaaatatggccataaatgttcaggcagtaaatggaggtaacattatacacgctcccaatgcggtgcacccaatggtgataccaatcatggcccaaccagcccccattcatgcctccgctgcatctttccagcctgcaacttctcccatgccaatttctacatacactccagttccatcgcaatcattcacctctttccagagctctattggctccatacagtcaaatagtgatgtttcatctatcttctcgaacatgaatgttcgcgtaaacactccacgctctgtgccaaactctccgaatgatggatatttacaccagcaacatatcccacagcagtatcagcatcaaactgccagcccttctgttgccaagcagcagaaaacttttgcacattctcttgcatctgcattatctaccttacaaaaaagaacgcctgtaagtgccccttccaccactatagaatcaccatcctcaccaagtgattccagtcatacctctgcatccagcagcgctatctctttgcctttcagcaatgctccttctcagctcgccgtggccaaagaacttgagtccgtctatttagattccaatagatacaccaccaagactaggagggaaagagcaaaattcgaaattcctgaagaacaagaagaagataccaataacagcagcagtggtagtaatgaggaggagcacgagtcgctagatcatgaatctagcaaaagccgaaagaaattgtcaggcgtaaaattgccgcctgtacgtaacctactgaaacaaattgatgttttcaacggtcccaaaagagtttaa

SEQ ID NO: 76534 - DNA, 1248 bp, Saccharomyces pastorianus
atgggtactacgacaagtcatccagcccaaaaaaagcaaacaacaaaaaagtgtcgtgcacctatcatgagtgacgttagagaaaaacccagcaatgctcaaggctgcgaaccgcaagaaatggatgctgtgagcaagaaagttactgaactgagcttaaataaatgttcagattcccaagacgcggggcagccttcaagggagggatctattaccaaaaaaaaatcgacgttattgctgcgtgatgaggacgagcccactatgccaaagctatctgtcatggaaactgctgtggacactgactctgggtcttcgtctactagcgatgatgaagagggagatattattgcccagacgacagagcccaagcaagatgccagtcctgatgatgatcgctcaggccattcttcgcccagagaggagggacaacagcaaatacgtgccaaagaagcttcgggaggtccaagtgaaatcaagagcacattaatggttcccgtggagataaggtggcagcaaggtggttcaaaagtttacgtgacaggctcattcaccaaatggaggaaaatgatcggtttgatacctgattctgacaataatggctcatttcatgtgaagctaaggctgcttccaggcacacatagatttagatttatagtggataatgagcttagagtaagtgatttcctgcccacagcaactgatcagatgggaaacttcgtcaattacatagaagtcaggcaaccagaaaaaaaaccaactaacgaaaagataaggtccaaggaagcatattccatgcgacctcccaccagcgatcgatcctcaattgctctacaaattggtaaggatccagacgattttggtgacggatatacacggtttcatgaagatctttcacccagacctccgttggaatatacaacagacattcccgccgtgtttactgacccgtctgtcatggaacgatactattataccttggatcgtcagcaaaataatactgatacgtcatggctgacaccaccccaattacctcctcagttggagaatgtgatcttgaataaatactatgccacgcaagaccagttcaacgagaacaactcaggcgctctgcccattccaaaccatgtggtgcttaaccacttggttactagtagtattaagcacaatacgctttgtgtagcctccatcgttcgatataaacagaaatatgtcacccagattctttatacgcccatagagtcctcgtaa

SEQ ID NO: 76535 - DNA, 3108 bp, Saccharomyces pastorianus
atggaagagctgaatattgattttgacgtatttaagaaaaggattgaattgttgtattccaagtacaatgagtttgaaggttctccaaattcgctgctgtttgttttaggttcgtccaacgctgaaaacccgtaccagaagacgaccatattgcataattggttgctaagttacgaatttcccgctactttgattgcattagttcccggaaaggttattataattactagttctgccaaggccaagcatttacaaaaggcaattgatctatttaaagaccctgaaagcaaaattacgctggaattgtggcaaagaaacaataaggaaccagaacacaataaaaagttatttgatgacgttattgccttaatcaatagcgctggtaaaacagtaggtatccctgaaaaggactcttaccaaggtaaatttatgactgagtggaacccagtatgggaagcggctgtgaaggagaacgaattcaatgtcattgatatttcgctgggtctttctaaagtttgggaagtgaaggatgttaacgagcaagccttcctgtccgtttcaagtaaggggtcggacaaatttatggaccttttatccaatgaaatggttcgggcagttgacgaggagttgaaaatcaccaatgccaagttatcagacaaaattgaaaataaaattgatgatgtgaaatttttgaagcaattgagtcccgatttaagcgcattatgcccaccaaactacaaattcaactttgatttattggattggacctattctccaatcattcagtccgggaaaaagtttgatcttagggtttctgcccgttctaccaatgatcagttgtacggcaacggttgtattttagcttcatgtggtattcgttacaacaattattgttctaatattactaggacctttttgatcgatccatctgaagaaatggccaacaactacgattttctattaactttgcaaaaagaaattgtaactaacattctgaagcccggccgtacaccaaaagaagtttatgaatcagtaatagaatacatcgaaaaaaccaaacctgaactagtgcccaatttcaccaaaaacattggttcattgattggtctcgaatttagagattctaactttatattaaatgctaagaatgattaccgtaaaatccaacgcggtgactgctttaatatttcgtttggtttcaataatctgaaagattctcaaagtgctaacaactacgctttacaattagctgatacggttcaaattcctctcgatgaaacagagcctccacgcttcttaacaaattacaccaaagcgaaatcccagatatcattttatttcaataatgaagaagaagacaataataaaaagaaatcttcaccagccaccaaagtccctagtaaaccagacagaaattccaaaattttaagaacaaagttacgtggcgaagcccgtggtggtgccgaagacgctcaaaaggagcaaattcgtaaagaaaaccaaaagaagctacacgaaaaattggaaaagaatggattactcagatttagtgctgctgatgccaatggcccagatagtgaacctcgtcaatacttcaaaaaatatgaatcttatgttcgggattcacaactaccaaccaatattcgtgatctaagaattcatgtcgactggaaaagccaaacaattattctacccatttacggtaggccagtcccgtttcatataaattcatataagaatggttctaagaacgaagaaggcgaatatacgtatttacgtttgaacttcaattcaccgggatcttctggtggtatttctaaaaaagtggaggaattgccgtatgaggaatcagcagataatcaatttgtacgttcgattacactaagatctaaagatggtgaccgcatgagtgaaacctttaaacaaattgcagatctgaaaaaagaagccacaaagagagagcaagaacgtaaggcgcttgctgatgttgttcaacaggacaaattgattgaaaataaaactggaagaacgaaaagactggatcaaatttttgtgaggccaaatccagatacaaaacgtgtgcccagtactgtctttatccatgaaaatggtatcagatttcaatccccactaaggactgatagcagaatagacatattattctcaaacattaagaatctaatttttcaatcttgtaaaggtgaattaattgtcgtcattcatattcatttgaagaatccaattttaatgggtaaaaagaaaatacaagacgtccaattctatcgtgaagcttctgatatgtccgtcgatgaaactggaggtggaagacgaggtcaatccagattcagaagatatggtgatgaggatgagctggaacaagaacaagaagaaagaagaaaacgagctgcgcttgataaagaatttaagtattttgtagacgcaatcgcagaagcatcaaacggtttattgacggtggagaatacatttagagatttgggcttccaaggtgtcccaaatagatcggcagttttctgtatgccaactacagattgtttagttcaattgattgaaccaccatttttggtgattaacctagaggaagtcgaaatctgtattttagaaagagttcaatttggtttgaaaaacttcgacatggtttttgtttataaagatttcaataaacccgtcactcatatcaatacagttccgatcgaatctttagatttcttgaagcagtggttaacagatatggatattccttacactgtctcaacaatcaatttgaattgggcaactattatgaagtcattacaagatgatccatatcagtttttcttagatggtggctggaattttctggctactggttcagatgatgaagcatctgatgaaagtgaagaagaagttagtgaatatgaggcttcagaagacgacgtaagtgatgaaagcgcattctctgaagatgaagaaggatcagaggtggatgacgatattagtggtgatgaaagtgaggactatactggcgacgagagtgaggaaggtgaagactgggatgaattagagaaaaaggctgctagggctgataggggtgcaaactttagagattag

SEQ ID NO: 76536 - DNA, 4962 bp, Saccharomyces pastorianus
atgagtgacctacccattgaatttaccgaattggtcgatctgacgtccttaggaatttcccctcaattccttgacttcagatcaactactttcgagagtgaccacttcgtcactgttagagaaacaaaggacggtacaaactctgttgcaatcgtggatttggccaaaggcaatgaagtgacaaggaagaatatgggcggtgattctgctatcatgcatccatctcagatggttatttccgttagagcaaatggtactatcgtgcagatatttaatttggaaactaagagcaagttaaagtcttttactttagatgaacctgttattttttggagatggttgagtgaaaccactttgggttttgttaccgcaagatccatactgacctcgaacgtctttgatggtaacgtaaatgctaagcctcaattgcttaccttgagacacgctaacttgaacaatacccaaattatcaattttgtggctaacaaaaaccttgactggttcgcagttgttggtatcttacaagaaaatggccgtattgccggtagaattcaattattctcaaaacaacgtaacatctcccaagctatcgacggtcatgttgctatctttacgaatatattactagagggtaatggctcgaccccggtacaagttttcgttactggtaacagaaatgccaccaccggtgctggagaattaagaattatcgagattgatcacgatgcttcattgccttctcaatatcaaaagaaaactaccgatattttctttccaccagatgcaacgaatgatttcccaatcgctgttcaggtgtctgagaaatacggcataatttacctattaaccaagtatggcttcatccatttgtacgaattggaaaccggtaccaatttattcgttaatagaattacagcagaatctgtttttactgcagctccgtacaatcacgagaacggtattgcatgcatcaataaaaaaggtcaagttttagcagtagagatttctacttctcaaatcgttccatatatcttgaataaattatctaatgtggcactggccttaaccgttgctacaagaggtggcttaccaggtgcagatgatttatttcaaaaacagtttgaatctttattgttacaaaacgattatcaaaatgcagctaaagttgcagcctcttccacttctttaagaaaccaaaacaccatcaacaggttgaaaaacattcaagcaccaccaggcgccatttctcctatcctactttacttttcaacactattggataaagggaaactgaataaagaggaaacaattgaattggctagaccagttctacaacaagacagaaaacaattgttcgaaaaatggttaaaggaagataaactagaatgttcagaagaactaggtgacatcgttaagcctttcgatactactttagcactagcttgctacttaagagcaggtgcccatgcaaaagttatatcttgtcttgccgaattacaacagtttgaaaaaattattccttactgccaaaaggttggatatcaacctaactttttagtgctgatttcttctttgattagatcatcaccagacagagcttctgaatttgccgcatctctattacaaaatccggaaactgcttctcagatcgacatagaaaaaatcgcagatctattcttttcccaaaaccatatccaacaaggaacctctctacttctagacgcgttaaaaggagataccccagaccaaggtcacttgcaaactcgtgttcttgaagtcaatctactacacgcaccacaagttgctgacgccatattgggaaacaacatcttttctcattatgacaaaccaactattgcttccttatccgaaaaggcgggactataccagagagctttagaaaattacacggacatcaaagatatcaagagatgcgttgtccacaccaatgcattgcctatcgattggttagtcggatactttggtaagttgaacgttgaacaatctttggcatgcttaaaagctttaatggataacaatattcaggctaacatccagaccgtagtacaggtggcaactaaattctctgacttgatcggtccatctactttaattaaattattcgaagattataatgctacagaaggtttatactattacttagcctctttagtcaacctaaccgaagataaagatgtggtttacaaatacattgaagctgctgctaaaacgaagcaatacagagaaattgaaagaattgtgaaggataacaatgtctatgatccagaaagagtcaagaatttcttgaaggatgccaatctagaagatcagttgcctctagtcatagtttgtgaccgtttcgactttgttcatgaaatgattttatatttgtacaaatcgcagaacttaaaatttattgaaacttacgtgcagcaggttaacccttcaaagactgcccaagttgttggcgcattacttgatatggattgtgatgaggcatttattcaaagtctgctacaatcagtcttaggtcaagtccctattgatgaattaactactgaggttgaaaagagaaatagactaaaaatattgctacctttcctagaacaaagcttaagtcaaggtatccaggatcaagctgtttacaatgccttagcaaaaatttatattgattccaataattctcctgaaaagtttttgaaggaaaacgaccaatatgacaccttagatgttggtcattactgtgaaaaaagagatccctaccttgcatatattgcgtatgaaaaaggtcaaaatgatgatgacttgattagaatcactaatgaaaatagcatgtacaagtaccaggcaagatatttgttggaacgttctgatctcgatttatggaacaaagttttgaatcaagaaaatattcacagaagacaattaattgattcggtcatctccgttggtatccctgaattgactgatcctgaacctgtttccttaactgttcaagcattcatgaccaatggattaaaactggagctaattgagttactagaaaaaatcatattggaaccttctcctttcaacgaaaatgtggctttacaagggttgctattattgtctgctattaagtatgaaccaactaaggtttcaagctatatcgaaaaattagataactacgacgccgatgaaattgctccattatgtattgaacatgatttgaaggaggaagcttttgaaatctacgacaaacatgaaatgtacggtaaagctttaaaggttttaatcgaagacatcatgtctttagatagagctgcttcttatgctgataaaatcaatactcccgaattgtggtctcaaatcggtacggctcagttagatggattaagaatcccagatgctattgagtcttatattaaagcagaagacccatcaaattacgaaaatgtaattgatatagccgaacaagccggtaaatacgaagaattaattccatttttactaatggctagaaagactttgaaagaaccaaagatcgacggtgctttaatcttggcctatgctgaactaaacaagattcatgaaatcgagaacttgttggcaggttccaatgttgcaaacttagatcatgttggtgataaattattcgagaataaagggtataaagcggccagactatgttattctgctgtttctaattactccaagcttgcttctaccttggtttacctgggagattaccaggctgctgttgacactgctagaaaggcttcaaacattaaagtttggaaactggttaacgacgcttgtattgaaaagaaagaattcaagctggctcaaatttgtgggttgaacttgatcgttcacgctgaagaattagatgaactggtggaaaggtatgaatcaaacggctatttcgaagaactgatttcattgtttgaagctggtttgggacttgaaagagctcatatgggcatgttcactgaattggccattttgtattccaaatatgaaccagacaagaccttcgaacacttgaagctattctggtccagaataaatattccaaaggttattagagctgtcgaacaagctcacctctggtcggaattggtctttttatatgctcactatgatgaatgggataatgctgctttaacactaatcgaaaaatcaaccaaagacttggatcacgcctatttcaaagaagttgttgtcaaagtttctaacttagaaatttattacaaggccattaatttctacgtcaaatttcacccatcattactagttgatcttttgacctcattgacaccaagattagatattccaagaactgtcaaaattttctcgaaatccgacaacttgcctttaatcaagcctttcttgatcaatgtcttaccaaaaaataactcagttgtcaaccaagcctaccacgatctgatgattgaagaagaagattataaagctttgcaagacgctgttgattcttatgacaaatttgaccaattgggattggcatctcgtttggaatctcataagctaatttttttcaagaaaatagcagccctgttataccgtagaaataagaagtgggcaaagagtctttcaatcttgaaggaagaaaagctatggaaggacgctattgagacggcagcaatctctcaggatccaaaggtagtggaggctctactcacatatttcgttgaaaccggtaacagagaaggctttgttgctttgctatatgctgcttacaacttagtgagaattgaatttgttttagaaatatcatggatgaattctttggaggactacattaagccatttgaaatctccataaaaaaagagcagaatgattccattaagaaaatcaccgaagaactcgctaaaaagtccggatctaatgaagagcacaaagatggccaacccttgatgctgatgaacagcgcgatgaacgttcaacccacaggattttaa

SEQ ID NO: 76537 - DNA, 2247 bp, Saccharomyces pastorianus
atgacgagacgtactactattaatcccgattcggtggttctgaatcctcaaaaatttatccagaaagaaagggcggattccaaaatcaaagttgaccaagttaacacatttttagagtcatccccggagaggagaactctgacgcacgccttaatagaccaaatagtgaatgatcctatattgaagactgatacggactattacgatgctacaaaactgcaagagagagaaattactgccaaaaaaatagctaggcttgctagttatatggagcacgatatcaaaacagtgcgcaaacactttcgcgacactgacctgatgaaagagttgcaagcaaatgatccagacaaagcttcgcctttaacaaacaaagacctttttatattcgataagagattgtcacttgtagcaaatattgatcctcaattgggtacgcgcgtgggtgtacacttggggctatttggtaattgtatcaagggcaatggtactgatgagcaaatccggtattggttgcaggagagaggtgccactttgatgaaaggtatatatggctgttttgcaatgactgagttaggacatggttccaatgttgcccagctgcagactagggctgtgtacgataagcaaaatgatacttttataattgatacacctgatctaactgccaccaaatggtggattggtggggctgcccattctgccacgcacgctgccgtgtacgccagattgatcgttgaaggtaaagactacggtgtaaaaacattcgttgttcctctgagagacccttcgactttccaactgttagctggtgtttccataggggatattggagcgaagatgggtcgtgacggtattgataatggctggatccagttcagaaacgtagttatccctagagaatttatgctaagtagatttaccaaagttgtccgttctccagatggttcagtcaccgtcaaaactgagccacaattggatcaaatttctggttatagtgcattgttaagtggtagagttaacatggtcatggattcatttaggtttggctccaaatttgctactattgctgtacgttacgcggttggtcgtcagcaattcgcacctagaaagggattgtctgaaacacaattaatcgactatccccttcaccaatatcgtgttttaccacaattgtgtgttccatatttggtgtcacctgtagcttttaagttaatggacaactattattccactttggacgagttatacaacgcttcctcatctgcagacaaagctgctctggttaccgtgagtaaaaagttgaagaatttatttattgatagcgccagcttgaaagccaccaatacttggttaattgctacactgattgatgagttgagacagacttgcggaggacatgggtattcacagtataacggatttggtaaaggctatgacgactgggtggttcagtgcacatgggagggtgataataatgttttatctttaacttcagcaaaatcaatattgaaaaaatttatcgattcagccacaaagggtagatttgacaacacactggatgtggactcattctcttacttaaaacctcagtacataggatctgtggtttctggagaaataaagagtagtttaaaggagttgggtgattatactgaaatttggtctatcaccttaatcaaattactggcacatattggtactttagttgaaaaatcaagaagtattgatagcgtttctaagcttttagtcttagtatccaaatttcatgccttgcgctgcatgttgaaaacctattacgacaagttaaactctcgtgattcacatatttccgatgaaattacaaaggaatctatgtggaatgtttataagttattttccttgtattttattgacaagcattccggagaattccaacaattcaagatcttcactcctgatcagatctctaaagttgtgcagccacaactattggctcttttgccaattgtgaggaaagactgtataggtctgacagactcctttgaattacctgacgcgatgttaaattctcctataggttactttgatggcgatatctatcacaattacttcaatgaagtttgccgcaataatccagtggaggcagatggggcagggaagccttcttatcatgcgctgttgagcagcatgctcggtagaggtttcgaatttgaccaaaagttaggtggtgcagctaatgcggaaattttatcgaaaataaacaagtga

SEQ ID NO: 76538 - DNA, 306 bp, Saccharomyces pastorianus
atgaatggaactgatatccttcgttttttgcaatcttcccccaccattagttacagcaaacattttatacttataacagcatgccctctgtttgtattaggactattattgttaggtcttagaacagcaatgttcaaacaagtaagaggtaaaacgacaacaagtagaaatagaggtgtcattgcggcaaagttattagttgcatggtatcttgccaccatagttatgtatattgctaaaagcgaaatgtggaaatatgcctttgctgtttcgctacttcttaatagtttggcactatttttttga

SEQ ID NO: 76539 - DNA, 1503 bp, Saccharomyces pastorianus
atgactttacctgaatcaagagacttttcttacttgttttcggatgaaaccaatgctcgtaaaccatccccattgaagacctgcatccatcttttccaagatcctaacattatctttttgggtggtggcctgccattaaaagattatttcccatgggataatctatctgtagattcacccaagcctccttttccccagggtattggagctccaattgacgagcagaattgcataaaatacaccgtcaacaaagattacgctgataaaagtgccaatccttccaacgatattcctttgtcaagagctttgcaatacgggttcagcgctggtcaacctgaactgttaaacttcattagagatcataccaagattatccacgatttgaagtataaggactgggacgttttagccactgcaggtaacacaaatgcctgggaatctactttaagagtcttttgtaaccgaggtgatgtcatcttagttgaggcacattctttttcctcttcattggcttctgcagaggctcaaggtgtcattaccttccccgtgccaattgacgctgatggtatcattcctgaaaaattagctaaagtcatggaaaactggacacctggtgctcctaaaccaaagttgttatacactattccaacgggccaaaatccaactggtacttccattgcagaccatagaaaggaggcaatttacaagatcgctcaaaagtacgacttcctaattgtggaagatgaaccttattatttcttacaaatgaatccctacatcaaagacttgaaggaaagagagaaggcacaaagttctccaaagcaggaccatgacgaatttttgaagtctttggcaaacactttcctttccttggatacagaaggccgtgttattagaatggattccttttcaaaagttttggccccagggacaagattgggttggattactggttcatccaaaatcttgaagccttacttgagtttgcatgaaatgacgattcaagccccagcaggttttacacaagttttggtcaacgctacgctatccaggtggggtcaaaagggttacttggactggttgcttggcctgcgtcatgaatacactttgaaacgtgactgtgccatcgatgccctttacaagtatctaccacaatctgatgctttcgtgatcaatcctccaattgcaggtatgtttttcaccgtgaacattgacgcatctgtccaccctgagtttaaaacaaaatacaactcagacccttaccagctagaacagagtctttaccacaaagtggttgaacgcggtgttttagtggttcccggttcttggttcaagagtgagggtgagacggaacctcctcaacccgctgaatctaaagaagtcagtaatccaaacataattttcttcagaggtacctatgcagctgtctctcctgagaaactgactgaaggtctgaagagattaggtgatactttatacgaagaatttggtatttccaaatag

SEQ ID NO: 76540 - DNA, 3054 bp, Saccharomyces pastorianus
atgtcatccccttttccagctgacacaccaagcagtaatagaccttccaactcctctccgccaccatcgtcgataggtgctggcttcggaagcagtagcggactcgattcgcaaataggctctaggttacatttcccaagttcttctcaaccgcatgtcagtaattcacaaacaggcccttttgttaacgattccactcagtttagttctcaaaggttgcaaaccgatggttccgcgactaatgatatggagggaaatgaacctgccagaagcttcaaaagtagagctttgaatcacgttaagaaagttgatgacgttactggtgaaaaagtccgtgaagcgttcgagcagtttttggaagacttttccgttcaatccactgatactggtgaagttgaaaaggtttatagagctcaaattgaatttatgaaaatatatgacctaaacaccatttatatagattatcagcatttatccatgagagaaaatggtgctctagctatggctatctcagaacaatattacagatttttgccttttttacaaaagggtttaagaagagtagtaagaaagtatgcacctgaattgttaaacacaagtgactcattgaagagatccgaaggtgacgaaggtcaagcggatgacgatgagcaacaggacgatgatataaatgggtcgagtctaccaagagattctggatcatcagccgcaccagggaatgggacatctgccatggcaacgaggtcaataacaacttctacgtcacctgaacagacggaacgtgtttttcaaatcagtttcttcaatctaccaacagttcacagaattcgtgatataagatctgaaaagattggttcactattgagtatatcagggacagtgacaagaacatctgaggtccgtccagaattatacaaggcaagctttacgtgtgatatgtgccgtgttatcgtagataacgtagaacagtccttcaagtacactgaaccgacattttgcccgaacccatcatgtgaaaatagagccttttggacattaaatgttacaagatccagatttcttgattggcaaaaagtcagaattcaagaaaatgctaacgaaatacctacaggctccatgccgcgtacgctggacgtcattcttcgaggtgatagtgtcgaaagagccaagccaggtgaccgttgcaaatttacgggtgtggaaattgtagtacctgatgttacacaattggggctaccaggtgtgaagccaagttcaacattagatactagaggtatttcgaagactactgaaggtttgaatagtggtgttactggtttacgctctcttggtgttcgtgatttgacatacaagattagctttctggcatgccatgttatcagtattggatcaaacattggtgcaagtagccctgatgcaaattctaacaaccgagaaactgaactacagatggctgctaatttacaagctaataatgtataccaagataatgaaagagatcaagaagtattcttgaacagtttgagttcagatgaaataaatgagctgaaggaaatggtaaaggatgaacatatttatgataaattggtcagatctattgctccagctgtgtttggccatgaagccgtaaagaagggtatcttgcttcagatgctcggtggtgttcataagagtactgtagaaggtattaagttaagaggagatatcaacatctgtgttgttggtgatccttctacttctaagtctcaatttttaaaatacgtagtgggatttgcaccaagatcagtttacacttccggtaaggcctcgtcggctgctggtttaacagctgcggttgtgagagatgaggaaggaggtgattatacaattgaagcaggtgctttaatgcttgctgataacggtatttgttgtatcgatgaatttgataaaatggatatttcagatcaagttgccattcatgaagctatggaacaacagaccatctctattgctaaagctggtattcacgctactttaaatgcaagaacatcaattctagcggctgccaacccggtaggtggaagatacaataggaaactatcactgaggggtaatttaaatatgaccgcaccgatcatgtccagatttgatttattttttgttattcttgatgactgtaacgaaaaaattgataccgaattggcatctcatatcgttgacttacacatgaaaagagacgaagccattgagccgccatttagtgcagaacaactacgtcgttatatcaaatatgcacgtacttttaaaccaatattaacgaaaaaagcccgttcctatttagtcgagaagtataaggaactgagaaaggatgatgcccagggatttagtagatcgagttatagaatcacagttaggcaacttgaaagtatgattagattatcagaagctattgcgagggctaattgtgtcgatgaaattactccatcattcattgcagaagcttacgatcttttaaggcaaagtattattcgtgttgatgtggatgatgtggaaatggatgaagaatttgataacatagagagtcaaagtcacgccgcttctggaaacaatgatgacaatgatgatgggactgggtcaggtgtaattacgagtgagccaccagcagatatagaagaaggacaaagcgaagctacagctcgtccaggtacaagcgagaagaagaaaacaacggtgacgtatgataaatatgtgtccatgatgaacatgatcgttagaaagattgctgaagtagatagggagggtgcagaagaactaacagctgtggatatagttgattggtatttattacagaaggaaaatgatttgggttcgttagcagaatattgggaagagagaagattagcgttcaaagtcataaaaaggttggtcaaagataggattttaatggagattcatggtaccagacacaatttaagagatcttgagaatgaggaaaatgaaaataataaaactgtttatgttattcatccaaactgtgaggttttggatcaattggaaccacaggattccagctaa

SEQ ID NO: 76541 - DNA, 612 bp, Saccharomyces pastorianus
atggcctcatttgctactaagtttgtcattgcttgcttcctgttcttctcggcgtccgcccataatgtccttcttccagcttatggccgtagatgcttcttcgaagacttgagtaagggtgacgagctctccatttcgttccagttcggtgatagaaaccctcaatccagtagccagctgactggtgactttatcatctacgggccggaaagacatgaagttttgaaaacggttagggacacgtcgcacggtgaaatcacattgtctgctccatacaagggacatttccaatactgtttcttgaacgagaacaccggtatcgagacaaaagacgtgactttcaacattcatggggtggtatatgtggatttggacgacccaaacaccaatacattggatagtgctgtcagaaagttgtccaaattaaccagggaagtcaaggacgaacaaagttatattgtgattagagaaaggacgcatagaaatactgcagagtcgaccaacgatcgtgttaaatggtggtccatcttccaattgggcgtcgttattgcaaactctcttttccagatatactacttgagaagattctttgaggtcacatctctagtctaa

SEQ ID NO: 76542 - DNA, 471 bp, Saccharomyces pastorianus
atggagatgtacgaaatcagcgacaccctctggtgtggcttggtgagtctcagatgcaatgccatcaccagcaaaatgaaccaactagacacaaataggctcgagaacagcgaccgcgcatgcgatacaaatagagaatacaatatgataaacgcaaggggcgcccacaggtcgcaattggctgaaatgtcgttatcagccgcccctatcccgtcatcagaggggctaaaaaatgaggggaaatgcgggtataccacttgtttcagtctggaattaatctccaccacatctcgctttagtgtttgcagcacagtctcgtcgagcgtacctctgctgcctgaattctgcatagttccgcctatgttgtcagcaacacccccggaagcagccaaaggtgcatctggttctatgaagtcgggctcaatcgtagtgtcttctcttccgtatgacattttgcctgccctcttgtga

SEQ ID NO: 76543 - DNA, 4464 bp, Saccharomyces pastorianus
atgcctttattacaaccatccgcttgcttctgctaccctttgaagcttccgccattaccactggcttccgattccaacgagtttgatgaatgcgtcaggaaaaggttaacgctggactatagaacaggttcagcggtgacgctaacaaggtccaatatatttgtacatggtggtctaaccatcccgttgaacctgccagttgtaaattctatgcaattgcaaaaggagcttatcctcttttttgcaaaggaaaaaaacaacggtagttcttttaggaatttaaacgagtggataagtaaggagacgtttttcttagacttgatgtctagaacctggtacagagtcaagacttcctttgaccaaaggacagaggaattattaaaggcagagagctctagcgccaaagcagataatgacacaaacgagattaaaacggacattaagaaaggcaaatcccttgaatctccgctcaaggatagactattccattccttatgctatttagatggctgtttatatatatttggtggtctcacagtgtctcctcagagcggatatgagttgattgctaccaatgagttatggaaactggatttaaacacgaagaagtggtcgcttttgagtgatgaccctcagatagcgagaaggttcaaccataccatgcatgtaaagaacgaaaataacgataatagagacacgaaattaataattgtcggaggtcttaataacatggatcagccggtcaagaaaatagacatctataacatctcacagaattgctggcaatccgaaaccatacctaaacaaccgatggagatcactacaaatgtcaatggcataccattagcattatcaaaggatcagaatttttcgattttagttgaaaataatgaggccaacgttccaacgctggcattctatatgagaagtgatcaaatagacgaatatctcggaaagtatccatcaaagataaaggagaattcgcctatagtggcgttgccgctattgtctgaatcgcaaggtattagaatgccctcaaacccggcattaccgaaaaaactattgaatgttccgtatgagctattagcgccgacaggtgactattttggatttaatatcataatcggtgggtttcatccaaattaccaatcctctaactttcattgttttatatacgatattaactccggaaagtggtcacgagtcgctaccgcctgccctgactgcgatatcaataaacatcgattctggagggtatttgtttggaaatcgcatcatcagacgattttgttgggtaccaagactgatgattattattcgcccagtgtacaaagattcgaccatctttccacttttggattaccgctggtaaatatttttaacaagacgatccaactaccccatcacaggatctcagcttcgtctttaccaatacccatagaaaattttgcaaagcataaggatactcctttaaaaaaggtgagcttcacttcatcagctacctcccaatttgaaaactacattagatatatagctccgcccttggaaatgtcttctatccaatctgtgtttccaccgtatgccatggttctaggtaaagacgctttagagatttacgggaagcctctttctgattttgaatttattactagtgaaggtgactctattggtataccatgctatttgctgaggaaaagatggggccgttatttcgacatgcttttatcccagagttatacaaaagtttgtgctgattatgaaactactggtacgcaatctacactaataaaattttcaccacattcatctagaaacagttctaaagctgtgaggcaagaaggtagactctcttcatcgggttcactggacaattatttcgaaaaaaacttcccaatatttgcgagaacaagtgtttccgaggcccagaatacacaacctcaggtagcgaatgctgatgcgaaagctccaaatacacctagtacgtcagatgaaccaagctcttcctcctcttccgatttatactccactcctcattaccaacgtaataatgatgaagaggatgacgaggacccggtttccccgaagcctgtatcaaaatcaaacagtatctacagacccatcagaaagacagaaagttcatcaacaacgagttcttcaaacggtatgattttcagagtacctttcaaggagaaagcggctgtaacgtcaaacactgaagccctcttggagtcaaacctttcacttcaagaattgagccgaagaagatcgtcacttatgagcatcccgtctggtgaacttctaaggtcctctatatctgaagcggaacatcaacgtcgtgcatctcatccgctcacttcatcaccgctctttgaagatagtggaaccccttgcggcaaacaactgcaacaactgcaacaacatactatacaaaatcctcataaccatttgtcgccccggaggttttcaagaagtgcaagaagttcaatttcctacgtgagttcttcttccgacagacgtggaaattcaatttctagcaggagcacaagcgatagctttggaactccaccagttttgggcgttttgaatgtaccattacctcctcaaacaagagaacctaatgaaccacctccaccatgtcctgcaatgagtacctgctcaaatacaaggcgaagcaacaccttaacggattatatgcattctaacaaggctagcccgttttcttctcgtagatcgtcgcatatcggtagacgttctagtacaccggaaacggaaaacgcattctctgcaacaccaagagcatccttagatggtcaaatgttaggaaaatctttgaaggaaggttctacatcacagtacacacagccaaggatgaactctttcccaaaggctaatgaaaccatacaaacacccacatcatcaaacaatgaatggagccgtcaatccgatacttcaaatacagatagttttgacagtttgcaatctaattttgcgttagagttggaaccacttttaacaccgaggtcactttatatgccttggccaacctccacagttcgagcatttgcggaatttttttacactgggcaagtaaacagtaaatggcttttggcaccagttgcccttgatttattagtaatggctaagatttatgaaataccattactgtataaattgatccttgaagttttatattcgattctggctaaaaaagaagaaagtttatccttaatatgtacttcgttaatggagacctttcgcaccaaaactctgaactcctataaaggtgatgaagaaaaaacaaatacttatttgacttcaaacgataactatcaggaactgttgaaattaaaagtgtcgctggagaatatcgacaatgggtattatgacccagatttgttacgcaaacagtcaagagcacagtcttcaagcacacaagaaagcagtggtagtgcaaacggcgaaaaaactgcaactggagctggctccctggagacttcttcaaccaatgtccctacagtatttgctggcggtcccagagatagccacaattcagtaggctccattggttttccaaatagtatgaatatacaaggctcaagaagatcgacatcaggattttctccacgcgttaagatgaaatcgagcttaagcaaggaaatagatcccaaaactttttatgaagagtacgaaccaaaagagggcaaaagttttgatgataacgatgatcaacaaaccaacattggaagttttaaccttcatttgtttgatatgaattatggttccatcagcagcagtagcactaacagcattagtagcagtgatttagaagagaaagaagaacaagggcaacttcaagatttattggaaatagaaagagaagattctgctgagatcttagacgcaagattcagaaacaaagaagatgataaggtgacgaaggatatatcaaaagacaagaaacgcaattacttaccgcatgaaaaaaataacttgaaagccaaggaaggtaaggaaactagagacgtaagggaggaggaggaagaattcgattttggtttgggaatgctttcgctcaataaaataaaaagagaagccaagcatgtcgataaggtggacgattctgtagaccctttatttaaatcatctgctttccctcaaagtcccattcgagcatacgggtctaccacaagaagtagttcggcttctggaaagccattcagggacaatcgttcatttaatgcattttctgttttgacattagaaaatatggcgtctgcaaatgccctacctcccgttgattatgtcataaaatcaatatacagaaccactgtgttagtgaacgatatcagactaatggttcgttgcatggattgcatggaattatctaaaaatttacgagcgctcaagaaaaaaactatggaagatatttcgaaattgaaaggcatctgtaaaccgtcaccatag

SEQ ID NO: 76544 - DNA, 8019 bp, Saccharomyces pastorianus
atgacagctatcttaaactgggaagatatatcccctgttttagagaaaggcacccgcgaatcacacgtgtctaaaagagttccctttttgcaagatatatcacaattagttcgtcaagaaacattggaaaaacctcaattatctgaaattgctttcgtgttattgaataccttcccgatttacgaagacaataggtctaaaagtttggtaacttcagtattgcttgacatcttaaatctagagccatgtctcctagaaaactttatccgattcatttccgacgtggtcatcagtaatccggctaccaaagcagtcgctgattaccttaatttgttagattggattaattctttcttgatttttgtgtcgcataattctaatttatttgaagagtacattccaaaattgttggtcgtccattcttacgcaacgttcggtgtggaaactattcttgacaatcaagaagaaggcaagaaatcccaagataagcagaaccagcatagaaagagaattcgttattgcattttccaagcaacggtcaaagcattccttaagtgcttgaaggataatgacgacagtatttccttcatgaagatttcaattaaaactgtactggagagctactctaagctgaagataaccagtgttggagtagttatgataatgggtgcactaactcaggctgcacttcagttattatcgaggcaaccagctctgcactccgttttaaaggaaaattctgcagagaaatattgcgaatatttgggcaaagaagtgtttttaggcaaaaacccaccatcttccttttgcttagagattggtttgaagccatttttaaaagaatttgtttcacaagagttattcattaagtttttcatccctaatattgaaaaagcagttttgagatctcctgaggttggtttttcaattttatctgagttatatgctggtgtttcttctgaaaaagtaaatctcttaaatgcctttacttcctcgaaactgattaatcaatacttctcgtcatttaaaagctcaaaagaggtagttagatccgtctcgcttcagtctatgataatcttattgagaaaaatttccaatactgacactaccttggaagatttgaccaagcttattgacgaaatatttaagaacatcaaatcgaacttaaatgcagattacaaatcacttatttccaaaattctcatagaaatacccttaacgcactatgaggtttcagaaaaaacctgtaaagggctgtccccatatattggtaaagaaggtaatgaagcagccttgactctaatgcttaacgctttttttgttcattattttagtctgggcaaacctattgaagacttggataaaattatatcagctggttttgcagataaaaaacctgctttgaaaaaatgctggtttgccgcatttttgaacaattccaatgctgcctctgaagaggtgattttaaactttatagacggttgtttggaatttgtgaaagactccatcatacattaccagactcacgggcatgcatgtattctagcatcaattgaatttacaaacaaaattttggcattggacaatactgagctaaatgatcgtgttatgcagctcatagaaacccttcctgaaaattcttcgataggtgatgctatcttaactgctgctttatcaacagagctatccatcgaaaaccgtattcatgctgttaatttactacaagaattgttctacaagaaacccgaatttattgggtttagcgtgattgatgcaattgaaaggagaatgcgtgtccaagaattaatacctcaacaaaatacatcctttaaatatgtcacttctgtactactggccattacgtctgagttacctgacaaggaagcctcgataaaggtattaatcaatgctctggtcatagcgcaatggaatattttcaacattaagaatggctgggctggtttagttttacgtgcaaggcttgatccagctgaagttgtcaaagaacatgctagcgttatcatggagaagattcttgaaatcacaggtagttgtgaatggatagatacaatttatggtgcatgcggtttgcaagcagctgcctatgcagcatttattcaacctactgagttcacaccgatcctttgtaagactatcgaagcagatttaaccgcggatgatttctcacgtttatctgaagaggacttcgaaatttttgcaggagaggaaggtgttctggtggttgacgtcctggaagaaagcatgaataagaaactttccaataaaaattctaaagagtacgaaactctaatgtgggaacaaaaaataaggaaggagcaagccaaaaagaatgtgaaaaaactttcaaaagaggaacaagagctcgttaatgaacagttagcgaaagaatctgcggttagatcacacgtttcggaaatttccactcgtttaaagcgtggtattagattggtatctgaactttccaaagctgcttgcttagtccaaaatggcatcgctatttggttccccttggcagtcacaaagcttttgtacctatgctcggaaccaaatatttcaaagctaacagaggatgtaaatattgtgttcttgcagctttctcaaaatgtctccgagagattaggtaatatcagacttttcttaggtttggcgactttgcgtgtgcacaatgctaatggcatctcgcaagattatttacaagaaccactggttgaattacttacaagagttctttttaggatcaagttcgtctccaatcaagcagcgatagatcccattagtttgacatatattttgccattgttgattaatgttttagaaaagggtaaggcgattgcattaaagaatgcggacaagcctgttgttaaggctgagtttgttgaagaagatgaagaagaagaacatttgttactggccatggaaattatttctgtacacgctgaagcttttgaggatccttccattccgagaatttccattgttgaagtgttactatctcttctatctttaccctcaaaagcgaagattgctaaagattgttttaacgctctgtgccaaagcatatctgttgcaccaaatcaagaagaccttgatatgatactatcaaatttactatcaccaaatcaatttgtccgttcaacaatattagaaactcttgataacgaattcgaattagaaccttttatgaaatattcacctgaagttttcatttgcagatttgattcggatccttccaaccgcgagattgcagatttcatttgggagttcaacaaatttgtagtcaacgatgaattactaaaaagcttattcccactattcaatcaggatgatagtggcttgagattatttgcggcaaacgcgtacgcatttggtgcggtaagtctgtttacctctgaagagaactcctcgaaagattacttaaatgatttgctgaacttttataaagaaaaggcaaagccattggagccaattcttgatcaatttggcttggttcttgtttctgcaagtgaacaaaaagatccatggcaaggaagaagtaccgttgctattacattaaaaatcatggctaaggctttttctgcagaggatgatactgtcgttaacattataaaatttttggtcgatgatggaggtctagtagacagagagcctattgttcgtcaagaaatgaaagaagctggtgttgaattaattacgttacatggctcacaaaactcgaaggatttaattcctatatttgaagaagcattaagctccagtacggacagtgccttaaaagagaacgttattattttgtatggtacattagcaagacatttacagcaaagtgatgcaaggattcacacgatcattgaaagattgctttcaactttagatactccttctgctgatattcaacaggctgtgtcggcttgtatagcaccactagttttccagttcaaacaaaaagttggtgattacttgggtatcctaatggagaaactgctgaatccaactgttgcttcttctatgcggaaaggtgccgcttggggtatcgctggtttagtgaaaggttacggtatctcggctctctcggagttcgacattattcgcaacctcatcgaagctgcagaagataaaaaggagccaaaaagacgtgaatctgttggcttctgctttcaatatttgtctgaatctctagggaagttttttgaaccatatgtgatagaaattcttccaaatattttaaagaatttaggggatgctgttcctgaagttagagatgcaaccgctcgtgccactaaggctataatggcgcatactacaggttacggtgttaaaaagttaattccagttgctgtttctaatttggatgaaattgcttggagaactaagaggggctctgttcaattgttgggtaatatggcttatttagatcctactcaattgtcagcttctttgtccaccattgtcccagaaattgttggtgtattgaacgactctcacaaagaggtgcgtaaggccgctgatgaatccttgaaaagattcggtgaagttatcagaaatccggaaattcagaaattagtgcccgtacttttgcaagctatcggtgatccaacaaaatacactgaagaggccttggattcgttaattcaaacacaatttgtccattatattgatggtccttcactagcactaattattcatattattcatcgtggtatgcatgatagatctgccaacattaagaggaaagcatgtaagatcgtgggcaatatggccattttggttgataccaaagatctcatcccatatttacaacagctgatagatgaagtggagattgctatggtggatccagttccaaatactagagccacagcagcacgtgcattgggtgctttggtagaaaggttaggtgaagagcaattcccagatttgattcctcgtctactagataccttaagtgacgaatcaaaatctggtgatcgtctcggttctgctcaagctctagctgaagttattagtggcttgggcttgaccaagttggatgagatgttaccaaccattttagctggtgtaaccaattttcgtgcttatatcagggaaggattcatgcctttgctgcttttcctccccgtttgttttggatcacaatttgctccatacattaatcagattattcagcctattctttccggattggccgataatgatgaaaatattcgcgatactgctttgaaggctggtaaattgattgtcaaaaactacgctacaaaggccgttgatttgttgttgcctgaattagaaaggggtatgttcgatgaaaatgacagaattcgcttatcttctgttcaattaaccggagaactgttgttccaagttactggtatttcctccaggaacgaattttctgaggaagatggtgatcataatggtgaattctctggtaaattggtcgatgtacttggccaagaccgtcgtgatagaattttggccgcattatttgtatgcaggaacgacacttctggtatcgtacgtgctacgacggttgacatttggaaggcattggttccaaatactccaagagctgtgaaagagatccttccaacattgactggtatgatagtcactcacttggcttcatcatccaatgtattacgcaacattgctgctcagaccttaggtgatcttgtccgtcgtgtaggtggtaatgctttgtcccaactgttaccaagtttggaggaatctttgatagaaacatcaaactcagattcgagacaaggtgtttgtattgctctttacgagttaattgaatcggcttctacggaaacgatatcacagttccaatctaccatcgttaacattattcgtacggcattaattgatgagtcggctactgtcagagaagcggctgcattatcttttgatgtattccaagatgttgtaggaaaaactgctgttgatgaagttttaccatatttgttgcatatgcttgaatcttctgataattctgactttgctttgttaggtttacaagaaattatgtcgaagaagtccgacgtaatcttcccaattttaattccaaccctattagcccctccaatagacgccttcagggcttctgctttaggttctttggcggaagttgctggctcagccttatacaagcgtttatcaattataatcaacgcactagtggatgcaatcataggtacttctgaagatgaatcgaccaagggtgcattagaacttgcattagacagggtattcttatctgtgaatgatgacgaaggtcttcacccattacttcaacagattatgtcactactaaagagtgataatatagagaaacgcatagctattttagaacgtttgccaaatttcttcgataagactgttcttgattttgatgtctatattccgaactttgtctctcacgcaattttatcattagatgatgaagatcaaagggttgttaatggtaacttcaatgctttgtctactttgttgaagaaggttgataagcccaccttagaaaaattagttaagcctgctaaacagtcattggcattaacaggcaggcaaggtcaagatgtcgctgcatttaagcttccaagaggccctaactgtgttctgcctattttcttgcatggtttgatgtatggttcgaatgatgaaagggaagaatctgcattagccattgctgacgttgtttcgaagacccctgccgctaacttgaagccatttgtgagcgtaattactggtccattaattcgtgtcgtgggtgaaagatttagtagtgatatcaaagcagcaattttatttgcacttaatgtgctattcattaagattccaatgttcttgaggccttttatccctcaattacaaagaacatttgttaaatccttgtctgacgctaccaatgaaacgttacgtctccgcgccgcaaaggctcttggtgccctgattgaacatcagcctcgtgttgaccctctagtcattgaactggtgacaggtgccaagcaagccacagatgaaggtgtcaagactgcgatgcttaaagctttactggaagttattatgaaggctggttccaaattaaacgaaaattctaagacaaacattgtcaatttagttgaggaagaaatgttgggtagcaatgacaaattggcagttgcttacgctaaattaatcggatcgttatcagagattttgtcgaacgacgaagcccacaagatattgcaagacaaggttttgaatgcagatctagatggagaaaccggtaagtttgctattctgactttgaattcctttttgaaagatgcaccaacacatatattcaatacgggcttgatagacgaatttgtaagttacattttgaatgcaatccgttcccctgatgtttacttcggagaaaatggtaccattgctgctggtaaattacttttattagaaggaggaaagaggtctccatttgttaaaaaggatgctgcagaaccgttcaaaattggcgatgaaaacatcaatctgttaattaatgagttgagcaaagctgtcttacaaccagccagtaattctacggatgtaagaaggttggccttggtggttataagaacactagccagattcaaatttgacgagtgcattaagcaatacttcgatgtagtaggaccatctgtattttcttgcttgcgtgatcctgttatcccaattaagctcgcagcagaaaaagcatatttagctttgttcaaattggttgaagaagatgacatgcatactttcaacgagtggtttgctaaaatttcagatcgcggtagcagcatcgaaactgtcacaggtaccacaattcaattacggtctgttggggactataccaagagggttggtaaaaggttagcaaatgtcgaaagagaaaggattgctgccggaggagacgcggaaacaatgtttagtgacagatttgaagatgaaagagaaatatgggctgtcggaggtgttgaattaaccactgatatttga

SEQ ID NO: 76545 - DNA, 1359 bp, Saccharomyces pastorianus
atgcctggaacatttagttatgatgtgaaaacaaaggagaacgaaccattatttgagtttaattctgcttattctcccagggtatcgtatcattttaactccaaagtttcacattaccattatggtgttaagcatccaatgaagccgtttcggttaatgctaacggatcacctagtttcctcttatggattgcacaagattatggacctttatgaaacaagaagcgctaccagagacgaattacttcaatttcactcggatgactacgtgaattttctctcgaaggtttcaccagaaaatgcaaacaaactgcccagaggcacacttgaaaattttaacattggagacgactgtcctatttttcaaaatttatatgattatacaacactatacactggtgcgagccttgacgccaccaggaaactaatcaacaatcaatccgacatagcgataaattggtctggtggtcttcatcatgcaaaaaagaatagtccatctgggttttgctatgtaaatgatattgtgctttctattttgaacttattacgatatcacccaagaatcctttatatcgatatcgacctacatcacggcgatggtgtccaggaggcattttacaccacagatagggtcttcacgttgtcgtttcataaatataatggcgaatttttcccaggaaccggtgatctgacagaaattggttgcgacaaaggaaaacatttcgcattaaatgtacccctagaagatggcatagatgacgactcatatataaaccttttcaagtcaattgtagatcctctaataatgactttcaaaccaacacttattgtccaacaatgcggtgcggattccttaggtcatgatcgcttaggatgcttcaatttaaatataaaggcacatggagaatgcgtaaaatttgtcaaatcatttggtctaccaatgctagtagtgggcggtggaggttatacacctagaaatgtatcacggctttggacctacgagacaggaattttaaatgatgtcttgctaccagaagacatccccgaagatatcccattccgggactcattcgggccggattattcactttatcctatgttagatgacttatacgaaaacaaaaacagtaaaaaactactggaagacattagaatacgatgtctagaaaatatcagatacttgcaaggagcaccaagtgtcagaatggatgctgaatgcataccgacacaagatataagtgccctgacagaagaagaggataaaatcattcaagaaatgaatgaagaaacagaagcagacagttcaaataggctagaagaaatggaaaaagaaaacagtggattgattgccttttcatag

SEQ ID NO: 76546 - DNA, 1803 bp, Saccharomyces pastorianus
atgattaacgataaactagtacattttctgatccagaattatgatgacatcctaagagcaccgctttctggacagctcaaagatgtgtattcactgtacatcagtggtggatacgatgatgagatgcagaagttgagaaacggtaaagacgatgtcttacagtttgaacagttttggaatgatcttcaggatattatatttgcaacgccgcagtccattcaatttgaccagaatctattagtggcagataggccagaaaaaattgtttacctggacgttttttccttgaaaattctctataacaagttccatgccttctactatacattaagatcgtccagttcttcatgtgaagaaaaagtgtcgagtttaacaacaaaaccggaagctgattcggaaaaagaccaactgctgggtagactgcttggagttctgaactgggacgttaacgtcagcaaccaggggttaccacgtgaacaactgagcaatcgtttacaaaatttattgagggaaaaaccatcatcttttcagcttgctaaagaaagagccaaacacacgaccgaggtcattgaatacatcccgatatgtagtgactattcgcatgcatctctattgtcaacctcggtgtacattgtcaataacaaaatcgtttctttacaatggtccaaaatatccgcatgtcaggaaaaccacccaggattaattgaatgcattcaatcaaaaattcactttatccctaatatcaaaccacaaactgatatttcgttaggagattgttcttatttggatacctgtcataaattaaatacgtgtcgatacattcattatctgcaatatattccgtcatgcttgcaagagcgagctgatcgtgaaactgcgagtgaaaataaaagaatacggtcaaacgtttccattccattttatactctgggcaattgctccgcacattgtatcaaaaaggctttacctgcacagtggatccgttgcgatgtgcggaaatttgattttagggttcttggaaagttttcggtagttattgcagatcctgcatggaatatccatatgaacctaccatacggtacttacaacgatattgaactattaggtttgcctctgcacgaactacaagatgaaggtattatttttctttgggtgacgggtagagctatagaattgggtaaagagtctttgaataactggggttacaacgtgataaatgaagtttcatggataaagacaaaccaactgggtagaacaattgttacaggtcgtacgggtcattggttaaatcattctaaggagcatttattggtgggcttaaagggtaatccaaagtggatcaacaaacatattgacgtcgatttgatcgtatcaatgaccagagagactagtagaaagcctgatgaactgtatggtatagcagaacggttggcaggcacccatgccagaaaactagagatattcggaagggatcacaatacgcggcctggctggtttaccatcggaaaccagttgacaggaaattgcatttacgaaatggatgtcgagaggaagtaccaggagtttatgaagagcaaaactggaaccagccacactggtactaaaaaaatcgacaaaaagcaaccttcaaaattacagcagcagcatcagcagcagtattggaataatatggatatggggagtggtaagtattatgctgaggccaagcagaatcctatgaatcaaaaacatactccctttgtatccaaacagcaacaaaaacaacaattccaaacactaaataacctatattttgctcagtaa

SEQ ID NO: 76547 - DNA, 390 bp, Saccharomyces pastorianus
atgtttagacagtgtgctaaaagatatgcatcttcattacccccaaatgctttgaaacccgcatttggcccaccagataaagtggcagctcaaaaatttaaagaatcattaatggctactgaaaagcatgcgaaggacacatctaatatgtgggttaaaatctcagtttgggtcgccctaccagcaattgctttaacagctgtgaacacatactttgttgaaaaggagcatgctgagcatcgtgaacatttgaaacatgtgccagactccgaatggccaagggattacgaatttatgaatatcaggtctaagccttttttctggggtgacggtgataagacattattctggaatcctgttgtcaacaggcacatcgagcacgacgattaa

SEQ ID NO: 76548 - DNA, 1581 bp, Saccharomyces pastorianus
atggcacaaaacaattttgattttaaattcagccaatgttttggtgataaagcagatattgtggtgacagaggcggatctaattacagctgtagaatttgactatactggaaattatctggccactggtgataaaggtgggcgtgtggtactttttgaaagaagtaatagtagacattgcgagtataagtttttaacggagtttcaaagccatgacgcagaatttgattatttaaaatccttagaaattgaagagaagataaatgaaatcaaatggttacgaccaactcaaagatcacactttcttttgagcacaaatgataaaactataaaactttggaaagtttatgagaaaaatataaaattggtaagccagaacaacttaacagaaggggttacgtttgcgaaaaaaggcaagcccgataaccataacagtagaggaggttccgtgagggctgtattatctttacaatcgctgaaactgcctcaattatcacagcatgacaaaatcattgctgccaccccaaagcgtatatatagtaatgcacatacctatcacattaattcgatatcgttgaattctgatcaggaaacatttttaagtgctgacgacttgagaatcaatttatggaatctggacataccagatcagagcttcaacatcgtagatatcaagccaaccaatatggaagaacttaccgaagtgatcacaagcgctgaatttcatccgcaagaatgtaatttattcatgtactcttcttccaaaggtacaataaagttgtgtgatatgagacagaattccctatgtgacaataaaaccaaaacatttgaagaatatttggatccaatcaatcataatttttttacagaaatcacgtcgtcaatttccgacataaaatttagtccaaatggtaggtatattgcatccagagattatttaactgtcaaaatttgggacgtaaatatggataataagcctttgaaaaccataaacatacatgagcaattgaaggaaagattgagtgatacctatgaaaacgatgcgattttcgataaatttgaagttaattttagtggtgatagttcaagtgtaatgactggttcttacaataacaatttcatgatctatcctaatgtagtaacttctggtgataatgataatggcatagtcaaaacttttgatgaacacaacgcacccaatagcaacagcaataaaaatatccacaacagcatacaaaataaagattctagtagtaatggcaacagccacaagcgtaggagtaacggacgcaacacaggcatggtgggaagtagtaatagctctagaagcagtatagcgggaggagaaggagcatatccggaggattcgggaaccgaaatgaatgaaatcgtgttacaagctgacaaaacagcgttcaggaacaaaaggtacggttcgctagcgcaaaggtctgcaagaaataaggattggggtgacgatattgatttcaagaagaatattttacatttctcatggcatccaagagaaaatagtattgctgttgcagcaactaataatttattcattttttccgcattataa

SEQ ID NO: 76549 - DNA, 360 bp, Saccharomyces pastorianus
atgccaaagaagagagcttccaacggtagaaacaagaaaggtagaggtcacgtcaaaccagtcagatgtgtcaactgttccaagtctattccaaaggataaggctatcaagagaatggctatcagaaacattgttgaagccgctgccgtcagagatttgtccgaagcttctgtctaccctgaatacgctttgccaaagacttacaacaagttacactactgtgtttcttgtgctattcacgccagaattgtcagagtcagatccagagaagacagaaagaacagagctccacctcaaagaccaagattcaacagagaaaacaaggtttcccctgctgatgccgccaagaaggctttataa

SEQ ID NO: 76550 - DNA, 141 bp, Saccharomyces pastorianus
atgttaacgacacaaaagtgtgaaagtagagaagggaagaacgatgagatctttgaattgggagaaagtaatagtgacaagatattattaaaacatggcaaatgtaacttgttttctgaaaggaaaccagttaatcactag

SEQ ID NO: 76551 - DNA, 174 bp, Saccharomyces pastorianus
atgaagagccaaaaaatacataaccaaaaagatcgagaaaaggtcgagatatatttttatttaaaaattcttatcaatattagtactattcatgtcataatggcatactatttctatctctgtcagagatggctagctagaggttgttgcgaagttacttccaaaagattctag

SEQ ID NO: 76552 - DNA, 468 bp, Saccharomyces pastorianus
atgctttcactacgtcaatctataagatttttcaagccagccacaagaactttgtgtagctctagatatctgcttcagcaaaaacccgtggtgaaaactgcccaaaacttagcagaagttaatggtccagaaactttgattggtcctggtgctaaagagggtaccgttccaacagacctagatcaagaaactggtttagctaggttagaattattgggtaaattagagggtatcgatgttttcgacaccaaaccattagattcgtccaggaagggtaccatgaaagatccgatcatcattgaatcttatgatgattatcgttatgtcggttgtacgggttctcccgctggttcacatactattatgtggttaaaaccaactgttaacgaagtcgccagatgctgggaatgtggttctgtttacaaactaaaccctgttggtgttccaaatgatgaccaccatcactaa

SEQ ID NO: 76553 - DNA, 1140 bp, Saccharomyces pastorianus
atgtgcgattctcctgcaacgactggaaagcctactattcttttcatcgcagatccgtgcgaaacatcagccacacttaattccaaggcattcaaagagaagttcaggatcttgcgctatcagctggacaccaaagaagcatttcttaactttttagaaaggcatgaacaagacaaaatatgtgccatttatgctgggtttccggcattcaaaaaaatcggtgggatgactcgaagtatcatcgaacacaagtcatttccaaggaaaaatttaaaatgtatcgtgctttgctcaagaggttacgacggatgggatctggatacattacgcaagcatgaaattcgattatacaactaccaagacgatgaaaatgaaaaattgatagacgatttaaagcttcatcaagtcggtaatgatgtggcagattgtgccttgtggcacattctggagggctttagaaagttctcctattaccaaaaacttagtagagaaactggaaatacattaactgcaagggcgaaagctgcagaaaagagcggatttgcttttggccatgaactggggaatatgtttgctgaatcaccaagaggaaagaaatgcttaattcttggtttaggaagtattggaaagcaagtagcctacaagttgcaatacgggctaggaatggaaatacattattgcaaaagaagcgaagattgcacaatgagtcaaaacgaaagctggaaatttcatttgctagatgaaacaatatatgcaaaactataccagtttcatgcaatcgtggtcacattgccgggaactccacaaacagaacatttaatcaacaggaaatttttggaacactgcaatccaggcctaattttagtcaacttgggaagaggtaaaattttggacttgcgggctgtttctgacgccttggtaacgggacgaatcaaccatctcggtttagacgtctttaataaagaaccagaaatagatgaaaaaatcagatcttctgatagacttacttcaattactccgcatttgggtagtgcgacaaaggatgtttttgagcaaagttgtgaactggcattgacaagaatcttacgggtagtgtctggggaagccgcaagcgatgagcatttctcccgtgtagtttga

SEQ ID NO: 76554 - DNA, 1398 bp, Saccharomyces pastorianus
atgccgatcaagagattagatacagttgtggtaaataccggctctcaaaatgaccaacattcagcctccgtgccaccggtgtatttgtcgactaccttcaaagtggacttgaataatgaagatgcacagaactacgattattccagatcgggaaacccgaccagaagtgtccttcaacaccagattggtaagctttatcgtgtcccacaggaaaacgtattagctgtgagcagtggtatgacggcgctagacgtcatcctgcgtgggctcgtcttacttaacggcactgacaaccatacgccaacaataatagccggcgatgatctttatggaggcacccaaaggctgctgaattttttcaagcaacagagtcatgcagtctctgttcatgtggacacttccgattttgaaaagttcaaaaccgttttccagtctttagataaagttgattgtgttcttctagagtctccgaccaatccgctttgcaaggttgtggatatccctagaatattacgttttgtgaaatgcatatctcccgacactacagttgtcgttgataatactatgatgagtggactcaattgtaatcctcttcaactgaatccaggctgcgatgtcgtatacgaatctgctaccaagtacttgaatggtcatcacgatttgatggggggtgttattatcagcaaaacaccagaaatagcctcgaagctttactttgtcattaattctacaggagctggattatccccaatggattcttggctacttgtgaggggcctaaaaactctaggagttagattatatcaacagcagagaaatgctatgatattggctcattggctagaaaattcatgcggattcaaacctaccagaacaaacaaggctacgaaaactagatttgttggattacgctccaacccggatttcaagctgcataaatcgttcaataatggcccaggtgccgtgttatccttcgaaacggggtccttcgaacattcaaagagactggtcagttccaaaaaactgagtatatgggctgtgacggtatctttcgggtgtgtaaattcgcttctatctatgccttgcaaaatgtcccatgcttccattgatcccgaattaaggaaagagagagattttcctgaagatttggttcgtctttgctgcggtatcgaaaatatagtagatttgaagaaagatttattagcggcgatggttgacgctgatattatagaagtaagagaaaatggcaaatatcttttcaacaaattgaataagaacctagctgtgaacactaccatcgatgacctgcataagcctttaagtatttacgaagaattttacaatcaagatctcatcagaaaggactcagaattgaatattaagagttcgaaattgtaa

SEQ ID NO: 76555 - DNA, 324 bp, Saccharomyces pastorianus
atgtttttctcttcttattatgacaagggaaacttgaagaagaattcgtgtcttgccataatttcagcatcatcgtctcaacctaagcctcttctcacgaaggcacgctcaaatatctttctggctctaaaaatcttgaataacgaaccgaatttaccatctttcctgcttttttatgcgtcgaaaaaaagtaaaataaccgcccagatcacgaaattgcatataaaaggcgatctcccgtcccaccgttattctttgcgatatagactaaacggcggaaactttatgtgtagtatcataaacattcaacaatggtatgtctaa

SEQ ID NO: 76556 - DNA, 1281 bp, Saccharomyces pastorianus
atgaggtttaggagttcttcccatagcttaaaacatgttgacagagaattaaaggacttgattaattcgtccgagaatgccaataaatgcggtgaatgtggtaatttctacccaacttggtgctcagttaatttgggggttttcctttgtggtaggtgtgcctctgttcatagaaaagttttcggtagcagagacgacgatgccttttctaacgttaaatcactatcaatggatagatggacaagagaggatatcgatgaattagtgagtcttggaggcaataaggggaatgctcggttctggaatcctaaaaatgtcccttttccttttgatggagatgatgacaaagctatcgtggagcattacattagagacaagtatattttgggtaaattcaggtatgatgaaataaagcctgaagactttggatccagaatggatgattttgatggggaatcggacaggtttgatgaaagaaatagaagtaggagcaggagcagatctcattctttctataaaaggggccataataggtctgactacggcggttccagggactcattccaaagcagtggaagcagatattctaggcaactggcagaactcaaggacatgggtttcggtgatacaaacaaaaatttagatgcattatcgtccgctcacggaaatatcaatagagcaatcgattatctagaaaaaagttcaagttcaagaaatagtgtatcggcagcagcgacaacatcaactccgcccctgcccaggagacgtgcgacaacaagtggcccacagccagctatttttgatggtacaaatgtaatcacgccagattttacttcaaattcagcatcttttgtacaagcaaagccagcagttttcgatggtacccttcaacagtattacgatcctgctaccggaatgatatatgtagatcagcagcaatacgccatggctatgcaacagcagcaacagcaacagcaacagcttgctgtcgcacaggctcaggctcaggcacaggctcaggctcaagttcaggctcaggctcaggctcaggcccaggctcaggctcaagttcaggctcaggctcaggcccaggctcaggctcaagttcaggctcaggctcaagttcaggctcaggctcaggctcaggcccaggctcaggctcaagcacagcagatccagatgcaacagcttcagatgcagcaacagcaacaggcgccattatcttttcagcaaatgtcgcaaggaggaaacctgccacaaggttatttctacacacaataa

SEQ ID NO: 76557 - DNA, 2694 bp, Saccharomyces pastorianus
atgggagacattaaaaataaagatcacacaacctctgtgaaccataatctaatggcaagtgcaggaaattacaccgctgagaaagaaatcggaaagggttcgtttgccactgtatatagagggcatctgacatccgacaaatctcagcatgtagccataaaggaagtatcaagggcgaaattaaaaaataagaaattactagagaatttggaaatagaaatcgctatcttgaagaaaatcaagcatcctcatatcgtcggacttattgactgtgaacgaacatcaacagatttttatttggtcatggagtactgtgctcttggggacctaacatttctgttgaaaaggcgtaaagaattgatggagaatcatcctctactaaggaccgtatttgaaaaataccctccaccgagtgagaaccataacggcctgcatagagcgtttgtcttgagttatttacagcagttagcgtccgctttgaaatttttgaggtctaaaaacttggttcatagagacatcaagcctcaaaacttactattatctacacccctaattggatatcatgattcaaaaagcttccatgaacttggatttgttgggatctacaacttacccattttaaagatagcagatttcgggtttgcaagatttttgccaaacacgtcattggcagaaactctttgtggctcaccattatatatggcaccagaaattttgaattatcaaaaatataacgctaaagcagatctgtggtctgtcggtacagtggtattcgaaatgtgctgtggcaccccaccgtttagagcttccaatcatttggagttattcaagaaaattaaaagagcaaacgatgtcataacgtttccttcatattgcaatattgaaccagagttaaaagagttgatatgtagtttattgacatttgatccagcccaaagaataggatttgaggagttttttgctaacaaggtagtcaacgaagacttgtcttcttatgaattggaagatgatttacctgagttagagtccaaatcaaaaggtattgtagaaagtaatatgttcgtttctgagtatttatctaaacagccaaagagtccgaacagtaatcttgcaggtcatcaatcaatggcagataatcccgcggagctcagtgatgccctcaagaacagcaatatattaactgccccagccgttaaaacagaccatacacaagccgtagataaaaaggcttcaaataataaataccataatagcctagtttcagatagaagctttgaaagagaatatgtggtggtagagaagaaatcggttgaagttaattcattggcagacgaggttgctcaagcaggattcaatccaaatcctattaagcacccaacttcaactcaaaatcagaacgtcttattgaatgagcaattctctccaaacaatcaacagtattttcaaaatcaaggagaaaatccgaggttactgagggccacatcatcttccagtggaggtagtgatgggtctaggcgaccatctttggtggatagacgcttgtctatatcctcgctgaatccatctaatgcattatcaagagccctcggtattgcatcaacgagattgtttggtggtgcaaatcaacagcagcaacagcaacaaatcacatcttccccaccgtacagtcaaactttgttgaattcccaactttttcatgaacttactgagaatataatattaagaatagatcacctacagcatccagagacactgaaattagataatactaatatcgttagtattttggaatctctggccgcaaaggcatttgttgtttactcttatgcagaagtgaaattttctcaaattgttccattatcaacaacattaaaaggcatggctaactttgagaacaggcgcagtatggatagtaatgctattgcagaagaacaagactcagacgatgcagaagaagaggatgaaacgttgaaaaagtacaaggaagattgcttatccacgaaaacttttggaaagggtagaactttatctgccacatctcagttgagtgcaactttcaataaactaccacgttcggaaatgatccttctatgtaatgaggccattgtcttatatatgaaggcattatccattttatcaaaatctatgcaggtaacgtccaactggtggtatgaatctcaagaaaaatcatgttctctaagagttaacgtgttggtacagtggctaagggaaaaatttaatgaatgtttagaaaaagctgatttcctgagattaaaaattaacgacttgagattcaagcatgcttctgaggtagctgaaaatcaaactttggaagaaaaaggtagttcggaagagccagtatatttagaaaagctattatatgatcgtgcattagaaatatctaagatggccgcacatatggaattaaaaggagaaaatttgtacaactgtgaattagcttatgcaacttcactttggatgttagaaacttctctggacgatgatgattttacgaatgcctatggtgactacccttttaaaactaacatacatctaaaaagtaacgaagttgaagataaagagaagtatcatagtgtgttggatgaaaatgacagaataatcataagaaagtatattgatagtattgcaaacaggttgaaaatattgagccagaagatgaaccaccaaaattaa

SEQ ID NO: 76558 - DNA, 1683 bp, Saccharomyces pastorianus
atggtactacttaaagaacctgttcagccgctgcctcgatcatctctgttatataataatgcgagcaatagtagtagtcgtataaaagagacaagaaaagtcaaactattatataatcccttaactaagagacaaatccttaacaactttgaaattttagccactttgggtaatggacagtacggcaaagtgaaattagcaagagacctcgggacaggtgcgttggttgcaataaaaattcttaatagattcgaaaaaagaagcgggtattctcttcaattgaaagtagaaaatccaagggttaatcaagaaattgaggtaatgaaaagatgtcatcatgaaaacgttgtggaattgtatgaaattttgaatgaccctgagagcacaaaggtttatcttgtattagaatattgctcaaggggacccgttaaatggtgtccagaaaacaaaatggagataaaagcagtgggaccatcaatactcactttccaacagtcgaggaaggtagtgttggatgtagtatcgggtctggagtatttacattcccaagggataacgcatcgagatatcaaaccatcgaacctgttaatttcatcaaacggaacggtgaaaatatccgattttggcgttgctatgtcaactgccaccggaagtactaatatacaatcatcgcatgaacaacttttaaaatctagagccttagggacccctgctttttttgcacctgagctttgctccactgaaaaagagtattcctgctcatctgccatcgatatctggtcattgggggtcactatatactgcttgttgtttggaaagttgcctttcaacgccaattcaggattagaacttttcgacagtattatcaataaacccttagaatttccatcttatgaggaaatgttgaatggtgccacttcgggaatcacaatggaagaatacactgatgccaaagatttattgaagaagctgttacaaaaagatcctgacaaacggataaaactagcagacatcaaggtacatccgtttatgtgccattatggtaaaagcgatgcagcatccgtatcgaccaatttggagacgtttcatgagttgaaagtttcaccgccctcttcatgcaaaagggtagaattggtcagcctaccagtgaattcatcattcgcctctttagatagcgtttatatggaaaattttgaccacaataaccttaggactggtgctgacagaaattcaacatattctccatcaatatacgacgcaaataccttatcaccctcagcatatcacaacatcggttctagagagtcatcctattcgtccttttcctctttcacatcatccaccgcttttgcatctcagatcagtattcaggatgccccagcaatcggtgatcaacaatgcttgataggtgagagtggaagttcattaagagtgaattcttgtgagtttccacaatatacaactatgtctcctgtaggagaatatccctttgagagtacggaagcaagtttgagctctactcttacgcctgtcggtaatgtacctcaacgtataaaagcccacctggtagaagggaaatctaacagcaaggatgaccttagaatagaagcagacgcatcacttgtatttgaggctagcgacgcccagcgcacgagaagaagaatgtctctttataagctttag

SEQ ID NO: 76559 - DNA, 1038 bp, Saccharomyces pastorianus
atggtgactggtgaagaaaatgtgtatctaaagtcaagcttatccattctcaaggagctcagtctcgatgaactactaaatgtgcagtatgacgtgactaccttaatcgcgaaacgtgttcaagcactgcaaaatcggaataaatgtgttctcgaagaacctaacagtaacctggctgaaattctatgtcacgaaaaaaatgctcctcaacaatcctctcagacctctgcggggccaggtgagcaagattctgaagatttcatccttactcagtttgatgaggacataaagaaagaatcagcagaggttcactatcgtaatgaaaataaacacactgtgcagttaccgctggttactatgccacctaataggcataaacggaaaatttcggagtttagttcgcctttaaatggcctcaacaacttaagcgatttggaagattgctctgatactgtaatccacgaaatagataatgataaagagaacaaaacaagaaaactattgggaatagagctcgagaaccctgaatctacatcgccaaatttatacaaaaatgttaaggataatttcttgtttgacttcaatacgaaccctttaacaaagcgagcctggattctcgaagactttagaccaaatgaagatatcgccccggttaagagaggaagaagaaaattggagcgattttatgcccaagttggaaagccagaggattctaaacacagatcattgtcagtagttatagaatcgcaaaattcggactacgaatttgcgtttgataacttgaggaatagatcaaaatcccccccaggttttggaagactggattttccctccactcaggaagggaacgaggacaaaaagaaatcccaggaaatcatcagaagaaagacaaaatataggtttttaatggcaagcaataacaagatcccaccgtacgagagagaatatgtattcaaaagagaacaattaaatcaaattgttgacgatggatgtttcttctggagtgataaattattgcagatatatgctagatgttaa

SEQ ID NO: 76560 - DNA, 801 bp, Saccharomyces pastorianus
atggcattgcatcagtatttatcagagacttatgggcccacgaaacccaaaaataagacgaaaaagaagaagaaagagtcaaaatcagacgctaactcagacaaaacttctttgatagtaaaagaacggctaagtacactgcaacaagaacaggagaagtcaggagttgcttcattcagcaagtttgacaaacaaaaaagaaagaatatatggaagaacctggaaacaaacgagctttcccatgcaataacacatccttccgcatcgtcaattgctggcaacgaaagcaagaacgatctaaaggaaatcagggctcaagagccacttgtcacagtagcagacaaatcgaaaacacgaaaaaccatatacagagacgctcaaggtcacaagattcaggaagattccaagatagacgattctagttttagtcgatctaaatatgaagatgagaaagccgcggaaagagagcaatacctgaaaaatctgaatatgggagacgtgcaaaagcttggaataaatgtagatgcacatgataagaagaaaaatcaaactgcctcaagtctgacgatagaagaccctgcaataacatttacacatgacaaagaaagaactgtaaaaacatctttactgggccgcaagctttatgataagccagcacctgagaacaggtttgccattatgcctgggtcaagatgggacggtgtccacagatcaaatggctttgaagaaaaatggtttgctaagcaaaatgagatcaatgagaagaaagtgcaaagctacaccctacaggaggattattga

SEQ ID NO: 76561 - DNA, 4587 bp, Saccharomyces pastorianus
atgggtattccgaaatttttcaggtacatctcagaaagatggcccatgattctacaacttattgaagggactcagattcctgagtttgataacctatatctggatatgaattcgattttacataactgtacacatggtaacgacgatgacgtgacgaagcgattaactgaagaagaggtttttgcaaagatctgcacgtatattgatcatctttttcaaactatcaagcccaagcaaattttttacatggctatcgatggtgtggccccccgcgcgaagatgaatcaacagagagctcgtagatttagaactgccatggacgccgaaaaagctatgaaaaaagctattgaaaatggtgacgaaattcctaaaggtgagccgttcgactcaaactgtattactccaggtactgaatttatggctaaactgacaaaaaatttacagtatttcattcatgacaaaatttctaacgattccaaatggagggaagtgcaaatcatattttctggccatgaagttccaggtgaaggtgaacacaagatcatgaactttataaggcatttaaaatcccaaaaggatttcaaccagaatacgagacattgtatttacggtcttgacgcagatttgattatgctgggtttgtctactcatgggccacattttgcgttattgagagaagaagtgacatttggtagaagaaatagtgaaaaaaaatcgcttgaacatcaaaatttctacttattacatctttctttattaagagaatacatggagttggaattcaaagaaattgccgatgaaatgcaatttgaatacaattttgaacgtattttggatgattttattcttgtcatgttcgtcattggtaatgatttcttgcccaatttgccagatttgcaccttaacaaaggagcatttcccgttttgttacaaacgttcaaagaagctcttttacatactgatggctacattaatgaacatggtaaaataaatttaaagagattaggtgtctggttaaattatctgtctcaatttgagttattaaatttcgaaaaggatgatatagacgttgagtggttcaacaagcaattagagaatatttctttggagggtgaaaggaaaagacagagggttggtaaaaaattactggtaaaacaacagaagaaattaattggaagtataaaaccatggttgatggagcaattacaggaaaaattatcgcctgatttaccagatgaagaaattccaactttagagttacctaaggacttagacatgaaagatcatttagaatttttaaaagaattcgcttttgatttgggtctttttataacgcattccaaatccaaaggtagttattcgctaaaaatggatcttgattctattaatcctgatgaaacagaagaagaatttcaaaatcgtgttaattctatcaggaaaacaataaaaaaatatcaaaatgctatcatcgtggaggacaaagaagaattggaaactgaaaaaacgatttataatgaaaggtttgaacgttggaagcatgagtattatcacgacaagttaaaatttacgaccgacagtgaagaaaaagtgagagatcttgctaaggactatgttgaaggtttacaatgggttctatattattattatagaggatgtccatcttggtcgtggtactatccgcaccattatgcaccaagaatctccgacttagtcaagggtttagatcaagacattgaatttgatttgagcaaaccatttactccattccagcaactaatggcagttttaccggaaaggtccaaaaatctgatacctcccacctttaggccattaatgtacgatgaacagtcgccaatccacgatttctatcccgctgaggttcaacttgataaaaacggcaagacagctgattgggaagctgtggttttgatatcatttgtagatgaaaaaaggttgattgaggctatgcaaccttatttgtgcaagttatcacctgaagaaaaaacgagaaatcaatttggcaaggacttgatatattcctttaatcctcaagttgataacatttataagagtccgttgggcggcattttttctgatattgaacacaatcattgtgtcgaaaaagagtacatcaccatcccattggacagctccgagattcggtatggtttattacctaatgctaaactcggtgccgaaatgctggcgggtttccccacgttattgtctttgccattcactagttcactggagtacaatgagacaatggttttccaacaaccttctaaacaacaatcaatggtcttacaaataactgacatatacaaaacaaataatgttactttggaggacttttccaagaggcatttaaacaaagtgatttatacaagatggccatatttaagagaatccaaattggtctctttaacggatggtaagactatctatgaatatcaggagtccaatgataagaaaaagttcagattcataacgaagcctgcggaaacccaggacaaaaaacttttcaatagtttgaagaattcaatgctaaggatgtatgctaaacagaaagctgttaaaataggacctgtggaagccattgctaccgtctttccagtgactggtttggtgagagactctgatggtggttatattaagacctttagccctaccccagattactatccattgcaactggttgttgaatctgttgtcaacgaggatgaaagatataaagaaagaggacccattcctattgaagaggaatttccattgaattcaaaagttattttcttaggtgattatgcctatggtggtgaaactactattgacggttacagcagtgaccgcagactaaaaattactgtagaaaagaagtttttggatagtgagcccaccatcggcaaagaaaggttacaaatggatcatcaagccgttaaatattatccatcttatattgtggccaagaacatgcacttacaccccttgtttttgtctaagattacttccaagttcatgattactgacgctactgggaagcatatcaatgttggtatcccggttaagttcgaagctagacaccaaaaggttttaggttacgcgaggaggaaccctaggggctgggaatactcaaatttaactctaaatttactgaaagagtatagacaaactttcccagatttttttttcaggttgtccaaggtaggtaatgatatcccagttttggaagatcttttccccgatacttccactaaggatgccatgaatttattagatggtatcaaacaatggctaaagtatgtctcatcgaagtttatcgcggtatctttggagtctgactccttaactaagacatcgattgctgccgtggaagatcatatcatgaaatacgcagctaacatcgaaggtcatgaaagaaaacagttagccaaagttcctcgtgaggctgttttgaatccaagatcatcatttgcactcttacgtagtcaaaagttcgatttgggtgaccgtgttgtttatatccaagattctggtaaggtaccaattttctcaaagggtacagttgttggctatactactctcagttcatcattatcaattcaggtcttatttgatcatgaaatcgtggccggtaataattttggcggcaggttgcgcacgaatagaggcttagggcttgatgcctctttcttattgaacattactaacaggcagttcatttatcactccaaggcttccaaaaaggctttggaaaagaaaaagcaatctaacaataggaacaataataccaaaactgctcacaagactccttcaaagcaacaatctgaagaaaaactgagaaaagaaagggcacatgatttattgaattttatcaaaaaggataccaatgaaaagaattctgaaagtgtagacaacaagagcatgggatcgcaaaaagattccaaacccgcaaagaaagttttgttaaaaagaccagctcagaaaagcagtgaaaacgtgcaagttgatttggccaattttgaaaaagcaccgcttgataatccaactgttgctggatctattttcaatgccgttgcaaatcaatattctgatggtataggcagtaatttgaatatcccaactccacctcacccaatgaatgtggttgggggtcctattcctggagcgaatgatgttgcagatgttggtttgccgtacaatattcccccaggttttatgacccatcctaatggtcttcacccactacatcctcaccagatgccttaccctaatatgaatggaatgtctattccgccaccagcaccacatgggtttggacaaccgattcccttcccacctccacctcctatgacaaatgtttcagatcaaggaagtcgtattgttgtcaatgaaaaggaaagccaagatttgaaaaaattcattaatggtaaacagcacagcaatggttcaactattgggggagaaacaaagaacagtaggaaaggcgagattaaaccttcttctggcacaaactctactgaatgtcaatcgccaaagtcacaaagcaatgctgctgaccgtgataataaaaaagacgaatctacttag

SEQ ID NO: 76562 - DNA, 1419 bp, Saccharomyces pastorianus
atgtttggattaaataaagcatcttcgacacctgcaggtgggctctttggtcaggccagcggagctagcactggaaacgcgaatactgggttttcgtttggtgggactcaaactggacaaaacaccggcccaagtacaggtggactatttggcgctaaaccagccggatctacgggaggattaggtgcatcatttggtcagcagcaacaacaatctcagacaaatgcatttggaggaagcgccaccaccggagggggccttttcggtaacaaacctaacaatacggcgaacactgggggcgggttatttggcgctaattcgaacagtaattctggcggtttgtttggttccaacaatgcacagacgagtggtggtttgtttggtaataataacactaataatatcaataatagtagtagtggcatgaataatgcaagcgctggactatttggctctaaacctgcaggaggcacttctttgttcggtaatacaagcacctcttcggcccctgcgcagaaccagggcatgtttggtgcaaaaccagctggtacatctctattcggcaataatgcaggtaatacgaccactggtggagggttatttggctccaaaccgacaggagcaacgtctttgtttggttcatcaaataacaacaacaataacaataatagtaacaacatcatgagtgcgtcaggcgggctatttggtaatcagcagcagcaactgcagcaacaaccacaaatgcagtgcgcattgcaaaatctatctcagctccctattaccccaatgacacggatttccgaattaccacctcaaatacgtcaagaaattgaacaactagatcaatatattcaaaaacaagtgcagatctcgcaccatttgaaggccgatacaatcgatcatgatgaattgatagattccattcctcgtgatgttgcatacctactgaagtcagaatctgcaacaagtcaatatttaaagcaagatttgaagaaaatatcctcatttaaatcgctaatcgatgaggaccttctagacacgcaaactttttcggtgctcttacagcaactattaactccgggaagcaaaatttcttctaatgacttagacaaattctttcaaaagaaaattcatctctacgagaagaagttagaggattactgccgtattctctctgatatagaaactgcggtaaatggcattgatacagatttatttggcgccccaaataacccaaattctacagctatcacagcagatctaggttcatccgaagcagagaacctactgcagttgaagacaggcttagctgccatagtctctactgtcattgaggaattcacactgtttatggatatcgctgagagaatcgccgtgttacatcaaaaaacgaaaacactggcaccattgagcatatga

SEQ ID NO: 76563 - DNA, 1281 bp, Saccharomyces pastorianus
atgtaccttggacgacattttttggcaatgacatcgaaagcactgtttgataccaagatcttaaaagttaacccgctatcaatcattttctcccctgatgcgcatatagatggttccttaccaactataacagatcctgaaacggaagcagcgctagttgaagcggcgaggataataagagatacagatgagactgtggcttttccaaccgaaactgtttatggtcttggaggttctgctttaaatgataattcagtgcttagtatatacaaggccaaaaataggcctagcgacaatcctttgattacacatgtttcatccattgatcaacttaacagaaaggtctttaatcaaccgcatctatcaggtacatccttgtttgataacataccctcaatctatcgcccattaatttcaagcctttggcctggcccattaacaattcttttgccagttccatcttcagagcatagtgcattatcaaagttaacgaccgcagatcagcctacgtttgcggtacgcatacccgctaatccagtggctagagcactgattgccctgagcgatacaccaatagctgctccttcagcgaatgcgtctactaggccatctcctactttagcgtctcatgtttatcatgatctaaaggataaaattcccataattcttgatggcggagcgtgcaaggttggtgtagaaagtactgttgttgatgggttatgtaatcctcctatgctactgcgacctggcggttttacatatgaagaaattgttaaattgggtggtgaagcttggtctctttgtaaagttgagaataagaaaacagttgaaaagggcgaaaaggtaagaacgcctggtatgaagtatagacactattccccttcagctaaagttgttttactagttcctcattgcgaaggcgatggcattcttaagggcgctgacaggatggaaagattaaagaggttaatcgaaacggaattaaaagccaacaggaatataaaaaaaattgcgattttaacttccctaaaattacgtgattccgacttacaatctaagatctttaatgaacccgatttttcttcgaaaactttcatcatcgaaagacttggccagtctggtgaagaaatacagactaacttgtttgcagctttaagaaaagtggatgaaaatgataaagtagacctgatatttgtcgaaggtataaatgaggaaggagaaggattagctgttatgaacagattgcgaaaggcggctgcaaataattgtatacagttttaa

SEQ ID NO: 76564 - DNA, 333 bp, Saccharomyces pastorianus
atgtttatcttagtatccgttgtaaatatatgtacatatatacatctacatatgttcccattaattagtacatttacctcaatagggttgggggtcctcatgaaagataaagggaaggaaggaaaaacgataaaagcacaaaatgtgacatatcaaacatttgagaaatacgttgagtcttcttcattctttttcctcgtccacaattttctcagttcatcaacgatgaaaacgctactgctgatgagcaataacaatagtatatcagagataccaagtttctcagttttaaagatactttggaaaaatggtatatatatagcgcacatttga

SEQ ID NO: 76565 - DNA, 579 bp, Saccharomyces pastorianus
atggttacgtatcctgtgcagccttggacaaattttataattgtatatatctatgtatatgtatacgaatggaaaaatttatccgaatctcggcccgactgccagcttgccgggagaacaaacaaccgccaatatatgtatatgtatatttatatagatgtccagatgcattattgtgaatgtgagttatgcgaagatacttgtttgtatagctcgttcaactcattgatggagaatggaatgtcaatatcgtttagtgctgtgttcgtagttgtatatgcgcttcctgtttcattgatactaacaggttccatagatatactagggctttgctcaagcggatcgagggaagccaaatcaagattgtcaatgctgtcggccttaatttctccgttttgcagaggtggcttcaaactcggcaatgtggttgtcatgtctacatccgacgagcgaccatttaggcccaaaagaacgtccagatctgcaacaccgagaccattgacatgcgctgcttcatcatttgcccttctgtggcatgaccctccctttgatttccggctgcttttcctcttggtatga

SEQ ID NO: 76566 - DNA, 1323 bp, Saccharomyces pastorianus
atggatgaaattcttgccaaagcaggttcacaagccgttacatttgctataaaatccggaatatcgatagcatccacatatgcgctaaagacaataacgaactttgtcgtccagattcctaaggatgatgctagaagaatagatcaactgaaatttaaactggaaagccgcatggctattgtatccagtgcaattgacctaataaagctggtagcggcgaggggaaacacgaatttgcaaatcactctgaggttaaccaaggatttaaaagaagagattgataggtttgatgagaagatcaacgaaatgacgcagaaagttgagggttccaggagcgcaaaaacacagaatgaagctattaaagcggtagaaaactatataaaggacttgctattgaggatcgaagaaatcactccattcattaatctttctttaaccacttctggtgccaacttgaacagcgcactcccatatcaactttctcctggtttattattaaaagcctccgatttcgttagcgagaacaatagaaagtatgaaaaggcaatgaagagtaatgagaaaggaacaggtgacaaggagattctaaaagttcaagtggggcctacatttgaggttacactattctctattttctataacctaacttcagaaaacaatgggcaatcaggaattgtttggaaagaggatatgaaacgtgcaaaagcaaggatatatagattgaactctacaggcagaaagtatgattattttatgaaaatagaacaagacttcaatgacggtagatatcatgaggatgatgacaaagaagacacaccacaggaacttgccatagatctgaaccatattaagaagctgtttttcagtgtttccggtaagcttctccgattagaagaacaggattctccagtgttggtattgaagattgaccggagcgatgacaaagaaaatgagagcagtgaaggagacaagggattactcgatgacattacttggtatgcggtaagcggatatgaagcgatagaggaagatgaagaggaagatgaagaggaggacgaagaggaaggaaaagacggagaagaacgaaaggaagaagaagaagaagaaaataaattggaggacaaggattcgtcgatcacactactggagtacatcattcggctgacgtccttacaaagtaacgatcagaaaagtatattggaagtgagtgatgaaaggttatctatatatttgaacgatgaaaatacgaactccagaaaggatagaataagcaattcgacaattgaagagacagaaaaaaagttaaaaaacctaaaactttag

SEQ ID NO: 76567 - DNA, 900 bp, Saccharomyces pastorianus
atgtccacaagcattacagtaagaaatagagatcgatcgctaccaccgctattgctccccaatgtttccctgctagaaaaagatatacggcgtaaaggcacccaaaatgtgggcatcaccgatccagaactcttgttgaccacttggatgaggaagcgggcttttccgactgacgagcttttaggaggctataagagattaaagcctgctgccgctgacagtaatgagtgcgctattggtattgccacggtgacgccgccgccaacgctccccgtaagtgcgattgttccccctccacaaaattacactccaccattgtttgagtatcatcctcatgcccttgcttccatggtcaatgaagacgctaatgcgtcatgcactcaaatgtctataatttcgcgctcaacgagcaactcgacaacctcctctgccacatctactagttcaatttccaagagacaaagaagtggcccaagttgtgacaaatgtcgtttgaaaaaaataaaatgtaatgcgaaaattgagattttgcttcaagacgatactataatgccaatgatctcgaacaagttgcggtacgtcttgactcctgacgatattcggctatatcgaggcacgctgttgcggaatattgccataccggatgatgtcattgagggtacaggctcacgcaagttgattaagcatattgataagttggttttgctcacaccttgtttaccatgcattaagaaaaagcattcttcttcttccactaatttcccaaaaaatgataaatgtactttttcaaaaggctttaccagagctgacataaacatttcatccaaaatctccttaaaatttaaggataaaaccatgtacgacataacctatgatgactataaaagcgttgatttttag

SEQ ID NO: 76568 - DNA, 1539 bp, Saccharomyces pastorianus
atgtcagtaaacccagaatttattgccgatggcatcgacttttatccaacaacgcccgatgccgcgtatttcaatgccgctgatggtaaaaataaagttaacaggataaatggtaactcagaaaatttacaccactcctttgcatcgagttgccgtagatcatctctttcagtcgactttaatgttacctcgtccgattcagaaaaaagtgaacagagctgcttggaaaacaactctcaagaagacgaatatttttgtgacattttttccactgaattaaaattagatgaaacttctaacaagtcaaccgattattccagttcaaatcaccagtatcctgaacaactggagttgcacaattataaactgctcaataaaattggtgaaggggcattttccagagtatttaaagcagtaggcatcaacacggatgaccaagctcctgttgtcatcaaagcaatcataaagaaaggcatttcgagcgatgacaccttaaaagggaatgatagaatccaaggctccagcagaaagaaagtcttaaacgaagttgccatccacaaactggtttcgaaaaataatccgcattgtacaaaatttatcgcattccaggaatcggcgaactactattacttagtgacggagttagtcacaggtggggaaatatttgataggatcgtccaactaacatgctttagtgaagacttagctcgtcatgtcattactcaggtggcaattgcaattaaacataggcactacatgggtattgtgcatcgtgatgtcaaaccagaaaacctactatttgaacctatcccattttatggccttgatggggacatgcaaaaagaagacgagtttacattgggtgtcggcggaggcggtattggtttagtgaagctaatggacttcggactagccaagaaacttcggaacaataccgcaaaaactccctgcggaacgatagaatacgtaacaccagaagtattcacctccaaacgatattctatgaaagtagatatgtggagtattggctgcgtactattcacgttattgtgtggatatcctccgttttacgaaaagaacgaaaaaacattattgaagaaaatatcgagaggagattacgaattcttggcgccatggtgggacaacataagttctggcgctaagaacgcagttacccatcttttggaggttgacccaaacaagagatacgatatcgatgacttcctaaatgatccttggttaaattcctacgattgtttgaaggattcaaactcaaattcttatgccagcgtgcaaagcatactaaacgattcattcgatgagagagcagagaccctacattgtgcattaagctgccaatctgaaaaacaagatgacaccgagttttccagaagtgaaagctcggaatacatatttatgacggaagaagacagaaatctacggggcagttggatcggtgagccaaaagagtgttttaccttagaccttgcaacatcttctatataccgaagaaggaagaacatgatattcttctggtaa

SEQ ID NO: 76569 - DNA, 3252 bp, Saccharomyces pastorianus
atgtcatctgaggatatcatttatgatcctcagttcaaacctgttcagggaatctacgagaatagattaagacaatttattgatactggtggggattaccacgacttaaatttacccaagttctatgataagaagcgcatttcattagatcatgatcacgttaaggtttggtggtaccaggtttcttttgaacgtggatcttcccctgtttcccctgataagaggccatcttggaaatctattattgaacgtgacaagaagggtgaattggagtttagagaagcgaacataaatcagccctttggacccagttggtctaccacttggtttaaggtgaaaatctctttgcctgaagattgggttaaatcagacgagcaactacttttccaatgggattgttctaacgaaggaattgtcatagacccaaagactctaatccctgtgactgctttttcaggtggtgaaaggactgaatatgttttaccgaaaacatcggatgggaaacatttcttttacatcgaagctggtaacaatggtatgtttggctgcggtgcaggatccactataaatccaccagatgataatagattttttcatttaagaaaagctgatatcgtttggcccgatctagatgctcgtgcattgtatatcgatttttggatgctaggggatgctgcaagagagctacctggagactcctggcaaaaacaccaggcaagacaactaggcaatgcagttatgaatctttttgatccgaatgatcgttcaagtgttcgtaaatgtcgtgaattactacaaagggaatactttgactcctttttagaaagcagtaaggtttacgaacaaggtgaatctcaagttttaacaaatgtttatggtatcggcaactgtcatatagatacagcttggctatggccattcgcagaaacaagaaggaaaattgtgagatcttggtcttcccaatgtactttaatggatcgcttcccagagtataaatttgttgcttcacaagcccaacaatttaaatggttattagaagatcatcccgaatttttcaataaagtgttaattccaaaaattcagcaatctcagttttttgctgttggtggtacatgggttgagaatgataccaatattccctcaggggaatcgctggcaagacaattcttttttggtcaaaggtttttcttgaagcattttggtctcaagtcaaagatattttggttacctgacacctttggttattcttcgcaaatgccacaactttgccgcttatctggtattgataaatttttgactcaaaagctttcctggaataacatcaacagttttccgcatagcacgtttaactgggcagggattgacggttctcaattattgactcacatgcctcctggtaatacgtatacagcagattcacacttcggtgatgttttgcgtactgccaagcagaataagacgccagaatgttacggctccggtttaatgttgtacggaaagggtgatggtggtggaggaccaactgaggaaatgctgcaaaaaatgaggcgtattagatctatgaataacagaaatggtaatgttattccaaagctacaagttggtataacggttgatgaattttatgatgacattttgaaaaggactaaccaaggccatgatttacccacatggagtggtgaattgtatttcgaatttcatagggggacatataccagtcaagctcagaccaaaaaattaatgaggttgtccgaaattaaactacatgatttggaatggatagctgccaaaacatcagttctatatcccgattcgtataaatacccttccaaacagattaacgaactttgggagaatgttttgttatgtcaatttcacgatgttctaccaggatcatgtattgaaatggtatataagtatgaggctgtccctatgttgcacaacgttgtgaaagaatgtacttccttaatagacaaaaccgttcaatttcttcagagtcagagtaaggcagatttggttgagatgagaacattaacttggtcaaaaccagaaaaggtttctgaggagtgctcgttgaacggtagttacacgtcctctgtaaccgggtacgatgactatatagtccttgccaatgggaaattgaaagttatcatttgcaaaaagactggggtgatcacaagcgttacggatgaaactttgggggtagaatacctggacacggaacatggcagaaacaaattgggcgccaaccagtttgttatttttgatgataaacctttgggctggcaggcttgggatactgaactttattccgttaaccaatacaagtatgtaacaaagccgaagaaagttcaagtttcctgcaacacaaaagagaaatgtgctgttgaggtcatttttcaaatttccgaaaaatgcaaaatcaaatcagtgatatcactcaatgcaactgcagtcactgatgctaaattaagtaaagtagacatttctacgacggtagaaaactgggatgctagaaacaaatttttaaaagttgaatttcccgttaatattcggaacgattttgcttcgtatgaaactcaattcgggattaccaaaagaccaacacattataatacctcatgggacgtcgctaaatttgaggtttgccatcacaaatttgctgattattctgaatacagcaagggtgtttcaattttgaacaattgcaaatatgggttttccacacacggtaacttgatgagattatcattattaagatcaccaaaggctccggatgcgcatgctgatatgggtactcatgaaataaaatatgctatctatccacatagaggagcactatcaagcgacactgttaagctcgctcacgaattcaattattgcttcaaatacaaactccccaaagatattggcatgaattttgatgacatcataagcatttccggagatgagaatgtcattttgtctaacataaaaagaggcgaagatgatagtgctgtcaagtccaactattcattaaatccaagggacgaacaaagtattgtggtaagggtttacgaatctcttggcggggaatcttttgcttcactaaataccacactaaatttgaagcgtattgagaaggtcgataacttggagatgaaagtttataagagtttgacagcaacgcgagacgaatcaaatcatgcaataaacagaattcccattaaattgagaccttttgagattgcctcattcaggttgtatttctga

SEQ ID NO: 76570 - DNA, 1131 bp, Saccharomyces pastorianus
atgtgtcaagctaccaatggcccgagtagagttgtgactaaaaagcataggaaatttttcgaaagacatctacagttgcttccctcttcacatcagggacatgacgtgaacagaatggcgataatattctactcaatctcaggactctctatatttgatgttaacgtttctgcgaagtacggcgatcatcttggctggatgcgcaaacattatatcaaaacagtgctggatgatacagaaaatactgcgatatctggatttgttggaagcttagtcatgaatatccctcacgcaacaacgattaatctaccaaatactctctttgcattgttgtccatgattatgctgagagattacgaatattttgagactatactagacaaaagaagcctcgcgagatttgtttctaagtgccaacgacctgaccgtggctcgtttgtatcttgtttagactataagacaaattgtggatcttcggttgattcagacgatttaaggttttgctacatcgcagttgccattctgtacatatgcggatgccgatccaaagaagactttgatgaatacattgatactgagaagttgcttggctatataatgtcgcaacaatgctacaacggagctttcggtgcccacaatgaaccacactcagggtacacatcttgtgcgctgtctacgttagctttactctctagtttggaaaagctatcagacaagtttaaagaagacaccataacctggctattacataggcaagtatcaagccatggatgtatgaaatttgaaagcgaattgaatgccagctatgatcaatctgatgatggcggtttccagggaagggagaataagttcgctgatacgtgttacgcattttggtgcttaaattcactacacttactaacaaaggattggaaaatgctatgccaaactgaactagtcacaaattatttgcttgatcgaacgcaaaaaacattaactggaggctttagtaaaaatgacgaagaagatgctgatttatatcacagctgtctagggagcgctgcgttagcattaattgaggggaaatttaatggagaattatgcatacctcaagaaatatttaatgattttagtaaaaggtgctgtttttga

SEQ ID NO: 76571 - DNA, 819 bp, Saccharomyces pastorianus
atggttaaaacgattgaagtagtaagcgaagtttcaaaggtggcaggtgtaagaccatgggcaggtatattcgttgttgaaattcaagaggatatactcgcggatgagtttacgttcgaggcattaatgagaactttgccattggcgtctcaagccagaatcctcaataaaaaatcgtttcacgataaatgttcaagtctatgtaaccagctgctgcagttgtttggctgctctatagtaacgggcttaaattttcaagagctgaaatttgacaagggcagcttcggtaagccattattagacaacaatcgttttcttccatttagcatgaccatcggtgaacaatatgtagctatgttcctcgtaaaatgtgtaagtacagatgaataccaggatgtcggaattgatatcgcttctccgtgcaattatggcgggagggaagagttggagctatttaaagaagtttttagtgaaagagaatttaacggtttactgaaagcgtctgatccatgcacaatattcacttacttatggtccttgaaggagtcgtatacaaaatttactggaactggccttaacacagacttgtcactaatagattttggcgctatcagcttttttccggctgagggagcttctatgtgcataactctggatgaagttccattgattttccattctcaatggttcaataacgaaattgtcactatctgtatgccaaagtccatcagtgataaaatcaacacgaacagaccaaaattatataatatcagcttatctacgttgattgattatttcatcgaaaatgatggtttataa

SEQ ID NO: 76572 - DNA, 678 bp, Saccharomyces pastorianus
atgtctacagtatctaggacagttacaattacaatttccgttaaaaaactaattacttacatagaattgcgctatgggatggagtcttcgacctgtccattttgccagtcagggacactgatctcattggcggcggtatttttttgccattctggaatggaggcgttgctatcaatagtttgttctcttgcttttttccacgctggaacagcattgtcatctttattagcatcgctgccgttttccttttctttatcactttcttcttgcatgcccattttggcaagaatctcagacgcagatggaatcgtatctatgccaggtataccattaggagatatggaaaataatctattgtcctgcgcattaccggattccatacggttattcattaagcttttcagagattccatttctttttggatattatttaactcttgcatgccgtcattatctgaaacaaatttgtcgatcgtattttgcatattgaccacctcgagcttaactattctaaattcgtcttcgatcttttccctgcttcttgttgtctgcacaagcgcctgtttcagttcagcaatcgtgtcactaagttcctttaatgtttcgctttcctttttcctaaactcagcttgctccgcttcgatggcattgaggactgtatcgattttggagaattga

SEQ ID NO: 76573 - DNA, 1131 bp, Saccharomyces pastorianus
atgtcaacgtttgggaaactgttccgcgtcaccacatatggtgaatcgcattgtaagtctgtcggttgcattgtcgacggtgttcctccaggaatgtcattaaccgaagctgacattcagccacaattgaccagaagaagaccgggtcaatctaagctatcgacccctagagacgaaaaggatagagtggaaatccagtccggtaccgagttcggcaagactctaggtacacccatcgccatgatgatcaaaaacgaggaccaaagacctcacgactactccgacatggacaagttccctagaccttcccatgcggacttcacgtactcggaaaagtacggtatcaaggcctcctctggtggtggcagagcttctgctagagaaacgattggccgtgtcgcttccggtgccattgctgagaagttcttagctcagaactctaatgtcgagatcgtagcctttgtgacacaaatcggggaaatcaagatgaacagagactcttttgatcctgaatttcagcacctgttgaacaccatcaccagggaaaaagtggactcaatgggtcccatcagatgtccagacgcctccattgctggtttgatggtcaaggaaatcgaaaagtacagaggcaacaaggactctatcggtggtgtcgtcacttgtgtcgtgagaaacttgcctaccggtctcggtgagccatgctttgacaagttggaagccatgttggctcatgctatgttgtccattccagcatccaagggtttcgaaattggctcaggttttcagggtgtctctgttccagggtctaagcacaatgacccattttactttgaaaaagaaacaaacagattaagaacaaagaccaacaattcaggtggtgtgcaaggtggtatctctaatggtgagaacatctatttctctgtcccattcaagtcagtggccactatctctcaagaacaaaaaaccgccacttacgatggtgaagaaggtatcttagccgctaagggtagacatgaccctgctgtcactccaagagctattcctattgtggaagccatgaccgctctggtgttggctgacgcgcttttgatccaaaaggcaagagatttctccagatccgtggtccattaa

SEQ ID NO: 76574 - DNA, 576 bp, Saccharomyces pastorianus
atgaaatacatccaaactgaacaacaaatcgaagtcccagaaggtgtcactgtcagcatcaagtccagaatcgtcaaggttgttggtccaagaggtactttgaccaagaacttgaagcacattgatgttaccttcaccaaggtcaacaaccaattgatcaaggttgctgttcacaacggtgacagaaagcacgttgctgctttgagaaccgtcaagtctttggttgacaacatgatcactggtgtcaccaagggttacaagtacaagatgagatacgtctacgcgcatttcccaatcaacgtcaacattgttgaaaaggatggtgccaaattcattgaagtcagaaactttttgggtgacaagaagatcagaaacgttccagttagagatggtgttactatcgaattttccaccaacgttaaggacgaaattgtcttgtcaggtaactctgtcgaagacgtttcccaaaacgctgctgacttgcaacaaatctgtcgtgtcagaaacaaggatatccgtaaatttttggacggtatctacgtttctcacaagggttttattactgaagatttataa

SEQ ID NO: 76575 - DNA, 936 bp, Saccharomyces pastorianus
atggaaaaagcttccttgaacattgctcagacaaaggaaataccactgacagataggcgaatggggctccgaggatggaaggcgtgcagtaggccgcatttactaggtcgaatattgcttttcatgagcatactatttattacaagtgcggaattaagtagcgacgtaagctccagagaagtatatatgccgatattcaataataagctgtcgttcaaagtgccgcctattaaacgctcgttgctgctaggagcagccctgtacgaagatttcgaatatagctctaacaacagtgcttctgacggagcgttctgtaccgtgtttaatgcaggcatgaatgacgcgtctagggaggttgtttttgaaatccatgtaatggacgtgctgcaagaagaaacagactccagcaggttcggaggaaccagtcacgagcgtgggaggcaatcactgggcttcagtgtttttaataacaagaatggtgatttgttaagaagcaagaaaaatctagcgagcgggacgtcggtcatcgaagttaatcctgggaactgtaatgagttcttgatatgtttcataaatttagtctatgacggatcgtggagctcgattgatactgaaaaatctgtaacaataaagatgacctacaatgataagctcgatcctgacatgttgttgcatttggtcaatcaaatgacaccgcaggtggtgaaagcattgaataccgtctctgacggtcttttccagatagtgagcgataccacacttcttcaaatggaaagtgataggcgagatataaatgaggcgacgtatagttatctgattgtggggtttgtgtcgcttatggtagcacagctgatatccaatattatagttactacctatttgattgttaagatcaaaagtaatccttcatgtcatattaaaaagaaaggtttgtaa

SEQ ID NO: 76576 - DNA, 2106 bp, Saccharomyces pastorianus
atgaacggtattgatgatctcctaaatattaacgacagaattaagcaagtgcaaaatgagagaaatgaactggcatcaaaactgcaaaatctaaagcaatcattggccagcaatgacacagaagtagcattatcagaggtgatagcacaagatattattgaagtaggtgctagtgttgaggggcttgaacaattaagggcaaaatatggtgatctgcaaatcttgaataaattggaaaagatagctgtacaacaaacacaaatgcaagctggcgtagacaaactagatagttttgaacgtcagttagatgagttagctgaacaaccgccggatcaattcactctagatgacgtaaaggcgctacactcaaagttgacgagtgtcttcgctacagttcctcaaatcaataatatagattctcagtatgctgcttataacaaacttaaatcaaaggttactggcaaatataatgacgttattatacagaggttagctactagctggagtaatacgtttgatcagaaattgttagaagcgcaatgggatacgcaaaaatttgcatccacatcagttggtttggttaaatgtctgagagaaaattccaccaaactttatcaattaagtctgctctacttacctttggaggaggaaacacagaatggagatagcgaacgcccactttcacgctcaaacaataaccaagaacctgtgctatggaattttaaatcactagcaaacaatttcaacgttaggtttacgtaccattttcacgccacatcgtcatcctctaagattgagacgtattttcagtttctaaacgattatctaacggaaaacctatacaagtgcatcaatatttttcatgacgactgtaatgggttgacgaagccagttattcatgaacaatttattaattacgtcttacaacccattagggataaagtaagatccaccctatttcaaaacgatttgaaaactttgatcgtcctaatttcccaaatcctggctacagacaaaaatttattgaattcttttcattaccatgggctaggtttggtgtcgttaatttccgatgaagtatgggagaaatggatcaactatgaagttgaaatggccaataggcaattcatcaatataactaaaaatcctgaagatttcccaaaatcttctcaaaattttgtcaaattaatcaataaaatttacgattatttggaaccgttctacgatttggattttgatctattagtaagatacaaactaatgacttgttcattaatttttatgaacttgacttcatcctacttggattacattttaactgtcgattcattgaatgaaacaagaactaaagagcaggaattgtatcaaactatggcaaaactgcaacatgtcaactttgtgtacagaaaaatcaaatctttgtcttcaaacttcatttttattcaactgaccgatattgttaacagcacggaatctaaaaaatacaattcactgtttcaaaatgtggagaatgactatgaaaaagctatgagtacggatatgcaaaactccattgtacacaggattcaaaaactgttgaaggaaaccctacgaaattacttcaagatttcaacttggtcaacattagagatgtctgtcgacgaaaatatcgggccgtcgtccgtaccaagcgctgagttggtcaattcaattaatgttttgagaagattgatcaacaaattggattcaatggatatcccactagctatttcattaaaggttaagaacgaattgttaaatgttattgttaactattttacggagtcaattctaaagttgaacaaatttaatgaaaacggtttaaatcagtttttacatgattttaaatccttaagcagcattttgagcttaccgtcacatgctaccaattataaatgtatgagtttacacgaactagtaaaaatattaaagctaaagtatgatccaaacaatcagcagtttttaaacccagaatacattaaaacaggtaatttcacatcattgaaagaagcttattccattaagtacttgaaggacacgaagattcaagatgcactctacaggattatatatggtaacatattatag

SEQ ID NO: 76577 - DNA, 1851 bp, Saccharomyces pastorianus
atggctcacgaggttcatagaataaaacctaaactaggacggacccaaatattttgggtttttctagcctttagagtactgaatgcagttctgacgagaaccttctttcaggctgatgagttttggcaagcattggagccggcacattggaaggctttcaagtatggtgaactgacttgggaatggaaattcggagttcgtagctatttatttccgatgatttttgagctgacttatagattggtttctctatcgtcaatccttcttcactatgcacttcttcttctctcaacgatagggtctgatttattaattttactactgccgaaatatgagttaagttggcaagtcgctgaagacttgaagaggcttccttttgatgtcacacggtcgttcgaatattatggtgtgatatatgcgccaaaaatagttatggcagtactagcttccataggggaatattatatcgtaagatttgttcaaaagctctatttacttacacttgataagagaaacgagaaggaggaagaggagagacgcagcggtttatccgagattacgaagtttgcactgcttttaagtttaactaatttttttaattgcttttttattacaagaacgttcatcaactcttttgaaatgattttaacttctattgccctctattactgggactggacaggcggacaaatgataaaagagtcatcttttactaagtcgcttatttttgcatttctggcatgtttgcaaagacccagcagtggacttatttgggtaattcccagcatttccctaatattaaacttggtaggcaaaaagcagtatcatttacttttcatcacattttccaaagttttacggtctttttttctggtatttactgcaaatgcaattatcgacacgtatttttatgaaaaagtaacgtttccctttttccgatttctaaaattcaatttcacaacaccattatcaaagttttatggggtagctccttggcattttcatttctttcaaagcttacctatcgtattaggtgcaagtattcccgcttttgcatttggattattttttccactaagcaaaaggagtttcccaaagaagtatttaaacccgtttttccaagtgaaactcactatcttgttgaatctgttggtgtactctacgttacctcataaggaatttaggttcatcttcccattacagccacttttcatattaatatcatcatttggccttttgagacttgatagagattattggaaaagactatctggcctaaaatctttactctggcttgttccattcgtgtcggtgttcatcgcattacttttggacacattccacgaatctggatctatcgaagttatgaaatttttacatgaagagccagaaatagatagtttgggattcataatgccctgtcattcgacacctggtcaaagctatttacaccgcagtgacattcaagatctgtggtcgattacttgtaaccctccattgcatttacttggagacccagaggcttactccaaactagagacctacatggatgaaagtgaccatttgtatgacgatatatcggcattcatttacaaaaattttccaccgccttttcgtaaggatctaaggagtccaggtaaaacatacagccacgaatggccaacatatttggttgttttcgagcacatggaaaacgcatttctaaaggatttcctgaaagattcatcatacattgaatacaatagattcttcaactctcttgcgcactgggattcaagaagatcaggagacataataatttattataaattaccattcgattatagcgatattccagcggcaaatatttaa

SEQ ID NO: 76578 - DNA, 2733 bp, Saccharomyces pastorianus
atgttaaacttcaccggtcaaacaaggagaagaaatgtcaatttagggaataggactcgaaattcaaagaaggatttactggaaaaggccaaaagggaacgtgaaaggagagcacaagataagctcaaagaagacgccagtaaaaccattcaaaaaagcatcagaagacatttttcaaatgtgaggctcttcaaaaacacatttactagttcgcaacttgttcatatgataccagcttacgggggcaaattaatctattacatttctcaatatgatctgcagcaactgctaaaattatctcataattttttgagttcttatcctaattctttaggcaacagacagctattgagcttgttgaagctatatcaagatgatgcactggtggctgaaactctaagcgatcttaacatggactgccctacagttgacgaatttttagatagtctatccgtttatctctgtcgggcttcctccttgagttattcctcagcttctaagctagctgatgtcatagaagcatgggaagtaatgcatagcagtgcctccattagtattttttcgatatcgataggatcttacgaaaaacggccatttgcactacagttttattgcatacttgccgaaagaaaccttttgccccaacttatcaacacaaatccgatattatgggataacatggcaaagacatattcacactgtagtaaaggtggccaaaaaaatatcgccaagctactcataccaaacttcaacaatcatattgctccatcagtcttgcgtagtgataacgactatgtcttgaaattttatgaaaaggcatttatagacgaagttattgctactactgcaaattacgtttctgatgaagatcacgtgaagaatttgatgtgctacattgcaagctctcccaatcaaagctgtaagaattctgtccttattaccttactgtctaacaaagacttcgtgagaaggctctcatgggaattctttcacactaaattcaacgccagcaagactgaggctcaccccctgttttcagttttggcacagcttatcgacatgcaccttttaatatcgacagatcgggagttattagactacaactctgtgacacctatcgaagaactaaagaaatttacatccacgttaaaagattttactttccgacaatattgggaactacctaaaagtgaaaggaaccctatgttaaaggaagcagtaccacttttgagcaaagtctacgaaagggactcaagattgcactttctatccacggagaataatccaacctattgggaaaactctgaaaagcaatttttaaatttgagattttacgaagaattacaggagtacgaagatctgtatagagaacacttagaagaggaaagtgatgaggatatggaaaaggaaatagatcttgataaagaaaggcctcctttgaagtctttattattgaacaaaatgaaaaagagattaaagtcatcattacgtttccgaaagttggaaatacttttggaattaccattttttattccttttgaagaaagggtggacttattttatatgttcatcgcactggacaagaagcgattatctttagatgacgatcacaacttgatcaatatgtttaccccctgggcctccaccggtatgaggaagcaatccgctatcatctctagggataatgtcttagaagatgctttcaacgcatttaactctataggagaaaggttcaaagcttcattagatgttacttttattaatgaatttggtgaagaagctggtattgatgggggcggcattaccaaggaatttttaactactgtgtctgatgaaggatttaaagatccaaagcacgagttatttcggacgaatgatcgctacgaattatatccttctgttgtttatgacgctacgaaacttaagtatatatggtttctgggaaaggttgtaggcaaatgtctatatgagcatgttttgatagatgtatcttttgctgatttctttttgaaaaaattattgaattactcgaacgggtttttatcttctttttctgatctgggaagctatgattcggtgttgtataataatttgatcaaattattgaacatgaccactgacgagatcaagtctttagatttaacctttgaaatagatgagcctgaaagttccgcaaaagttgttgacttaattccgaatggttcaaaaacgtacgtgacgaaggataatgtgttgctctacgttactaaagtaacggattacaaattaaacaaaagatgcttcaaaccagtttcggcattccatggagggctcagtgttatcattgccccacattggatggagatgtttaactctatagaactacaaatgttaatatcaggtgagagagataatatcgatttagacgatctgaaatctaacacagaatacgggggttataaagaagaagatcagacaattgttgatttttgggaggttttgaatgagtttaagtttgaagagaaattgaattttttgaaatttgtcacgtccgttccgcaagctcctctgcaaggcttcaaggcattagatccaaaatttggtatcagaaatgcagggacagagaaatacaggctgcctacggcatctacctgtgttaatttattaaaattgccagattatagaaacaaaacaattttgagagagaaattattatatgcaataaactcaggcgccaggtttgacttatcataa

SEQ ID NO: 76579 - DNA, 2409 bp, Saccharomyces pastorianus
atgagatttctccaggtttataaatcatcggcattaattggactaataatattgttagccagtaaagtaaatcttgcagaggcaaaaaggaagctggtagccacatcattggtcacatgtatggaaaactcgcagctgtcagcaaatagttttgacgttgttttcaatccagacgacaggtcattacattatgatcttgatatgtcaactcaaattgattcatatatttttgctgatattgatgtctacgcatatggtttcaagatcattactaaaaatgtcgatctttgttcaatcaactggaaacagttttgcccggttcacccaggtaatattcagatcgactctattgaatacatctccagtgagtacgtaaatgaaattcctggtattgcataccaagtccccgatatcgacgcatatgccagggtcaagatcaccaacaatgtgagcgagtacctagcatgtatccaaatatacttctcaaacggtaaaacagtttctcagattggtgtaaaatgggcaactgcagtggtagcgggaattggtcttttactatctgccatcttatccacttttgggaactctaccgcagcctcacatatttctgccaacacaatgtcacttttcttatacttccaatctgttgtcgtggttgccatgcaacatgttcatcgagttccgcctattgcagccgcctgggcggaaaacttggtttggtcaatggggttaattagaatctcattcatgcaaaggattttccggtggtatgtgcaatccactggtggtacgcctagcttatatctgacttcaacatctatgtctgttttggctcaaagaagttggcaatatttgatggagctcccattaatcaaaagagctaccaatgttttgtatggtaatgcaaatacattaatttttagaggaatcaaaaggctaggctataaaatgggaatcgaaaatacgtccatcgtttgtaccggttttactttcttcgtcttatgtggatatgtgttggctggatttatcatagtattcaaatgctgtgtggagttagccacccggttaggatggatccaaaaggcaaggttttgggaattcaggaaacaatggagaatgatcttaaaaggtgctcttttaagatatatttacatcggtttcgttcagttaacaattctcagtttttgggaatttactgaaagagattcacctgctgttatcgtcatcgcatgcctttttattcttttgtcatgtgggttaatgctttgggctgcatggaggactgtttttttcgcaagaagatctgttgcattgtacaacaacccagcagccttattgtatggagatgaatatgtcttacacaaatacggatttttctatacaatgttcaatgccaatcattactggtggaacattgttcttttatcctacatttttgtaaaatcattattggttggatttgctcaggcttctggtcaaacacaagttcttttcatgttcatattggatttgttttacttcgttgctattatctactataagccctatctggaccgtccaacaaacataatgaatattttaattgctactgttactgtagttaattcctttctattcatgtttttttcggacttgtttaaccaaagctacaaagtggctgctattatgggatggatatttttcattatgaacgctgcattttcgttcattttactaatgatgatattggcattcgctggtatgatgcttttctcaaagaaccccgatctaagatttaaacctgctaaggacgatagaacttctttccaaaggaacactatgaaaccagaaggtactgttaatagatcagtagcgaacgagttgcttgcgttgggcaatgtggcaaaagaccatgacgacaattcagattacgaatcaaatgatactggtgtgaatgatgagctaaagcaagcacaggatgaaaccactcccacaaccgtaacatcaagtgatgataacaagcctacgttttcagagaaaatattaagtaaattctctaggcctaagaatgaaaacgcaagcacagatgctctgagagttgaagctccaaaacaacaaacgtttcctcacaacttaacgaatctttcacgagaaaacctatcaacattaggctctaaaccttatccaggacacacaagatcacagtctgatgcgcataatggactgatcaattcctttgaagaggaagatacaagttcaaataccgatccatttcacgactccactgaaggagaccttttagatacctcaagttcggacggaggatttaggtcgcaaaactatgttcgagatgacagcataaatagtttgggaaacaataaacaaccactgaggaaaccccctggattcttcgatgaaggatttatgtga

SEQ ID NO: 76580 - DNA, 1038 bp, Saccharomyces pastorianus
atgtacaactttttagaatttttcttcttttttataacgtacaccttatttaagagcactttcgttcaaggaaaaagttcatttcctggacatgatgtgtgtaagttcgaagaccaaaatttccagacagagttcttcttaaatgttcttaaaggcgacaagttacagaacttgaagcaggagtacgaacaatacaaaaaacaaagtactttgtacacaggctttgtaattgaaaaacaatatgaataccaggtagcgcccttgcaaatcaataattttcttcaagtgaccttttgtaaaggaggaaagccaatttggaatcatattctaccctttcaaaaggatttagattgggcagaaccactatgcattccagcccaggaggatgatactatctcccaaaacagctcagtatgtttcaagtttgcaagggtgcagaaatatacacagcgtaatgtaaccctttactttcctaataaatttgttggattcgtatttgtttgcaattcttcaaagacgcatccccccactcagagcaattttgaaactattccattaacgcctatcatttctgatgatattagagattacaaaatatcttggtcaattaaaggaagaatcaccaaggtggtaccttatctacattcgttaagtattcctatgtccaaatatgagatgctcatcaattcagataagaacatatcaaacgaattggaatataaatccttaacttcggagttttggaagagctataaaaacttaagaaagtttaaaaacaaagaaatgtcttggataaacgaaataaatcctatggagcaatatgatagctctgggaatgaaaatgtcccgaattttcatgaaaaactagaccgtacaataaatcggattgcgcaaaacatagaaaggcctcatgatgcactaataagagcgatagccgcacataatagaaactctaatagtggaaatattacaagaaggaaatatttgaggaggaagatctcaaagatgttaaaaaataagatacctcttaagaactga

SEQ ID NO: 76581 - DNA, 963 bp, Saccharomyces pastorianus
atgattttagcgtacaatcgtatcaggagtataatatcgtcttctttaggtcgaatacatgtacggtataattctaactcacaaaacagatggctgaatagacaactgaaggatccctacacaaaagaggccaaggtccaaaatctgaggtctagagccgcattcaaacttatgcagattgatgataaatatcggctttttagcaaaaacaggaccgatcagagaattctagatcttgggtatgcccctggggcttggtcccaagtagcacggcaaagaagttcacctaattcaatgatactgggcgttgacattctcccttgtgaacctccgcatggtgtgaactctattcaagctaatatattggccaaaagaactcatgatcttatacggctctttttttctaagcatttccaattgaacagacacgatgatttgcataaggaccatggctatttccagaacatgctcgaggaagagctaacccatgtgaaagatactgaattgtaccgtgaaattttcacctctgatgacatttatgaaactccgaatacgaatagtaccctaatagaacgagaaaaattcccagttgatgtgattataagtgatatgtatgaaccctggccccaaacaaccggtttttggaacaacattactaatcaagcttattttaggatggctaatacatctggtgtcagtataagagaccattaccaatctattgatttatgtgacgcagccttagttacggctatagatttattacggccattaggttcgtttgtttgtaaactatacaccggcgaagaagaaaacctatttaaaaaaagaatgcaggcagttttcactaacgttcataagttcaagcctgacgcttctagagacgaatcaaaggagacctattatattggattaaagaagaaaagaaatgtagataaactggacgtgtttagtaattcataa

SEQ ID NO: 76582 - DNA, 654 bp, Saccharomyces pastorianus
atgtctaagatcacctcttctcaagtcagagaacacgtcaaggaattgttgaagtattccaacgaaaccaagaagagaaacttcttggaaaccgtcgaactacaagtcggtttgaagaactatgaccctcaaagagacaagcgtttctctggttctttgaagttgccaaactgtccaagaccaaacatgtccatctgtatcttcggtgatgctttcgatgttgacagagctaagtcttgcggtgttgacgctatgtccgtcgatgacttgaagaagttgaacaagaacaagaagttaatcaagaagttgtccaagaagtacaacgctttcattgcttccgaagttttgatcaagcaagttccaagactattgggtcctcaattgtccaaggctggtaagttcccaaccccagtttctcacaacgatgacttgtacggtaaggtcactgatgtcagatctaccatcaagttccaattgaagaaggtcttgtgtttggctgttgccgttggtaacgttgaaatggaagaagacgttttggttaaccaaatcttgatgtctgttaacttcttcgtttctttgttgaagaagaactggcaaaatgttggttccttggttgttaagtcctccatgggtccagctttcagattgtactaa

SEQ ID NO: 76583 - DNA, 1302 bp, Saccharomyces pastorianus
atggacatgactaaaaaccacaccactgacacagaggagtttgatgatggtgatatacgtccagtcagtttgggaattgtggacgattataacacttcgttcgaattacctttgaaaccaaagtttttacagagtgagaatttctcagatttaacaagtgaatgggaccagtctagatcaaatacgcctggtcttgcagaaggcaagactgagaaagcacagccatgcggtacaacagatagttcaaaaaatagaatacatgtagagcaactgttggaatccgctaatgaaataaataattatttggcgcagaatatagagaacataaacaattttcaggtggggctattgaatggagggaaaggattatatagttccatgggtgatgattcgagcgcgtgtattaatggcactaattttagctcaatgtccaattttgaactaagtgatgatgagctggaggataccacgggttgcacaagttctatttttgataaagatcttttccaccaacaaaacgggctaagcatacctcgccgtagatcaccactcttcaaatctccaactgccagtttcgaaattggcgatgctacggatgtggaggagcaagatattgatgactccattttttctgaatgtagcagcattacaagctttgatataggagggttgcatatcagtctaccacacgatgaagaagaagatcaagaaaaaactaagtccgaaagtgaaaacccgttgctacatggcataccggttgatgtagaagtgccccacatatcggttgatgaagctctggcgaatttcaaggaaaccatagaactgctactaaaacttagtggcaatagaaagtgtaccggtttcaatactggagtggagaaaaaagaatactcgaatttctacatgaaaagtaaacccaccttatcatcagcagattttctcaagagaatccaagacaaatgtgagtaccagccaactgtttaccttgtggcaacatttttaattgacacgttgtttttaacaagggatggcaataacattttgcagttgaagttaaacttacaggaaaaggaggtccatcgaatgataatagcagcggttagattgagcacgaaattattggaagatttcgttcactcacatgaatattttagtaaagtatgcggtatttcgaaacggcttttgactaaattagaagtcagtctattgatctgtgtgtgcaatactaaattaatggtcagtaacaggaaattagccgcctccaaattacttttgaatgaactacggtctttctgtgtatag

SEQ ID NO: 76584 - DNA, 3795 bp, Saccharomyces pastorianus
atggtgttatataaaaggaaacctatattacttcctgatccaaaacctttaccattggatttgaatgtacaagtatggcatattgaagagactggagaatggttttctagttacgaagaatttctagaaaggtttgatttctacacacgccaccattttacatgcgaaatcactggtacttcttgcctgacttttttccaagctctggatagtgaggagacacaattcaaatacgtcgaagacagattcccattaaagttgagagaaccagttgcaagatttttacattttaacggaataagaaggttagatgcattggtggagaaagtttacgcaagatttaaaaatgactttttcccaggagaagttgtttatctacgtaaacagaaagactcttctaccacaagctctaattcccaacaaagtactcctcaacctgataatatggtcgaaatcaacagtgttggtaatcctggcttaccgcagtaccaataccaaagacgttatgttatcaaagaaaaggtccaatttaacgcaacgataaatccagagagcagggaaatagtgatgcccgctcatactaaatacatgctgatagaagaagcagcttccagtaataaatccttcattgttgatcaaggacaaatttacagggaccgttccactttcactaagcacttaatcaaatgttttttcaagattactttacagagggcatcttcgaaaatgggtgcaccttggtgtgtcaaaccggaatatttagcgatgtatggtttaacgatggaatggccaaaagatatgttaaaatataaagaagatgaacctgtcgtagcaagacgttccaacagtgccaatgtttcatccccagaaagtgaaaagaataaacgtcaaagtaaatcatcgggtaaaagtaacacctcaaacgatgcttctaacaaaaaagaaaccaagaaaaaaagaaagccaaccgaagtaaatgattctgagaataattcttcggaagaagacaagaagaagggtcaaaatgtcacatcagaaacacattctaaaaaaaggaaaaaggaaaccaatgaggaaccgaacacggaaaacgtcgaaagcgttcctacaccagctaatgcggagcctcaggctttaacaataacgagcataatggatgacctagctttgccatatcaacatccaccgaacatctttccaaacttaacgtattataatgaaaaattagaatgtatttcattaggttctacagaactttccagaccttttgattcttttggaaagctattacaagcctatcagtttctgaatacgtttggttcgaaaatttgtctctctcattttagccttgaccaattcattacttctttgaaatgtacagacccatatgagttaaagggcgaagttgttttagtgaacataagaacgcaaacgtctaaagaacaagagattgaaaataatggcctgccgatgaaaaacaaagcagagactactactgaggaagactctgaaaactcaagtgactggcaaagaaattcatttattcgtgatatgataatgaaaagaaattccgacaaggttgagtacaagattgttcacgatgacccagcatccgatgatatacttgatgatatcaatcataatgggtctgctcttctcattgaagtttttaccgcgctcttacgtttgttcatcaacgaagaaggcgattggagttgcatcgtcgttgaaaactggataatagacgacaagggagtccttatggagagaaaagatgaaagaggtgagggggaggcgaagcaaaaacgaaatgctcacggatactttttacaagataaggaaaagatcgacaacctaaaggacacattaaaggaaaacgcaacagaaattcaaaaagaatcagaagctaaaaacgaaacaaattcagaatctgattctaaatctgattctgacagtgaagaacgagatcctaaattagaaaagtgtttgaactaccgcaatgttaactggatagaacgcttgacgaaaaggcaatttaataacagttactggctaataattttactgggagtcttagaagattgtagacatcttcccatgtatacagagtttattgattctttcatagaaaagatcatacccaaagatatatcagatactcaattgcccaaacagctttggagaaatttctgtcgaaagctgtcgttcagtgacaaagtcaatgcgctgtggatacttgtagatctcgtatcgcatttttctccagatatcaaagctgctgtagatgattccatggaactatgtggtcaaattcgtagcgaaagattcaaagttgcgagagagttgaaaacggaggcagccgtcttaagtaatcttcaaggcgacctgcaggcaattcaagagaagttaaataaaacagatgaaaacacatcatcagccgatggtgccgataaaaaagatgattccgaatcaaatagtgaaccaattgatcctattatcattgagaaaaagcaaaagttaattgaagagcaggataaaaaggtacaagctttacaatcagataaaaatttcctcgataattgtctatttgaaaacgatctacaaagattaaagccgttgggattggatcgatacgggaacaggtatttttggctggatcacaatggtgttccatttcctcaatatcctgctggtatgaatgagacgccgaaaagtaacaatagtttgagttatcactccggtcgtttattaattcagggacctaaagcatcatcggcgaaattctttttgaacgtcagtgatgagcaattgagcaattggcaaaaaatcagaaattccgaaggaatatccgaggcaactagggaagtatttggtatctccaaaactagttccggatcttataattacgtagaaaatggaatagaggtcgaactattggacagtaatgatcgcgtaaacccacttatagagctgacacctattcaaaagaaaattatggatgaaacaccttcaaggttgctactatcaccagatcaatggtattgcattgacaagttagaggacttgtcaagaataatggactggttagataattggggtcgcaaagagcatgatctcttgaggcaaatcagacccataatggaacgaattaaaagttcccttagcttgcgcgaccatgcactgtcactgacagcattcaccaaaaatgaagaaaagttgctaaaggagttagaaaataatgaatttaccgaaaacgaattgaacgttgatagtatggatgttgatgataaaaatagcggtgttaaaagtgaggttgatgtacaggttgatgccgaagagaagagagaagctgtgatagacgaaaagttggaggtgattgcagacgaactcatgaagctagatgatagctcgaaaacacgtaatgttcttaatagaatacaagaattagaagatcagagagatgaactcttggaacagaaaaaatccataataaattcgcagaggccaggcgcgaggattttagcccgttcagaaaggaaaagaaccaaaatctcccgtggtaataaggtgaataagcagattgaaatattgactgacttagtcaattatagacattttaaagctatggaagatgtgatagcttggaaaaacgttttagcaaattcgatatggggttcctcacttcgcaaaaatgcatctggtaataaaaggagtggtgtcattgaaacagtagacgataaattaaaagatatagtgggccaaacctcaagaacagtaacacctgccccaaattaa

SEQ ID NO: 76585 - DNA, 336 bp, Saccharomyces pastorianus
atggaaaaaaataacacaacaaagccgcgcaagattggaccatactttctatctaaggtaactatcacttactggcttgatggatgcgtatttttgtcggtaccagcttctgaaatatcgatatcaaacatagctggctcaattccttccatcaatttctgggtaatttcgactggtaaaccgttatcgttagagatattagcagatgcgctatcaaaatcgagttcttgggcacctgatctcaaattgcaagaatggcaaatattatcttcataccagtataaacttttgtttgtaccacaatgtgggcaagtcctttcgaaaggaagtacgtaa

SEQ ID NO: 76586 - DNA, 1380 bp, Saccharomyces pastorianus
atggttttagcaatggaaagtagagtggcaccggaaattcctgggctcattcaacctgggaatgtcacgcaagacttgaagatgatggtctgtaaattattgaattccccaaaacctacgaaaacattccctggttcccagcctgtgtcctttcagcattctgatgtggaagagaagctgcttgcgcatgattactacgtttgtgagaaaacagatggtctgcgcgtgttgatgtttatagtgataaatcctgtgacgggtgagcaaggatgctttatgattgatagggaaaataactattatctggttaatggatttaggtttcccagattaccccaaaagaagaaagaagagctgctagagactcttcaagatggcaccttattagatggtgaacttgtcatacaaactaacccaatgacaaaattacaagagttgcgttatttaatgttcgattgtcttgctatcaatggtagatgtctcacacaatcaccaacaagttctagactagcccaccttggaaaagaattttttaaaccatacttcgatttaagagcagcgtaccctaatcgttgtactacttttccgttcaaaatttccatgaaacatatggatttcagttaccaattagtaaaagttgctaaaagtttagataaactaccacatctttctgatggtctgatatttactcctgtgaaggcaccttacactgccggcggaaaagattcattgttattaaaatggaagccagaacaagaaaacaccgtggacttcaaattgattttagatatcccaatggtggaagatccttctttgcctaaagatgatcggaacaggtggtattacaattatgacgttaagccagttttcagcttatatgtctggcaaggcggagctgatgtcaattcacgtttaaaacatttcgaccagcctttcgataggaaggaatttgaaatattagaaagaacatacagaaaatttgcagagttgagcgtttcagatgaggaatggcaaaatttgaagaacctagaacagccattaaatggtagaatagtagagtgcgcaaaaaaccaagagactggggcgtgggaaatgttaagattcagggatgataagttaaatggtaatcatacatcggtggtccagaaagttttggagagtatcaacgattcagtttcattggaggacctcgaggaaattgttggtgatattaaaaggtgctgggacgagagaagagcaaatatggctggtggtagtgggagaccactaccgtctcaaagtcaaaatgcgacattatctacctctaagccagttcattcacagcccccaagtaataataaggagccaaaatatgtagacgaggatgattggtcggattag

SEQ ID NO: 76587 - DNA, 384 bp, Saccharomyces pastorianus
atgtcaagcactaatggaaacgcaccagcgacaccttcctcggatcaaaatcctctccccacgaggttcgaagtggagctcgaatttgtccagtcactggcaaacatccaatacgtaacgtacttactcactcaacagcagatctggaagtctcctaacttcaaaaactacttgaaatacctggagtactggtgcaaccccccttattcgcaatgcattgtgtatccaaactgtctcttcattttaaagctgttgaacgggttcatggagtcggcgatcgttaacgaagatggcctgctggaagggctagacgagctgcccaagatcattcaattacaaggcccgcaatggatgaatgaaatggtagaaagatgggccaactga

SEQ ID NO: 76588 - DNA, 1143 bp, Saccharomyces pastorianus
atgtctagcaaatggtttaatgctatacacctactggtgtgcccgttgacggtactggtaggatatctcatgaacgcgtatggctacggtgcggcgctgcaagcaaccctgaataaggatggtctggtaaatgctatgttggtaaagaaagggtggttttggacttccttggtcggatggtggtgtattatacgctaccgtgcggtgccgggggcaaccggcagagaccgaagacacattgtccagtcattcaaaaggtatgccatactgacagtgtggtggtacgtattcacgcaaggtatatggtttggcgtaggccccatcatggacttggtattcgtatatacgggtggccattgtcactatgacgtcttcgatgatgcaggtcacgtgaacgaagacttccagggttctgtcacccggaccaatcgcgcgttggcgctcattcacaatgtcctcactttgcacggacaccaccaagaacaccgtcagcaacaactctgggaccgctccatagggtcgatccagggcgccctgcaggcgacacaaccgaaaaccccaaaaaacgtaacggccagcgctgccgctgccatcaatacttttattcatgaccagatgcacaggtggcaaggtccgttaaccacctcggcacagtgcagacgttttggaggccattgggctggaggacacgatccatccgggcacgtgttcttggccaccttgatgtgcatgtttcttctaggtgagctacgtgtgtttgggcgtcgtgcactggttcacttgtacgcgcagaaatggcagcttgtacgattggtgacccgccttttcgacactggaccgctatggacgtggcggcggtgtggcggcggctcaatgacctgtggcgcccgtttgtggcgtgcgatagtcgagccgcctgtcacgtgcgcggccgccctgctccgtttgacgcgatgcatagcatgcgaccacccagtaatcatactgctgacgctattggtcacgtggttatggcagctgctgttgactgcggtggcgtcccgtttccacaccgtacgtgagcacatgtctggattgctagccgcgtacatagtgacaggccttgtctacgctcgcgacgcagccgcgctacgtccagtatga

SEQ ID NO: 76589 - DNA, 1803 bp, Saccharomyces pastorianus
atgaagatcacagaaaaattagagcaacatagacagacctctggcaagcccacttactcattcgagtacttcgtcccgaagactacacaaggtgtacagaacctgtatgaccggatggaccggatgtacgaggcttctttgccccagtttattgacatcacctggaatgcaggcggtggacggttgtcacatctgtccacggacttggttgcgacagcgcagtctgtgcttggtttggaaacgtgcatgcaccttacctgcaccaatatgcccatttcgatgattgacgacgctttagaaaacgcttatcactccggttgccagaacatcctagcgctgagaggagatcctcctagggacgcagaaaactggactcccgttgaaggtggcttccagtatgccaaggacttgattaagtatatcaagtccaagtacggtgaccatttcgctatcggcgttgccggctacccggagtgccatccggagttgcctaacaaagacgtgaagcttgatctcgagtatttgaagcagaagatcgacgccggcggcgacttcatcatcactcagatgttttacgatgttgataatttcatcaactggtgttctcaagttagagctgcgggcatggacgtgcccattattcccgggatcatgccgatcactacctacgcggccttcttgagaagggcccaatggggccaaatctccatccctcaacatttctcgtcccggttggatcctatcaaggacgatgacgagttggtccgtgatatcggaactaacttgatcgtggaaatgtgtcaaaaattgctcgacagtggttacgtttctcacttgcacatctacaccatgaacttggaaaaagcgcctctcatgattctggaaagattgaacattctacctacggaatcagagttcaatgcacatccattggccgtgttgccatggagaaaatctttgaatccaaagcgtaaaaacgaggaagtcagacctatcttctggaagagaagaccttactcctatgtcgcaagaacctctcaatgggccgtggacgaattccccaacggtagattcggtgattcgtcttctcctgcgttcggtgacttggatctgtgtggttcagacttgatcaggcaatcagcgaacaaatgtctcgaattatggtccgcccctacttccatcaacgacgtcgccttcttggtcatcaactacttgaatggaaacttgaagtgtttaccttggagtgatatccccatcaatgatgaaataaatccaatcaaagcacacttgattgagctgaaccaacattctatcatcactataaactctcaacctcaagtaaacggtattaggtccaatgacaaaattcatggttgggggcccaaagatggttacgtttaccagaagcaatatttggaatttatgttgcccaagactaagttgcccaagttgattgacaccttgaaaaacaatgagttcttgacctacttcgccatcgactctcaaggtgacctgctaagtaatcatccagacaactccaagtccaacgctgtgacttggggtattttccccggcagagaaattcttcaacctaccattgtcgagaaaatctcgttcttagcgtggaaggaggagttctatcatatcttgaatgaatggaaactaaacatgaataaatacgataaaccgcatagtgcccaattcattcagtccttgattgacgattactgcctggtcaatattgttgacaatgactacatttctccagatgatcaaatccattccatcctactaagcctataa

SEQ ID NO: 76590 - DNA, 1935 bp, Saccharomyces pastorianus
atgaatctcaatgaaagctatctagatgctgagataccgaagggtcaattgaagcatagtaaaagtgggaattttgagggtattccaatcgtggcaacgacttcagaaccaacgacatcggttaatctggatgaaacattcttcaagaaggcgcctatagcaatgccaatctgcgatgatcattctgttagtaaatctacctctgtaaattctttgaatacaacatatttggcatccagaagatctcctttgcaaacaaaaaaattgcaagctaaaaataacttactgtcagcagatttggcaaagagcaatgatgatacaacgagagcactaaatagtccaaaaaaggattttggtccttatttggacagcgagaatgacatcaggagtcgcttggccgaaagcatatattctatggaaacatctataagaggatcggaactacagagacggccgtacgtaagtaacgaaattcctaatgtattcaagttttcgaagttcaatagtaactgcaagttaaatgagagccagactttctgtgacaaaaatttcttcatattcacgtcagcgggtaaaccgatctattgcatgcacggcaaagatgaacagatcatgtcatatacagggctcgttaatacggtaataagctacttccaagtcaatggaccatcggaattgaaaactatatccactttaacttctggtaaaaggcttacttttttggataaatcacctatattactaatggctcaatccgaaagaggcgagtcctcgaacgaattgttgaatcagttggattttttatattcgtatattctttcgtctttaagtgaacgccaattacttaggttattttccaaaagagaaaatttcgacctgagaaattatctagaaaccacagattttgaaaatttagacgaaatatgttcactgatctgtaacagaatgttcccggacttactattgaactctttacaatgtttaccatttaaccattcttcaagattaaagttacagaatgtagttttacagcaactggagaaaaggcaggacattcccagggggaccttactgtacggcttgataattgcgcctcagaataaattgtgctgtgttcttcgacccagaggccatactttacacactacagatttacatcttctattttgcctaatatctcatcaatttcaaaatttagacgaaactcaggaactttgggtacccatttgtttccccaagttcaattcaagtggttttctttattgttatatcaagtttctacctaacgatactcacagcaatgagaaatcggcactagtattaataagtgcacaaaaggatgcattcttttcattgaagtcgtttagtgacgagttgattattaaactcgaaaaagagaagctattgaaaaagataaatacttcaaaagggttcaagcttagcgatataccagcaccaatggttcatcatttcatatataaatcgaagcaaaacgttcaatatgttatgccgcacttcgaagtcaacagtaacatcgcactggattcttcacaggggctagaatatgaattgaaattgaagacatactaccaacagttacatggcacggtagtgagagataatggcaatttgttaagtaggtctatgttaaattttgttagatggagttccaaagacaatgaggacttggcgatggacgaaacacgaatggatttttctgaattggatgagtacattattggaaattcatcattcaaacaagaatcggttaatatggtaggaatggcgtgggtgacgcccacttttgaattgtatctgattggaaataatggcattgttgacaaaagggttttattcaagagtgcgagaaaagtagctaattggtgtcaaaaacacgagtcgagactatttataagtgatggggccgtgttttaa

SEQ ID NO: 76591 - DNA, 765 bp, Saccharomyces pastorianus
atgtctgctccagaagctcaacaacaaaagagaggtggtttcggtggccgtaacagaggccgtccaaacagaagaggaccaagaaacactgaagaaaagggatgggttccagttaccaaactaggtagattagtcaaggctggtaagattaccaccattgaagaaatcttcttgcactctttgccagtcaaggaattccaaatcattgacactttgttgccaggtttgcaagacgaagtcatgaacatcaagccagttcaaaagcaaaccagagccggtcaaagaaccagatttaaggctgttgtcgttgttggtgactctaacggtcacgttggtttgggtatcaagaccgccaaggaagttgctggtgccatcagagctggtatcattattgccaagttgtccgttatcccaatcagaagaggttactggggtaccaacttgggtcaaccacattctttggccaccaagaccactggtaagtgtggttccgtcactgttagattgatcccagccccaagaggttctggtatcgtcgcttctccagctgtcaagaagttgttgcaattggctggtgttgaagatgtctacacccaatctaacggtaagactagaactttggaaaacaccttgaaggctgctttcgttgctattggtaacacatacggtttcttgactccaaacttgtgggccgaacaaccattgccagtttctccattggacatctactccgatgaagcttctgctcaaaagaagagattctaa

SEQ ID NO: 76592 - DNA, 231 bp, Saccharomyces pastorianus
atgttcatgacttcgtcttgcaaacctggcaacaaagtgtcaatgatttggaattccttgactggcaaagagtgcaagaagatttcttcaatggtggtaatcttaccagccttgactaatctacctagtttggtaactggaacccatcccttttcttcagtgtttcttggtcctcttctgtttggacggcctctgttacggccaccgaaaccacctctcttttgttgttga

SEQ ID NO: 76593 - DNA, 1515 bp, Saccharomyces pastorianus
atgtctcaagaacagtacacagaaaacttgaaggttatcgttgccgaaaaactggctggtataccaaactttaacgaagatatcaagtatgttgcggagtatattgtcttattgatcgttaacggtggtactgttgaatctgtcgtagacgagctggctagtttgtttgatagtgtttcgagagatacgcttgcaaatgttgttcaaacagcctttttcgcattagaagctctgcaacagggagaaagtgctgaaaatattgtttccaaaattagaatgatgaatgcgcaaagcttgggacaatcggatatcgcacaacagcaacaacagcaacaacaacaacaacagcaacaacagcaacagcagcaaccagacatcgcgcaacagcaacctcaacagcaacttcaacttcaaccacttcagccacaactagggacccagaatgcaatgcagacagatgctcctgcaactccatcccccatatcagccttttccggcgttgttaacgctgcagctcctcctcaatttgcgcctgtagataacagccaaaggttcactcaacgtggcggaggcgccgttggaaagaaccgtagaggtggtcgcggtgggaaccgtggaggacgcaacaataattccacacgttttaatccgttagcaaaagcacttggaatggcgggtgagagtaatatgaacttcactccaaccaagaaagaggggcgttgcagattgtttcctcactgccctcttggtagatcatgcccacatgcacacccaactaaggtatgtaatgaatatccaaattgtccaaagcctcccggaacttgtgagtttttacatccaaatgaagatgaagagttgatgaaggaaatggaaagaactcgtgaagaatttcaaaaaagaaaagctgatttattggcggcaaaaaggaaaccggtacaaactggtatcgttctgtgtaaatttggggctctgtgttccaatccgtcatgcccatttggtcatccaacaccagcaaatgaagatgcaaaagtcattgatctaatgtggtgtgacaagaatttgacatgtgataatcctgagtgtagaaaggcccactcttcattgtcgaagatcaaggaagtaaaaccaataagccagaagaaagcagctccacctccggttgaaaagtccttagaacaatgtaagttcggtacgcactgcaccaataaacgttgcaaatatagacatgctcgttctcatattatgtgccgtgaaggagcaaactgtactagaattgattgtttatttggccatccaattaatgaagattgtagatttggtgtcaattgtaagaatatctactgtctattcagacatcctccaggcagagtacttccggaaaagaaaggcgctgcacccaattcaaacgttcctaccaatgaaaggccatttgcattgccagaaaacgcaataattgaaaatgctcctccgcaaaccagttttacgcaccaagaacaagatacggaaatgaactga

SEQ ID NO: 76594 - DNA, 381 bp, Saccharomyces pastorianus
atgttttatctaagtgacatcgaggaagaagcctcggctggggctgaaccaacttataatttctgggaagttttgttattctccaatactcaagaaaacctcgtcaccgttgtcggagagttgcacacacttaccgatcgtgtggttcattacaaaattgagcctgaatcaagggaagttactgccacaacactgccatctttgttagcacttttgctagaaaaaaggaaccaggcgagacgcttatatagggatgtgctttcaatgaaaatgtcagaactggactgggacatcgacgatttgttcacacagttacaagaagagctaacaagaactgatgacactctttctatgtatcctaggagaaggttctatcactag

SEQ ID NO: 76595 - DNA, 1506 bp, Saccharomyces pastorianus
atggttacaaatatggtgaaattgaggaatttaaggagattgtattgttcatcccgtctcttaagaactatacagaacgggagaatttcttctgtttcttcaatatcgttgagtaagaaatatactacaaaatctaccaaagaaggtgaagaaaaagtagaaaggaagcatgaggaggaaaaaaaggatacgttaaaaagttccagtgtaccaacttcacgaatatcgagattattccattatggctcactggcagcaggggtgggcatgaatgccgcagcaaaaggcatatcggaagttgcaaagggcaattctcccacttggaaatctttgattctatcagattcgaatattgacagaattaccaataaattttctaaaatgagaggtgttgcccttaaaatagggcaactgttgtcttttcaggatgagaaagtgttgccaaaggaattatacgaaattttatcaagggtacagaatagtgcaaatcatatgcctcaaaggcaattggaaaaggttatggccaaggaattaggtgctaattggaagacaaaattttccaaatttgacaagatacctatggcagctgctagtatcggacaggtacatgcggcagagttgcctagtggtcaaagagtggttgtcaaaattcaatatcctggggttaaagaatccattgattcggatttgaatagtttactaatgttacttacagcctcaagtttattaccgaagggattatttttggataagacaattgccaacgctagaactgagttaaaatgggaatgtgattacaacagagaggctagagctctacaaaagtttgaggcgttgctaaaggatgacccagcgtttgaggttcctcatgtgtttcctgaatatacaaccgataatattataactatgacacgtatggagggaactgaaataatgaaattgcccaaggcatcacaagaaaccaaaaattttatttcggagaatatcatgagactatgtctggaagaaattgccactttcaagtatatgcaaacggatcctaattgggcaaatttcctctataacggtaggacaaagaaaattgaattattggatttcggtgcatctagaccttttgcagaagattttattctaaaatatagaaaacttttaacttacgccacattgagagataggaaaggggcgtacgaaatgtctgtacaactgggctatctcacaggcttagaatcgcagtccatgaaagacgcgcacgtcgatagtgtacttacacttggtgaaccttttaggggtgatgtagataaatctttcgatttcaaggatcaaacagtctcagacaggattagaggtaatatcgggttaatgttgaatgaaagactatgtccgccaccagaagaaacatactcgttacatagaaaatttagtggcatttttcttttgtgtgcaagaatgggtgcgtctgttcattgtgcaaagcttttcaaagagatttttgcctataaagtttaa

SEQ ID NO: 76596 - DNA, 798 bp, Saccharomyces pastorianus
atgcagccaatttcaataaaagatgtggaaagcgatcaagggaaagtttacattgttaatgccttaaaagatctcgtatgcaagtgccttttagaattcgtggacattcagattgaaagttttatgtatccggacgatccaaagtgttttacaaggatatttaaagggaacaagatagtcaacgaagcatcagataaagattcgaaagtgagaagttacccatcttcattgggtgttggacactctgctttgtttcctttgatatacataagacaaaaaaccaactccttgcggtttttgaatgatccaaagcaattaccaacaccactggtcgatgatatgaacgcaaaattcaaaggcatcattaaagtttatgaaaatctcattcacttgtaccattcatatcagacggtggattgcaataacatgaatcagcaaaaacttttgggtgatctggtcagtcggggtaatttcatgcttgatatcctccacgggtatgttactattgcatcaacaatagtacgggacagtaaggatgccaatatcttgatagacactgttaatcggttcatccacgataccatattattccacaagcgcataatacacaattccaacgcttacacagagtaccatgtaatgaaacgtggcatgcaaagaaaccagagtgaggaaacgttagttgaacttgaattccgaacactggatgtttctgatgttaatctggacaatgaatttgatgactttttacagcatagaaaaacgtctcttaaaataactcatagaagggttatatga

SEQ ID NO: 76597 - DNA, 1833 bp, Saccharomyces pastorianus
atgccagaaagctctagagataagggaaatgcagcaattagcggtaaccgttctgtactttctattgcgtccccaaccaagctgaacatactatcttccgattggtccagaaaccaaggtaaagtttctaaaaattcgctaaagagatcaagttcactgaacattagaaactccaaacgtcccagtttacaagcctctgccaattctatttattcaagacctaagattacaattggggcaccaccgttaataagacgagattcttcatttttcaaagatgaatttgacgctaaaaaagacaaagcaacattttcggcatactcttctcgttcatatccaacaattggatctgacagcgtagtttcccaaacatctttatcgcaaccgacaacatctagagaagttgatgagcaatttacagtagctgcggatagatatattccaattctacagggagcttcgcaaaacaaggtcgatcctgaaaccctacacgaggcattacctccgccaaacgcgtcgccaatttcacacttaagggcccagactaagattgtcttcaaacaaaatgtagctgaagcgtgtgggttagatatgaataaaagaatactacaatacatgccggaaccaccaaaatgctcttccttgagacaaaaaagctatatcatgaagaaaagaacacattatagttatcagcaggaacaaaaaattcctgatttaattaaattaaggaaaatcaataccaatccggaaagaattcttgatgcacctggtttccaagacgacttttatttaaacttgttaagttggtccaaaaaaaatgtcttagctatagcactagacactgcattatatctgtggaatgccaccactggggatgtttccctgttaacggatttcgaaaacaccacaatatgcagcgttacgtggtctgatgatgattgtcatatctctatcggtaaagaggatgggaacaccgaaatttgggacgttgagaccatgtcattaattagaactatgagatcaggcttaggtgtccgcatcggttcattgtcttggttagatactttgatagctacaggcagccgtagtggagaaattcaaatcaatgatgtcaggatcaaacagcatattgtatctacatgggcagagcacacaggcgaagtctgcggtttgagctataaaagtgacggattgcaacttgcatctggtggtaatgataacactgtaatgatttgggataccagaacgtccttgcctcaattttccaagaagacgcatagtgctgctgtaaaagcactaagctggtgtccatattcgccaaatattctagcctctggaggcggacaaacagataaacacatccatttttggaacagtatcacaggtgcacgagttggctcaatcaataccggatcccaggtgagctctttacattggggccaaagtcatacgtcaaccaatggtggtatgatgaataaagagattgttgccacaggaggtaatccagagaatgcaatctctgtttataattatgaaacaaaattcaaagttgcagaagtagttcatgctcatgaagcaagaatatgctgttctcaattgtcccctgacggaaccacattggccacagtgggaggagatgaaaacttaaaattttataagatatttgatccaagatgtacaggaagatcgagagaagacggattgatggatggtatgctaggacttattggcaaggaaggttgtcgaacaaatgataaggagaatcgttccaaaaattcgagtgagattcatacaaggaggccctctagtaccagccaatatttgatcaggtga

SEQ ID NO: 76598 - DNA, 969 bp, Saccharomyces pastorianus
atgaaaccgacacaggattcacaagaaaaggtttctattgaacagcagttagctgtagaatcgataaggaagtttttgaactcgaaaacatcttatgacgtgttgcctgtttcttaccgtttaattgtcttggacacctcgttgttagtgaagaaatcactgaatgttcttttgcaaaatagcattgtctccgcgccattatgggactccaagacttccaggttcgctggacttctaactactacagattttattaatgtcatccagtattacttctccaatccagataagttcgaattagtagacaaattacagttagatggattaaaagatatagagcgggctctcggtgttgatcaactagatacagcttcaattcatccttctagacccttatttgaggcgtgtcttaagatgttagaatcaagaagtggcagaataccactgatcgatcaagatgaagagacacatagagaaattgtcgttagtgttcttacgcaatatagaattctgaagttcgttgctttaaattgcagggaaacacattttctaaagattccaattggggacttgaacattattacgcaagataacatgaaaagctgtcaaatgaccactccggtcatagacgtcattcagatgcttacccaaggtcgggtttcttccgtccctattattgacgaaaacggctacttaatcaacgtatatgaagcatacgatgtcctaggcttgataaaaggaggcatctacaacgacctgtcattgagcgtcggagaagcccttatgaggagaagtgatgattttgaaggtgtttatacatgcactaagaatgataaattatctactattatggataacatcagaaaagcaagggtgcatagattctttgtagttgatgacgtcggacggttggttggtgtcttgacgttaagcgatattctcaaatatatccttctaggtagcaactga

SEQ ID NO: 76599 - DNA, 2178 bp, Saccharomyces pastorianus
atgcctcaatctactccaagtcaagaagtacagcgtgtaccatgggataataaacctgctttgaagcagataacactccgagcaaccatagcaggtatcgctatagggtctctggtgctaacatcaaattttcaatttggcctgcaaaccggttgggtttccatgatgtccctgccatcggcattgttagcttgtgctttctttaaaaatatctggccattaatatttccgaacgacaggcctttcagtgacgttgaaaatgtatacgtacaaagtatggcagtagctgtcggaacaggcccattagcctttgggtttgtcggcgtcatacctgccatcgagaagttccttactaacgacgaaagtggtggattaagggaacaaggacagtccttcacttttagagaattgttaatatggtccacagccctagcattcctcggtattttttttgcagttcctctaagaaagcaagtaattgttagagagaaacttcccttccccagtggtagcgccacggccactttaatttcagtgctaaatggaactgagattttacaagaggtttctaagtcagagttattggaaatgaggcagaggagattgaatgaatgccctgaagtgctacaacccaacagagatccagaggaggcggattatttaatgaactcttctcatagcgaacttggtgattatacggcaactagccaagatggaagttctatcctttctactggctctgagaactacagagcgaatattattatcttattgaaaacttttgttgtttcttcgctttacaccatggtgtcatattttgtaccggtaatacggtctattccagtctttggaaaatacctctcgaacaattatctctggaattttcagccgtcgcctgcgtatataggtcaagggataataatgggtcttccaacagtatcgtacatgcttatcgggtgcttcttaggctggggtgtgttagcaccattggcgagatacaaaggatgggtaccaccagatgctgatgtccacgactgggaggagggagtgcaaggatggattctttggtcgtcgctttcaataatggttgctgacagtgtagtcgcttttattgttgtgacagtgaagtccattgtgaaatttattcttatagatgacaaagctgctttactgaacaacataatcgatgatacatttcaatctatgttactggaggaggaacgcgccattaatagcagcagaagaaatacatatgttgatggaaggcaggacaccgtaagattagtgagtagagataccgaaatagaagtagattcgaaacatttggttcgctataccaccgttatcagtggatgtctagtctcctcgataatatgcattgtttccataatatatttgtttgggatacaagtaattcccctatatgctattatcactgctttgatacttgcgttgtttctatctattctcggtattcgagcacttggagagaccgatctgaatcctgtgagcggcattggtaagatctctcaattgatttttgcctttatcataccaagggatagacctggatcagtgttaatgaacgtggtatcgggaggtattgcagaagcctctgcccaacaggcaggcgatttaatgcaggatttgaaaacggggcacctgctcggcgcctccccaagagctcagttctgtgcccaattgataggggcctgttggtcaattattttgtctagcttcatgtatttgtgctacaataaagtttattcaatcccgagtgagcaattcagggtaccgacagcagtagtgtggatagattgtgcaagactagtaactggtaaagggctccctgataaggccttggagtgctccatgattctcggagtcatatttgccgttttatcattaatcagaaacacttatagagattacggatacgggtggatattatatattccgtctggtgtagcggtcggtgttggtatatttaattctcccagttttacaattgcaagattcatcggcgggtgggcttcgcatttttggttgaagaatcataggggtgacttaaatgcgaaaacaaaaatgattgtattcagttcagggttggtcttaggtgaaggtatctttagcgtaataaacatggtcttcacctgcttaaatgtccctcactattag

SEQ ID NO: 76600 - DNA, 2007 bp, Saccharomyces pastorianus
atggaaacatgggaagtcatagcatcggtaaaagaagcaacaaaaggccttgacttgagcttagatcatccacttattattaaatccgaggacgtgcccagtaacattctccaattactgcaacagaagaatcgacgtcaattgaaacacatctgcatgaaatcaagaaaagagtattttctactagaagaatatgggccaggattttgggttaagtggccgtacaattacttcaatggttacagcttaccagaaaggcgtacggaagttgtaacgacagttgaaagagaaagagctaagcgtgaaacgttaaaaacatgggacgaattgaaatttaaagagcttcttcatttatggtcagaagaacccaagggctcgtgtaagcttgagaaggacaaagaccttaaactggatatgaatcccccagatatgaaaggcgaatcaaaaattaatgactactattcagaccctaaagagtacatagaaagtaagtattatgatgctcttttttccatacatacgcctctcgcatatttcgtcaagtcaaatttagtaaggctcaaaaatacctgccgaaccaagtacggaagtgacagttacaagatagcctatcaagccatgctgcaaaaatttcttctctcaattgtacaattcaaagatagacatgataacaggcttttattagagcccttttctagtcccatagcagatgaaaaaaggaagaactgtctcacaaaatttgttatccaagatgaaaacaaaaacagctcaaccattgctgatttatgtgttgtattaaaatcccgcgaaataaagctacaaatattattgctattagagataataggattgaacgatttagattggaattttagagattttgagaaaaagtataaattaaaattgaagaaaagatcacttaatttgacaaaaaagggattagttcgtcgaagatcgaagaaaaaaaccagcgaaaaagacaaaggaatcgagagaataacaacatctttggattattgtgaacagttagacttgtacttagatagagcatgcatcttggacattctgctatcaagtgaaacgcccaacccagatgccatagaagcatcaaatggaacaatacaagagcataaaaaaaatatcctagacaaaagcaaagaagcctcattggttgggttcataaattatgttcttattccatatttcaacaaaaaggtaccacacgccgttgaatttataattcaaaagctcaagggaccaagcatgagaccaaagagagccctgaaaaaggtcaacgatagcacaaatgtatcgtcacctaatactgtagaaacgtataacaggttatccacgagtcaacgtgcctctcgctcttcaatcattaattccgtcccatcttcacccgcattgagaagggtggacgctaatttgttcagcagaaaatctatagcttcgcccacccctgaacttttgaattctagaacgaactctaacttgaatgaatttctcgaaagtgaaactagaagcttaaagcgcccttcacaattgggaaggacgaagtctgatctaacgatgaatcatttacaaaaacggcagttttctgtctctgacttaagcacaacaagagtaccgaattcatcaactatcacactcaaaacgcctttctcgcactcaactattaatgcatacaaaactatgaataactcttttcgcagagttgggaaacgtaaagatatcaatgaaacgatacgcctacatgaacgtgtagactctgaggaaaacgtacaagttcaagccactcctgctgtgaaaaaaagaactgtgacacctaataaaaaggcgcaacttcaaagcatcattgaatcgccgctaaatttcaaggatgatgatacgcatgaaggcagaaaaaatacctccaatattacctctactcccactaataagcccccggaaaatagctcaaaaaggagagtaagaagacgtttatttgctccagaatccacatag

SEQ ID NO: 76601 - DNA, 1551 bp, Saccharomyces pastorianus
atgtctacacagcagcaatcttacacaatttggtctccacaagatactgttaaagatgtcgctgagtcgcttgggttggaaaatatcaacgatgacgtcttgaaagcacttgctatggacgttgaataccgtattctagagattattgaacaggcagtcaagtttaaaagacactctaaaagagatgttttaactacagacgatgtatcgaaggccctgcgtgttctgaatgtggaacctttatatggatattatgatggctctgaagttaataaagctgtatcatttagtaaggttaacacaagtggaggacagtcggtttactacctggatgaggaagaagtagattttgatagattaataaatgagccattaccgcaagtgcctcgtctaccaacttttactacacattggctagcagttgaaggggttcaacctgccataatccaaaatccaaatttgaatgatataagggtatctcaaccaccatttattagaggtgctattgtcaccgctttgaatgataacagcctccaaacacctgtaacgtcgacgacagcaagtgcttctgtgacggatacaggcgcctctcaacacctgtctaatgttaaaccaggacagaatactgaagtcaaacctttagtgaaacacgttttatccaaagaattacagatttatttcaataaggtcatttcaaccttgacagcgaagagtcaagctgatgaagctgcacagcatatgaaacaagcagctttgacttcactacgaactgatagtggcctgcaccaactggttccatattttattcaatttattgccgaacaaatcacacaaaatctttccgatttacaattactaacaacaattttggaaatgatttactctttactaagcaatacttctattttcctggacccttatattcattcgttaatgccttccattttaaccttgctattagcaaaaaaacttggtggatcaccaaaagatgattcgccgcaagaaattcatgaatttttagaaagaacgaatgcactacgtgattttgccgcatctttgttggactatgtattgaaaaaatttcctcaagcatacaaatccctgaagccaagagtaactaggacactgctaaagacatttttggacataaaccgtgtttttgggacttactatgggtgcttaaagggtgtatcggtactagaaggtgaatccatcagattcttcttaggaaacctaaataattgggcgcgcttggtattcaatgaaagcggaataactctagacaatatagaggaacatttgaacgatgactccaatccaactaggaccaaatttactaaagaagaaactcaaatcttggttgatactgtaattagtgcattgttagttctaaaaaaggatttaccagatttgtacgagggtaaaggtgaaaaagttacggatgaggataaggaaaaattgctagagaggtgtggtgtcactattggatttcacattttgaaaagagacgacgcaaaagaattaattagtgcgatattttttggcgaatag

SEQ ID NO: 76602 - DNA, 1392 bp, Saccharomyces pastorianus
atgaggttactagtcagctgtgtggatagtggatccataaaggaagttttgtgtaacatcgggactgacacttccgtacaatcagcactgcagccttttcatgtggcacctcatctagccgaaggattgaaagcttacgttgacacgatgtgggtgatatccgaagatgaagccatcttagcaaggaattcaggggtcgtcgaacttgtaaaaatttcgaaacaccttaaagaaaatgaagctctccaggtcgatcccaaaggagaaagcaaaaatgaaaagagcctttccgatgatctacccaaatttgacatatccgagtttgagataaccagctcagtttcagacctttttgatgatgccaaattggaatcactttcaagtaaatctgttaaaagaaccaagttggtggatggttttgtcacattatgtcccataaaaaaggattcgtcgaataacacattcgtagctgctaccaaatcgggattattacatattataaaaaaaggagaagacaaaaagttaataaaactagcatcccttggactgaaagcaccagtagaatttcttcagttatatgatctagaagataccgatactgataaatatatatttgcatacggaggggaggagaatttaataaaattagtggaaatagattcgagtttccaatctttaaagcaaatttgggaagccaagaatgttaaaaacgacaggttggatatgagagtcccagtatggcccatggccctaagatttttggagccctcccctggtaaaactgaaaagggtaagctgaactaccagtttgcagccataacccgttggtcccacctcaccaaatacagcacacaacatggcagaaaaccgttcgctcagatagatttattacctaaccgtgaaccattatctcagatggaagtttttgatgccaagggagaaaatgttgtctcttcgttggggaattttcaatccgaaacctttaatgaactgaatgtgattactactgactacaaaaagaatgtttttaaattcgatggcaatggaagaatgttgggcaaggtaggtagagatgatatcactggttcgtcaacctatattcatgtacatgacggcaaatatcttttacaaggtggtttagataggtatgttcgcatcttcgatataaaaactaacaaaatgctggtgaaggtttatgttgggtcccgtataaattttattgttatgctggatgacgttgaaatcgagatgccactaagtccaagtgcgaaagctgccaaagagaagcaaaaaaggaaggttacagaacttgaagaagacgcagatgagctttggaataaattggagggaaaggtagctgcttctaaagccagtaagaaaagcaaaatttaa

SEQ ID NO: 76603 - DNA, 1875 bp, Saccharomyces pastorianus
atgttatcaaggtacaaccgcgttattgaaataaatgggggtaatgcagatatttctctgcccattgtcaaatttccaccgtttaaactcagagctcaattaattgaaaaggaccccgtagtatggctgcatctaatagaaacctatgtaacgtattttgagtatttgatgcaaggtgctaacgttgaattattagatgaatctacacttgatcatcttcgtttatttttgagaacttacttgcatgaaattgctgatgaggaaggaaagttattaagtctcggtatcaaccatgatgtgtctgaacagttatatttactaaaaggctggatattttcattgatcaagaaatgcgggttattacatcttcagatttttggtgactccctgtggaatttgatcaaagtatatgttagacgtaatccagattctattcgtggtttgatcgatggctcattgaaaccacggatcaacacgcaacgtgtacaattggacaaatcgtaccaagttcaacagcatttgaagcagttaatagaatctggaaaatttaaaagaatagatttaaggtgcgttgaagatctgctgtctgccaaatccatgcagccaaataagtttgcggagaatttctttacggcaaattggattgaaattttagaggcattatgggcaaagggacagggccggggtcataaagaggctagagaattgatcattatcagtttattttctgtttctgctgatcgtttactaaaaataactaaagaattaggcataagcaattttgaaactttggcgttatatcctcttttaggaacaatgctcataaatgaaggagtccacaaaaggcttcctgatttgaagagcaagttactatttctgaatttaggggggttgtcaatggacgaaggagaccatatgagctatccaacatcatcaggtactgaagttaatgaagaacaactgtccgcgttgatggaattgttcccccagttttctaaatatcaattatctcaaacgttgcttgcctatgataataacattgaattagtaacgaataaaatatttgaggatcctaccattatcgaagcattccccagagaacctgcggaggaagaagtagagccggtgtcagatggtgataatgcatcctttactgaagaactgagtatattggatagaggagatagctcaaaaaataaagagctagacaaaaagattatctcggagggtgttccggatgaattaagaaataaaactttgacaagagcattgaaacttttatacgaggctgatgaagatgaaagggacgacacttatgatgaagccgatgtgaaccggtccgatccttcgaaaagaattggacttcaagaagacgaagaaagctatgatacaaaagatgattctaatgaagtgcgacaagatcataactatcatattgttgaagcttacttgtggaatctattgaaagaggatccgaaattatttgagagatcaaaaagaggtacaaaagtcaggaaaactatgaaagaaatgacttcatggtcggatgaaaaaatcgaaggttggtgtcggatgttagaaagatctcctacacgagcaagacttttagaaaagaagtttatgttcaaaggaaatagcaaaacagggaaaacgtcttatgttcataatcgtgatagccaaaatgatggaaatgtcgtcaaagaacaagccaaacaaaaaaaatctgaaaattttaagaaacatgaacctcaatctactgaacagaagaaaagacagcatgctaagaatgaaaaaaggaaaggggccagagctaaccataaccgtaagaaggggcacgataaaaaactggctcgtgcgggaaataacgctatttga

SEQ ID NO: 76604 - DNA, 423 bp, Saccharomyces pastorianus
atggggctttgcggaagtaaaacccaaccaatgccttcacaaactacgacggtggcaaccaaagcaagaacaaagccaattaatcgtgatacagtcaagtcaaagcaagaacttcgacataaagagaagaaagataaaaagaagaagacacaactaaagagtacaactgtcccggttgtgcaaaagaaagaaggcagcaaattaactgatacaagtgatccgagcaaaaataaagttagcccaaaggaggccgcaaggttagctgctgagaagagatttcaagagacgaatgaaaagtacaataagggcgagttaggcaaaaagcttgctcaagagcgtgccaagtctcataagactcgcttaatggaagaggccgagaaaaagcatgctgagagggaaagggaaaacatgatttatgactga

SEQ ID NO: 76605 - DNA, 1941 bp, Saccharomyces pastorianus
atgatgcttagaagaaatgcggtgagatcgttaaaaactatggaaataagcgtaagcaacgttgttaactccggttcgatagcaatgctgagaggtaagcttgccaacgtagttcttagcgaccgtacttaccactccagcccgatatttcataaaaatgtacctaagggcgttttggacaagaagaatgggcgagaacagcgcaaaacagaacagaatgtgtctaatgtggatccagcttctccatggcgccacgagcttctttcgtttgatgagtgtgtatcatctgctttaaagtactctaccacgcctttgcaaaatacatacaaaaggataggaaacaaccaattgaataaaaatccatcattcgccatgttttgggactccatgggcagagcaatggagttatactattctttgagagaatcgcctgatttcaatgcgtaccgggtgtcacgtttgattcatctgttgcataacggtctgaggtcgacgagagaccaattggtaaaattaagtagaaagccagattacgattcgcaatcttttcacaaggaaatgatgaactttctatgtaattcattaaaggatatctctgatgacattttgataggcaaggtgtctgtcagtggatatggagctactcatctattgacttcatttaaagagctgtcatttgacgatgactgtattcgaatttgggaagcgtcaaagaatttgaccgacgagacaacttcacaggcattccaagaaccaaaagtggttggttttatgctgccattactttatgcaaaaacgcgttctctgactgagcctaacgagctatataaccaaataattcaatccaaagaatttatccatcccaatctttacagcggactgataaaagtcttcatcaaggcggaagactacgaaaaggcattatccctcttcggccaattatgtgaaaaggctgaagtgaggaattacggttatttaattgaaacgcacttaagcttcattggtgattccaagaatttaacgttggcagaaagtttcttcgacaaaattatcaacgatgaaatgccatacaagattattttacaagtctctacagtgaactcttttttgcagaatatatggaaagcacagaacgattttgatcatgtttatagaatatgggagaaggctgtaaaattctatggtaacactgttaatcctggaattttgtcctcactaaacaatacttttttcacaatattcttcgaaaactatattaatgacaatatcaatggtttccgtaagcttcaagaaatcataacgttttacagtggggtcaaaaaaattgatgaaccattttttaacgttatgttaactagagcatctatctggcacgaacgcagcataatcgattttatcgataaaaactatactttgtaccatattccaagaactattatatcatatagaatactactgaaatcattgggaagcatagacaacacgaataatgaagagattctggatagatggctggagttggtcaagaaactgaatgaattgggccaacaatatatagccaatgctgatctgtccgctttgagggatgccactgtcgtatggtcacaatcaaagagggatgaaaaggtcttttctgcaaaagctaaaggaacaccagcaacggcaacgaccacagaagacgacataaaagttccgaagccattggaagatttgaaaaatgaggattctacttcgaattcagaagacagaatagagctgtacttgaaaatattaaaaagatatacgccctactttcgcgctaccaagcaagtatataggtataccactggatgcgcagagtcatacccaatattaaatgagtatctgagcggttattctgacttgagtgccgaggacattcctgttcctcaactacatagctttattgctaaggagcaatag

SEQ ID NO: 76606 - DNA, 450 bp, Saccharomyces pastorianus
atgtcagccaccagagccaataaagatattttcacactattcgacaagaagggtcaaggcgccattgccaaggattccttgggagattacttgagggcaattggctacaaccccaccaaccagctcgtacaggacatcataaacgcggattcgagcttgagagacgcctctagcttgacgctggaccagattacaggcctaattgaagtcaacgaaaaggaattggatgcaaccaccaaggcaaagacagaagacttcgtcaaggcattccaggtcttcgacaaggaaagtacaggcaaggtatccgttggtgacttaaggtacatgctaactggcttgggtgaaaagttaaccgacgctgaagtagacgagctgttgaagggtgttgaagtggacagcaacggagaaattgactacaagaagttcatcgaagatgttttgagacaatga

SEQ ID NO: 76607 - DNA, 1461 bp, Saccharomyces pastorianus
atgaataggattctatctagtgcatcgttgctatccaatgttagcatgccaaggcaaaacaagcataaaattacaaaggcgttatgttatgcaattatagtagcctcaatcggttcaatacaatttggttaccacttatcggaattaaatgcacctcagcaggtgctttcgtgctcagaatttgacattcccatggagggctatccctatgacagaacatggctgggaaaaagaggatataagcaatgtataccattgaatgatgaacagattggaatcgtgacctccgttttttgcattggaggcattttgggctcttattttgccaccaatctggccaatatttatggaaggaagttctcaagtttaattaactgcacattgaatatcgtcggttcgctgataatcttcaattcgaatagttataggggcttaatcattggtagaattctagtgggtatttcgtgtggctctttgatcgtgattataccccttttcattaaggaagttgctccaagcggttgggaaggtttactgggttcgatgacacaaatctgtatcaggttaggggtcttgttgacacaaggaatagccctcccgctgactgattcataccgttggaggtggattttgtttggtagcttccttatcgcggtattgaattttttcatgtggtttatagtcgatgaatctccaaaatggttgttagcacatggaagagtcaccgatgctaagttatctctatgtaagctacgtggcgtgacttttgatgaagccgcacaagagatacaggattggcaactgcaaatagaatctggggatccgttgattgaaccaaccaccacgaactctattagcggttctaattcattatggaaatacttgagggacagaacaaatgtcaagtctcgccatgttatcactgtattgttatttggccaacaattctgcggtataaactccattgtactatatggtaccaagataattagtcaactgtatcctcagcacgcaattaggataaactttttcattagtatggtgaatgtattagtcaccatactagtttctctgctaattcatagtttgccacgtaaaccgcttctgatgacgtccaccgtcttagtttctgttaccgccttcattatgggaatagcaatgaaccataataaaatgaaccttttgattgtgttttcatttatatatatgggcgttttcacgatggggttaaatccgttgccatttataataatgagagaaatatcaaaaccacaggatatggtccttgcgcaaagatatggtaccatttgcaattgggtaggaacttttatcattgcatataccttccctattattcatgatgttttgtcaggttatgttttcatcatttttgctttcatagcatgctcaataagcgcctttatctggaagaaggttccggagaccaagaggagcggctaa

SEQ ID NO: 76608 - DNA, 429 bp, Saccharomyces pastorianus
atgcgcttaagcgatcaattcaacaacaccaccagcagctctgattttttcttcagccaacttggagacgaatctagctttgacgataactggaacatttggaattctacccttacccaagatcttaccgtaaccggcagccaaagtgtcaataactggagcagtttccttggaagcagatttcaggtattggtctctcttgtcttctgggatcaatgtccacaatttgtccaagttcaagactggcttccagaaatgagcttgttgcttgtggaagtatctcataccaaccttaccgaaataacctggatggtatttatccatgttaattctgtggtgatgttgaccaccggccatacctctaccaccggggtgctttctgtgcttaccgatacgacctttaccggctgtacaaaaaaaatattgtaa

SEQ ID NO: 76609 - DNA, 1050 bp, Saccharomyces pastorianus
atgcaaccatttgatagtgggcatgatgatttagttcatgatgtcgtttatgacttttacggaagacatgtggcaacatgctcttctgatcaacatattaaagtttttaaattagacaaggacacgagtaattgggaactcagtgactcatggagagctcacgacagtagtatcgtggccattgattgggccagtccagaatatgggcgcatcattgcttcagcctcttacgataagacggtaaaattatgggaagaagatcccgaccaagaagaatgctctggccgtcgttggaacaagctgtgtaccctgaatgattccaaaggatcactttatagtgtaaaatttgcgccagcgcatttgggcttaaaattagcttgtttgggtaacgatggaatcctcagactttatgatgccttagaaccttctgacctaaggtcatggacactgacttctgagatgaaagtgctatctataccaccagcaaatcatttacagtctgatttttgtctctcttggtgtccttcgagattttctcctgaaaagctcgcagtctctgcattggaacaagcgattatataccaaaggggtaaagacggtaaacttcacgttgcagcaaaacttcccggtcataaaagtttaataagaagtatcagctgggctccttccattggtagatggtatcaactcattgcaacaggttgcaaagatggtagaattagaattttcaaaatcacagaaaaactaagtcccctggcctcagaggagtctttaactaactcaaatatgtttgataatggtgctgatgttgacatggatgcacagggcagatcagactcaaataccgaagagaaagctgagctacaatcaaacttgcaagttgaacttctaagcgagcatgatgaccataatggcgaagtttggtccgtgtcttggaatttaacgggtacaattttaagcagtgctggggatgatgggaaggtacgtttatggaaagccacttattcaaatgaatttaagtgtatgtcagtaattactgctcaacaataa

SEQ ID NO: 76610 - DNA, 1923 bp, Saccharomyces pastorianus
atgccaccaaaagaagctcccaagaaatggaaggcgccaaaagggccaaaacctacccaccgtaaaaataaaaataagcttgaattaggcagagctattaaatatgcacgtcaaaaagaaaatgccatcgagtatttacctgatggtgaaatgaggttcactaccgataagcatgaggccaactgggttaaattaagatctgtaactcaagaatcagctttagatgaattcttgagtacagctgcactggcagacaaagatttcacggccgatagacattcaaatgttaaaattattagaatggatagcggtaatgattctgcgacatctcaagggttttctatgactaatgagcagcgtggaaatcttaatgcgaagcaaagagcgcttgctaaggatttgattgttccaaggaggcctgaatggaacgagggcatgtccaagtttcagcttgataggcaagaaaaggaagcgtttttagaatggagaagaaaattggcacatttacaagaaagtaatgaagacttgttgttaacaccgtttgaaagaaatatcgaagtttggaaacaattatggagagttgttgaaagatcagatttagttgttcaaattgtagatgcgaggaatccgttgctgtttagatctgtcgatttagaaagatatgtaaaagagtcagatgacagaaaagcaaacttactgctagttaataaagcagatttattgaccaaaaagcaacgtatcgcttgggcaaagtactttatctccaagaatatttcgttcacgttttactctgcattgagagctaatcaattattggagaaacaaaaggaaatgggagaagattacagagaacaagatttcgaggaagctgatgaagaggggttcgatgctgatgaaaaagttatggaaaaagttaaaattctgtccattgaccaactggaagaattgtttttatcaaaagctccaaacgagcctttattgccacctctgcccggtcaacctccactgattaatattggtttggttggttatccaaatgtaggtaaatcctccactattaattcgctcgtgggtgccaagaaagtttctgtttcatccacgcctggtaaaacaaagcacttccaaactattaagttatctgattctgtcatgctttgtgactgtcccggtcttgtcttcccaaactttgcatataacaagggtgagctcgtgtgtaatggtgttttacctattgatcaattacgtgattatattggtccagcaggtttagtagcagaaagaataccaaagtattacattgaagcgatttatggtatccatattcaaaccaaatcaagggatgaaggtgggaatggggatataccaactgctcaagaattgttagtcgcatacgccagagctcgtggttatatgactcaaggttacggttctgctgatgaaccaagagcaagtcgttatatattgaaagattacgtcaatgggaaattactgtatgtcaaccctccgccccatctagaggatgatacaccttacactagagaagaatgtgaagaatttaacaaagatttatatgtgttcgacagattaccggacaccagaaaggagcaagtgcaaaatgctgctaaggctaaaggcattgatatcgtggatttagctcgtgatttgaatcagctaacattttcagctcacactggtggtgacgcacaaaaagaagccaaatctgttacgcacggtggtaaacaagctgcattgtacaatgccgctgaggacttggatagagacttcttcaagatgaacaacgtcgaaggtagattaagtacaccattccacaaagttcaaaatagttcagctggtaagagacataacaaaaaaaacaaaagtaaaaatgcgaaaagcaaagtttttagcattgaaaataattag

SEQ ID NO: 76611 - DNA, 738 bp, Saccharomyces pastorianus
atggctgaaacttccaacgacccctttctgtcctacgttttgagtagcaaacaattaactaatctgaatcgtctacgaaggaaagcagttacaaaacaactgggatcaagtgacgacaataaggtctcagaggagtttttgaggtatcaacatacttatcaaagagaagcatttgaatatctgcaaacaaaacatgacgcccacaaaataatggagtcacagtacgaacagtaccaaagcggttcaaaaacaagaagatatagtatcgatttagattctgtagatgcagttgacacggaatcgcaaacagaatacccaaatgaggagtttattgatagaaacgaagatagcgaagctgttatggagttgagaaagagattgttggggaagggacagaataagggcttaggatatgaaactacgaaatcagtcgataggcaaattgaggaccaggacacgttgcaacaggatttgattcaggatatgagcaaacttgtgggcagtttgaagcaaggagctgtggcatttcaatcagcacttgatgaagataagcaagttcttggagctgcagagataggtattcaagttgcttctcaaggtttaatggatgttagcggtaaattaaggaaatatgacaagagtaaattgagttacttgttttatattactgttttcatttttatgattctcggactggtatttacatttatcataattcaattattcccggccctataa

SEQ ID NO: 76612 - DNA, 1734 bp, Saccharomyces pastorianus
atgaacctttttgatgtggctgacttttatataaacaaaattgtgacttcccaatcgaaattgagcgtagccaatgtcaatgaacaccaaaggattaaggttttgctgttggataagaataccacacctacgatatccttatgtgccactcaaagtgagttgttgaagcatgaaatatatctggtagaaagaatagaaaatgagcaacgtgaagtgtccaggcatttaaggtgcttagtttacgttaaacccacagaggaaacactgcaacatctgctgcgtgagttaagaaatcctcggtacggcgagtatcaaatattctttagtaatattgtctctaaatctcaattagaacggctagctgaatctgacgacttggaagctgttactaaggtggaagaaatattccaagacttttttatattaaaccaagatttattttcgtttgatttgcaaccaagagaatttttaagtaataaattggtttggagcgaaggggggctaacaaaatgtaccaacagcttagtttctgtgcttttatccttaaagataaaaccagatatcaggtatgaaggagcaagtaaaatttgtgaaagattggctaaagaagtttcctatgagattggtaaaaacgaaagaactttttttgattttcctgtgatggattcgacacctgtgttactaattttagatcgtaatactgatcctataacacctttacttcaaccttggacctaccaatcaatgatcaatgagtatataggcattaagcggaatatagttgatttatcgaaagtgcctagaattgataaagacctggagaaggtcaccttatcatcaaagcaagatggtttcttcagggataccatgtatttgaattttggtgaattgggtgataaagtaaaacaatatgtgactacatacaaagacaagacacaaaccaacagccaaataaattccattgaggatattaaaaactttattgagaagtatccagagtttagaaaattatctggaaatgttgcaaagcatatggctatagtgggggaattagacagacagttgaagataaaaaatatatgggaaattagtgaaatagaacaaaatctatcagcacacgatgccaatgaagaagatttctccgatttgattaaattgctacaaaatgaagcagttgataagtattacaagttaaagcttgcatgtatttattctttaaacaatcaaaccagctcagacaaaatccgtcaactagttgagattctgtctcaacaacttcctccagaggacgtcaactttttccataaatttaaatcgctttttagccgccaggataaaatgactcaaagtaaccatgacaaggacgatatattaaccgaactagcaagaagatttaatagtagaatgaattctaagagcaacaccgctgaaaacgtctatatgcaacatattccggaaatttcgtcattactaacagatctctctaaaaatgcgttatccagggatcgtttcaaagaaatagatactcaaggccatagagtgatcggaaaccagcagagcaaatatattcctcaggatgtaatattgtttgttattggcggtgtaacttatgaggaggcaaggctagtccatgatttcaatggaacgatgactaacagaatgagggtggttttaggaggcacctctatactttcaactaaagaatatatggattctattagatctgcaaaataa

SEQ ID NO: 76613 - DNA, 3348 bp, Saccharomyces pastorianus
atgaataattggcaacatttcttcaacaatccagttgatctttcggaacatttgaagaagccatactttcgcttcgataatagggataaggaaattacagcgattagcttcgatgagaaggcaaatttaatttggagtggagacagctatggttgcatttcgtcatatgatccaacttttcaactttatacaagatataggggccacataggtggaaattccgtgaaggatattctcagtcatcgggatggtattttatctattagtgaagattccttacactttgctaatagaagaggtgttactaaattgaacctcactagcattgatattgctgcatttagcgaattgaacactatgtgctattctcctcattcactgaaaaacaatatctactgtggtggtgacaacacaaattggggaattgcgtccattgacttgaacagaggttgcttagattccctcttgaattactcatctaaagtgaagttaatgtgctctaataataaagttttgtctatcggaagacaaacagggactgtggatttgctagatccaacatcgaatcgtactatcaaatcatttaatgcacactctgcatccatatccgctatggatttacgggataacaccttggttacagtagggaagtccaaaagattttataacttatacgctgacccatttgtgaatgtttacgacttgagaacaatgcgtcaactccctcctgtttccttttctaaaggaacaactatgggatctggaggcgcagattttgttcaattacatcctttgcttcctactgttatgatcgtcgcctcaagttctggttcgtttgatttcatcgacctttccaatccaactttaagaacacaatatgttcatccttgccagtcgattaaaaagttatgtttgtcccccaatggtgacgtattgggtatactagaagctgataatcacctagatacatggagaagatcatcaaacaacatgggaatgtttaccaatacccctgaaatgctagcatatcctgattattttaatgacattacctctgacggcccaatatctgtcgacgatgaaacatatccattgagttctgtggggatgccgtactatcttgataaacttttgtctgcatggccccctgtagtgtttaaaagtgaaggtaccataccgcaattaacaggtaagtcacccttaccatcgagcggcaaattaaaaagtaaccttgctgtgatctcgagccaaaatgagaagttgagcacacaagaatttcctttgttaagatatgatcgcaccaaatacggtatgagaaatgctataccagattacgtttgtctaagagatataaggaaacagataacaagcggtttagaaaccagcgatatacagacatatacctcaatcaacaagtacgaagtaccccctgcatacagtagacttccactgacatcaggtagatttggtactgataattttgattttacgccctttaataacactgagtattcaggattggatccagatgttgataatcactacacaaatgctatcatacaattgtatcgctttattccagaaatgtttaatttcgttgttgggtgtttgaaagacgagaattttgaaacaacgttgctaactgatctaggctacctctttgacatgatggaaagatcacatggtaaaatatgtagttcttccaattttcaggcgtcattgaaatccttaactgataaaagacaattagaaaacggtgaaccacaagaacatttagaagagtatttagaatcgctgtgcataagggaaagtatcgaggattttaattcttctgaaagtattaaacgcaatatgcctcaaaaatttaacagattcctgctctcgcaacttattaaagaggaagcgcagacagtcaaccataatatcaccctaaatcaatgctttggtttggaaacggaaatacgaacagagtgtagctgtgatcactacgacactaccgtcaaacttctaccctccttatcaatatcaggaatcaacaaaaccgtaatcaaacaattgaacaagaaaagcaatggacagaatattttgccttatattgaatatgccatgaaaaatgtaacccaaaagaacagtatttgcccaacctgcggcaaaaccgaaactatcacccaggagtgtactgtcaagaatttaccttcagtgttgtcattagaattatcactattagataccgaattttccaatataaggtcgtcgaaaaactggttaactagtgaattttatggaagcatcattaaaaacaaggcagttctaagatcgacggcgtccgaattgaagggcacaagccacatatttaaatacgaattgaatggttacgtggctaaaatcactgataacaataacgagacgcgtctagtaacatatgtcaaaaaatataatccaaaagagaattgcttcaagtggctcatgtttaatgattatttggttgttgagataacagaggaagaggcgcttaaaatgacatacccttggaaaacaccagaaattatcatatattgtgatgcggaagaattacgaaaacctttcttttctgttgatacgtattccatcaactatgacatacttttccgtgattatttcgcaaacggaataagagatactgcaagacgtgaatataagttattaacacatgatgaggcacctaaatctggaaccttggttgccattgatgccgaatttgtctcattacaaagtgaactatgtgaaatcgatcatcaaggaatcagaagtattattcgacctaaaagaactgctttggccagaatatccattattagaggcgaagaaggagaactgtatggagtaccatttgtcgatgattatgtggtaaacacgaaccacatagaagactatttgacaagatatagtgggattcttcctggtgacttggaccctgaaaagagtaccaaaaggcttgtgagaagaaacgttgtatatcgaaaagtctggcttttaatgcagctcggatgcgtatttgttggtcatggtttgaataatgacttcaaacacattaatattaatgtcccaagaaaccaaattcgcgacactgccatatattttctacaaggaaagagatatctttcattgcgttatctggcatatgtgttgttaggaatgaatatccaagagggaaatcacgattcaattgaagatgcccatactgccttgattctttacaaaaaatatctccacctgaaagaaaaagctatctttgagaaagtactgaacagcgtgtacgaagaaggaagagcccataatttcaaagttccagaaacttcaaagggataa

SEQ ID NO: 76614 - DNA, 2754 bp, Saccharomyces pastorianus
atgaatgtggatgaaagaagccggattgggggtagagagaaggatgcggggcccgggaaaggcattcttaagcagaaccaaagctcgcaaatgacttcaagctttctagagaaccctggtgttcgtattcctaccaggattataacaaaaaaagaagtattagatggtagtaacacgacatccaggatcaatacttctaatttacagagtatggtaaagagaagagtttcattcgctcccgatgttacgttgcacagttttactttcgtacctgaacaaaacaatgaaattaaggaaccaagacgtagaaaaacttcaaccaacagccctactaaaatatctagtcaagaagagcctcttgtaacgtctactcaaatcgatgatgctcgtacggaagaaaaaacagcggcagaagaagatcccgatacatctgggatggaattgacagaacctatagtggcgacaccggatagtaacaaggcttcacagcatgatcccacatcaatggaaatgactgaagtttttcctcggagtatcagacagaaaaatccagatgtagagggagaaagcattgagtcaagtcaacaaatcgatgatgtcgaggcagtgcgagaggaaacaatggaattgacggccatacataatgtacacgactatgattcaatttcaaaagatacagtagagggcgaaccaatagatctgacagaatatgagtctaaaccttacgttccaaacagtgtctcacgcagtaccgggaaatcctctgactatagcgtggaaagaagtaacgataaaagcgacctttcaaaatctgaaaataagacgaattcctctcagccgatggaaattacagatatattccatgctgatccacagaaccctatgagtctacacagcgacaataacatcaataatgatggtaatgagatggaactcacgcaaatacagacaaactttgaccgcgacaatcaccacattgacgaatctcccagcgaaaagcatgtgttttcttctaataagaggcgcaaattggatactgtctctgattatgctgcatcggttacgacaccagtcaaagaggcaaaggatactagtggagaggacaatgatggtgatttagagatgatggagaaaatgtcacccattacatttagcgatgttgataataagattgggacgagatccaatgatgtgttcactattgaacccggtactgaggatactggcatgcaaaccgcgacagacgatgaagaagatggggaaaatgtcgatgataacgggaacaaaatagttgagaaaacaagactccccgaaatagacaaggaagggcagtctggtatagccctgcctactcaagactacactttgcgggaatttataaatgaagtgggggtagggtttttagataccaaactgatagatgatctcgacaagaaggtcaatttcccgcttaacagctttaattttgtggagaatcaaaggatagataacgtattttctgccttctatatcgatatacccattttagaagtggaagcattcagatgcaaggagctttggagaagtattaaagaatccaaggataaattcaaggactttgaggcccaaattgataaatcccatccccctcttctgctccaggagtatttttcctcggatgagaaaatgaagcaattgatgagggaccagctacagttggtcaaaggatattcgaaattggaggcagcaatggaatggtatgaatggaggaaaaagcaactaaatggtctggaattaattttggcagaaaatttgaataccttgaaaagggagtacgaaaaattaaacgaagaagttgaaaaagttaacagcatcagaggcagaatacgaaaacttaatgaagcaataaaggaagagataaggtccctaaaaaacttaccatccgattcttataagcctactttaatgaatagaataaaaattgaggctttcaaacaagagttaatggaacattccatatcgttaagttcttccaatgattttacccaagaaatgcgttcacttaaattagctattgcaaaaaaatctaatgatctactaactttaagaagtgaagtcgcctctatagacaagaaaattgaaaaacgaaaactgttcacacggtttgacttgccaaaattacgagatactctcaaaattttggagtcattaacgggggtacgctttctgaaattctcaaaggcaacactttcaattgcatttcttcaactggatgatttgagagtggatattaatctagcaaactttaaaaataatccgttaagttctatgaaagttatgaatgacagcaataatgacgatatgagttaccacttattcacaatgttgttgaagaatgttgaagccgaacatcaagatagcatgctttcgaaccttttttttgctatgaaaaagtggagaccattattgaagtatataaaattactaaagctcttgttcccggtgaaaattactcaaactgaggaagaggaagcgcttttgcagttcaaggattatgatagaagaaacaagactgcatttttttacgttatatcccttgtctcatttgctcagggcgtattctcggaaaatgggcaaattcctatgaaagttcacataagtactcaacaagattgctcaccgtcacgggaagtcctctctgacaggataacccacaagatcagtggagttcttccttcatttacgaaaagtaggttacatttagagtttacgtaa

SEQ ID NO: 76615 - DNA, 987 bp, Saccharomyces pastorianus
atgactgagatactaccacatgtaaacgacgaagtgctaccagcagagtatgaacttaatcagccggaaccagaacactgtcctggtccagaatcagacatggcaggtaagtccgatgcttgtggtggctgcgccaataaagaaatatgtgaaagtcttccgaaaggccctgatccagatattccattgatcacagataacttgtcaggaatagaacataaaatattggttttatcaggcaaaggtggcgtaggcaagtcgacatttgccgcaatgctaagttgggcactttcagctgacgaagatttacacgtaggtgccatggatttagatatatgtggaccttctttgccacatatgttaggctgcattaaagaaaccgtccatgaatcgaactccggttggacacctgtctatgtgactgataatttagccaccatgtctattcaatatatgcttccagaagacgattccgccattatatggaggggttcaaaaaagaatttattgataaaaaaatttttaaaggatgttgattgggataaactcgattacttggtaatcgacacaccgcccggaacatctgatgagcacatttcaataaacaagtatatgagagaatctggcatagatggtgcccttgtggtcaccacacctcaggaagtagctttattagatgtacggaaagagatagatttctgtaagaaggctggtatcaatattcttggactagtggaaaatatgagcggatttgtatgtccaaattgcaaaggagagtcccaaatattcaaggctaccacaggtggaggtgaagcactttgtaaggaattgggcatcaaatttttggggtctgttccgttagatccgaggattggcaagagttgtgacatgggtgaaagtttcctggataactatcctgacagcccagcttcgagtgctgtacttaacgttgtggaggctctgcgagatgctgtgggggatgtatag

SEQ ID NO: 76616 - DNA, 1266 bp, Saccharomyces pastorianus
atgtcccagctgacggagttcattagctgtatccctgtggttaatgaagaacaaaatgaagaagatgagcgtggcctctgtaagattcagattgaagatggcgctatgttggaaacattagatgagaacagtctttcagggcttagaatagagaaaatgttggtaagtgaaggtacaggaattttttccaaaagcagttttggaatcaatgatttgcgaatctttacgggagaaaatatcgatgaagagtctaagaaatatgtgtggtatgaactactcaaaatgttaactggtcacaaagtgtacattgcatcgttagatgaaaaagtcgtattcacaaaatggacgtgcagaatgcaagatgatgaggtatggaaagtagttatggagttggagtcatcggcgatcataagaaaaatcgctgaacttaccttgcatccagtcaaaaagggagagattgatttatttgaaatggcagataaactctataaagatatctgttgtgttaacgattcttaccggaatataaaggagagcgattctagcaatagaaatcgagttgaacagctggctcgggaaagggagctattggataggcttttagaaacacgtgatgaaagaaccagagcaatgatggtaaccttgttgaatgagaagaagaagaaaataagagagcttcatgagattctgcgacaaaataatatcaaattgtctgacgatgatgttttagattctgcgcttattaatacggaagtgcaaaagccaatttctgagttaaactctccaggaaaaagaatgaaacgaagaaagacggtagtagagcctcaaaatttacaaaagaagttgaaagacacaagtcggaggagagctaatagaaaaatatctaatcaatccgtgatcaaaatggaagacgacgattttgatgactttcaatttttcggactttctaaaaggccaattattactgctaaagataaactcagtgaaaagtacgatgatattacctcttttggagatgacacacaatcaataagttttgaatctgatagtagcagtgatgttcaaaaacatttagtgtctttagaagacaatggtattcaaatatcagcaggaagatcggatgaagattacggagacatttctggttctgaatctgagactgatgcaagtgcaggggaaaagaagagcttcaaccatagtgaacaatccggtaatgatagggaaccttgcttgcagacagaatcggaaacggatatagaaacatag

SEQ ID NO: 76617 - DNA, 363 bp, Saccharomyces pastorianus
atgaaattcatttctacctttctcacttttattttagcggccgtttctgtcactgctagttccgatgaagatatcgctcaggtgccagctgaggccattattggatacttggatttcggaggtgatcatgacatagcttttttaccattcagtaatgctaccgctagtgggctattgtttatcaacaccactattgctgaggcggctgaaaaagagcaaaacaccactttggcgaaaagagaggctgttgccgacgcttggcactggttaaacttgagaccaggccaaccaatgtacaagagagaggccaacgctgatgcttggcactggttgcaactcaagccaggccaaccaatgtactga

SEQ ID NO: 76618 - DNA, 825 bp, Saccharomyces pastorianus
atgagggaaggtgattctaattcaaaaaaatctgcggatgttgctgtcctctccatcatccttacgggttcgaccttaacattgatctacacatataaaaggtatttaactcaattcaaaagaacaaatgatataccgcgaagaatatttcgtaaacactggctttatggtaaagtcacgtctgtaggtgacggggacaactttcatttctttcacatgccaggtggtataagaggtggatggggatggttacgacccgtcccacaaatgatcaagaatgattctacggcagaaaagcttgttggagatagcagaaatatgaggtttttcaatttcaattggattatgcatgggaggtccaccaaaagtaaaatacaaaaagctaaaagccagttcttgaagctaaatgtaccttacaaaaataggaaaaacctgccaactattcctataagattatgtggaatcgatgccccagaaagagcacatttcggtaacccagctcaaccgtttggtaatgaagctttaatttggttacaaaaccgaattttgggaaagaaagtatgggtcaagcctttatctatagatcagtacaaccgttgtgtagctcgagtgtcatactgggactggtttggtgggtggaaagacttaagcttagaaatgctcaaggatggattagcggttgtttatgagggtaaagtaaacacagaatttgatgatagagaagataagtatcgatattatgaatttttggcaagatctagaaaaaagggactgtggatccagaataaatttgaaacgcctggtgaatataaaaaacgtatttga

SEQ ID NO: 76619 - DNA, 1683 bp, Saccharomyces pastorianus
atgtcgctgatcagtatcctgtctcccctagttacttccgagggcttagattcaagaatcaaaccttcaccaaaaaaggatgcctctactactactaagccatcactatggaaaactactgagttcaaattctactacattgcatttttggtcgtggttcccttgatgttctatgctgggttacaagctagttcgcccgaaaatccaaactatgcaagatacgaacgtctcctatctcaaggttggttatttggcagaaaagtagacaatagtgattctcaatataggtttttcagggacaattttgcgctattgtcagttttaatgctagtccacacttctataaaacgcattgtactttattcaacaaatatcactaaattgaggtttgatctgatatttggtttgatctttttagtggccgctcatggtgtcaattcgataagaattttagcccatatgctaattttatatgccatcgcccatgtactaaagaactttagaagaatagccaccatcagcatttggatttatggtatttctacgctttttattaacgacaacttcagagcatatccatttggtaatatttgctcttttttaagcccattggaccattggtatagaggtatcattccaagatgggatgtctttttcaattttactcttttgagagtcttaagttacaacttggacttcttagagaggtgggagaatttacaaaagaagaaaagtccatcctatgaatcaaaagaagctaaatcagccattttgctcaatgaacgtgctagattaactgctgcacaccccatacaggactacagcttaatgaattatattgcatatgttacttacacgccacttttcattgccggccccattataacattcaatgattatgtttaccaatcgaaacataccttgccatcaataaatttcaaattcattttttactatgcggtgagattcgttattgctctcttatctatggagttcattttacactttctctacgttgtggcaatctcaaaaaccaaagcgtgggaaaatgacacacctttccagatttccatgattggcttatttaatttgaatattatttggctaaaactactgattccgtggaggctgtttaggctgtgggctttgctagacggaatcgatacacctgaaaatatgatcaggtgtgttgataacaattacagttcactagcattctggagagcttggcataggagctacaataagtgggttgtccgttacatatatattcctctaggtggctcaaaaaatagagttttgacatcactagcagtcttttccttcgtagctatatggcatgacatcgaactaaagttattattatggggttggctaatagttttgttcctcttaccagaaatttttgctacccaaattttctctcattataccgacgcagtctggtacagacacgtttgcgctgtcggtgctgttttcaacatatgggttatgatgatcgctaatctttttggattctgcttgggctctgacggtactaaaaaattactaagcgatatgttctgtaccgtatctggtttcaaatttgtaattttggcaagcgttagtttattcatcgcagtacaaataatgtttgaaatcagagaagaagaaaagaggcacggaatttacctaaaatgctga

SEQ ID NO: 76620 - DNA, 2415 bp, Saccharomyces pastorianus
atgatgttttggtcctcaaagacgggtatcacgtcaaaatattcattttcatcatcacctactttcacagctgaaccatggagcatttacaccggtcgtcccaaatcttcatcttcatcttcaccttccaaagtatcgatattcatgtttgacaagaagcagttcgaaaactatttgttacactatggtattattaaatccaaatctggatctagagataaagtattaatacaagaagcctacgaaatattaagaaaccaggccaataacttggccaagctcaagcacccaaatattctgactttaattgaaccattagaagaacatagcaagaatttcatgttcgtcaccgagtttgtcactagctcattggagaccgttttcagagaaaccgatgatgaagagcagaatttcttacaaggtcatgttaaagataatatcgtggtacagcgaggtatattgcaactggtaaatgcactcgattttgttcataaccgcgcaagctttgtacacttgaacattcaacctagggcaatatttatcaatgaaaattctgattggaaaatttccggcttaggctatttagtaaaaataccaccaggcacaaatacctctgaatacttcttacctcaatatgatcccagagttcccccatttatgcatttacaattgaattatacggccccagaaattgtttttgagaataccctaacctttaaaaacgattatttttctttaggattgttgatatattttctgtacactggtaaagacttgtttcgcagcgaaaattctactagtgaatataaattggagtacaacaagtttgaaagcaaaattagtacaatgtcatgggacaatatattcagtaaggttccacaaaagttgaggcattgtatacccaagctaataaacagagacatttattccagatatgataacataacgttgattttagattctgagtttttccaagatccgttagtcaaaaccttgaattttttagacgatttacctaccaaaaataacgaagaaaaatacgtattcttagagggtctcgtgaatctgcttccagagtttccgccagtattattgcaaaagaagttcttgcccattttattggaactattaagtcagttttgtgctgaaaaggtcgtaagtgataaatgtgtaggtaaaagtttggatttgataatcaagatagggtccactttatcccagttgtcctttcaagagaaggtttatccagttttattgagtgatgcgaactttccagtattattaaaaaaagccaccatctgcctgatcgataatttagacacattgaagcaaaaagttaaacgctctgatttcttggaaaatatactcaagccgttatttaattatgttttacatgactccgaaagtgacattaccgtggtttgtcaagaaaaacttttatcacaaattccgttagctttagaggtacttgattttcctaccgtgaaacaattcttattaccattactatccaatctatttacaaagacaacaagtttaacggtgaaaaacacatgtgttacgtgctttcaaattatgatagagcataaatccatcgattcttatacttgctcagaaaccgtcttgcctttgtttaagtccatgaaaacaagagatccaagaattttatctaagctattgaaactttttgaaacggtgccgttgatcattactgatgaaattgttcttgttgaccaagtactgcctttgatgtggaattattctatggctccaacgctaacaaagtcacaatattcaggatatacaaaggcaattaacaaaatgtcttcagacatccaaaggcaccatatcgccaaattggatgataaagtcaatgatattggcgaagatgcctttcacaaagtcatcgaaccaacaatcatgaagaaggaggaccctgagacagttgcagctaaaaatattgaagtagcagccatgcaaccagttaaaaaaaagactgggtcctcttatggggagacctcaccacaatccaaaagtattctaaaccccaaacccctaaatcctaaaaatgcccttgcaactagaggctttccaacaaggattctaaactcccctccacagaccccatcaagtcgaactggttcaaaagttatgaccaaaggtggctccaacgacgcttcgagcactaaggtggaagaggaattcaatgaatttcaatccttttcaagcacaggaagcatacgtcaaacttccgcaccatcagacgtctggatgaacagtacccccagccctaccccaacatccgcaagtagtaccaatttaccgcctgggttctcgatatccttgcaaccaaacaaaagaaaggatggttcttctgatattccccgaagtaatgtatatggatctttgatataa

SEQ ID NO: 76621 - DNA, 1146 bp, Saccharomyces pastorianus
atggatgttacatttctaaccaaaaatgttcaaataaacggcactcagtttaaaatattacttcaaaatgggcaaggtgaatgcgcgctaattgcactagctaacgtattattgatatcacctgcccatgctcgctatgcccaagaaatttccagactagtgagaggcaaggaaactgttactttaaacgaacttgtgcaaactctagccgacatgggcgttcaaaatccgaatggtacagatgtggacaaacaacagctactccaaatcctaccacaattatatagcggattgaacatcaacccagaatttaacggatcttttgaggacggcgtagaaatgtcgattttcaggctctacaatgtcggcatcgttcatggatggataatagatggggacaatgatccgaactcttacgaacatgtgtccaaatattcttatatgggcgcgcaaaaagttttggtacagtcgtatgagatccaaaagaataatgcccaatttgaaaacagcgagcaaatccaatctgatgcaccttacttaaaatcgtttctggcaagatctgccactcaattgactgaatatggtctaactcatctcagagaaattttagtagaaagatcgtatgccgtgctttttagaaatgatcacttttgcacattatataaaaacaatggcgaattgtttactttggtcacggatcctacttacagaaatcgcaaggacataaactggcagtcgcttaaatccgtgaatggatcgcaggattcttactacacgggcaacttcattcccacaagtctggaaagaacagaaactactgctaccgggcaaaatgagtcctacatttctaacccattcagtgaccagaatacagggcatgtaactagcaaccaagttaatagtggagcaagcggtgttcaacaaatcgaagatgatgaggaactagctaggaggttacaggaacaagaagatatgcgtgcggcaaataacatgcaaaatggttatgctaataacggtagaaatcatcaaagggaaaggtttgaaagacctgaaaaaaattcaaagaaaaacaagttccttccctttaatgggagtaataaagaaaagaaaagagacaagttgaaaaaaaactgtgtaattatgtga

SEQ ID NO: 76622 - DNA, 954 bp, Saccharomyces pastorianus
atgggtgatataagaacttttgttttcgctatagaagatacggaaacaacacaaggtttgtgtaaaaccattggccgttcgagttcatttgatcaaaatagtctatgtaagccgtacaatctatattttgatgagccagaactaagcagacagcatgctgtcctatgtataaagacaccaatacccaaaattgaaggagttccctctatagaacaactccgcatctgcattcgggatttgaataacaagactggtacagtaaacttagtgtctgatgggccaaatgatgaaattgatttgaaaaatggtgatacttttggtttgattgcaattgataatcatccttttcgcgataaccatcatttagccgccaagttaattttccgaattgaacttgagtatttcgatgaagcaagggaaatcgtaaagtgcactattacaaatgtaacatttggaaagaataatacagtgtcatctttccctatttattctgcaacatccacagaagatagcgattcaagttggtacggattgtcggaagcgagtacgcaaacggaagttgcagatgagtgtcatgaaacgaacaccatattgactcgaggtggtaggttttctatcctttcgttgagaaaaagaggcagcaagcaagaccagaagatctgcagtaactttgatagaaaaatacatgaaacgagttctttcgaagaagaaatcgaagtttgcaccgacacagacaccacagaagaagaagaagaaaaagaagaaggggatgatgaggaaggtgaaatagaacttgaaattattagagtaaaaagaataaagggcaggacgaagataaaaaagacgcttacctgcttctcgaaaaacaagaaaattatcacccctcagcactccaatagtatgtggttactactaatagtaatcttgatttttgaccgcctactatcgaattaa

SEQ ID NO: 76623 - DNA, 393 bp, Saccharomyces pastorianus
atgtctcaaccggttcaacgtgctgcagcacgctcattccttcaaaaatacatcaataaagaaactttgaaatatattttcacaacacacttctggggtcccgtatcaaatttcggtatcccaattgctgctatatatgatctgaaaaaagaccctacactaatctctggcccaatgacttttgctttagttacctattcaggtgttttcatgaagtatgctcttgcagtatcacccaaaaactacttactgtttggatgccaccttattaatgaaactgcgcaattagctcaaggctataggtttctcaaatacacgtatttcacaacagatgaggagaagaaagctctagataaggaatggaaagagaaagaaaaaactggtaaacagtaa

SEQ ID NO: 76624 - DNA, 1572 bp, Saccharomyces pastorianus
atgacaaaggaagaaatcgcagacaagaagagaaaggttgtagatgaggaggtaattgaaaaaaagaagagtaagaaacaccaaaaggataagaaagacaagaaggaaaagaaggataaaaagcataaaaagcataagaaggagaagaagggtgagaaggaagtggaagtaccagagaaagaatctgaaaagaaacctgaacctacttctgcagtggctagtgagttttatgttcagagtgaagcactgaccagtcttccacaatctgatattgacgaatatttcaaggaaaatgaaattgctgttgaggatcctctggatctagccctacgtccgctattatcatttgattatctttctttagactcttccattcaagcagaaatttccaaatttccaaaaccaacgcctattcaagccgtagcctggccatatttgttatctggtaaagatgttgttggtgttgctgagaccggttctggtaaaacatttgctttcggtgttccagctatcagccatttaatgaacgatcaaaagaaaaggggcatacaggttctagtcatttccccaactagagaacttgcttcccaaatttatgataatctgattgtattaactgacaaggttggtatgcagtgttgttgtgtttatggtggtgttccaaaggatgagcaaagaattcagttaaaaaagtcacaagtggtggttgctacacctggtagattattagacctattgcaggaaggatctgttgacttatctcaagttaattacttagtattagacgaggcagacagaatgttggaaaaaggttttgaagaagacatcaagaatattatcagagaaactgatgcgtccaaaagacaaactctaatgtttaccgctacctggccaaaggaagtccgtgaattagcttccacgttcatgaacaacccaatcaaagtatctattggtaacacggaccaactaactgctaacaaaagaattacacagattgtcgaagtggtggacccacgtggaaaagaaagaaagttattggaactattgaaaaagtaccactctggtccaaaaaagaatgaaaaggtcttgatttttgctctttataagaaggaagctgctcgtgttgaaaggaatttgaaatataacgggtataacgtcgcagctatccatggtgatttgtcccagcaacaaagaacgcaagcattgaatgagttcaaaagcgggaagtctaacttgttactggccaccgacgttgcagcaagaggtttagatataccaaatgttaagacagttattaatttaactttcccattgactgtggaggattatgtccatagaatcggtagaactggtagagctggccaaacaggcacagcacacactctgttcactgaacaagaaaagcatttggctggtggactggttaacgttttgaatggtgccaatcaacctgttcctgaagatttgataaagttcggtactcacactaagaagaaggaacatagcgcttatggttcattctttaaggacgtcgatttgactaataaaccaaaaaaaattactttcgattag

SEQ ID NO: 76625 - DNA, 1692 bp, Saccharomyces pastorianus
atgagtattcggaatgataatgcttccggtggctatatgcagccggatcaatcttcgaacgcttctatgcacaaaagagacttaagagttgaggaggaaataaagccattggatgatatggatagcaagggtgctgtagcagcagatggtgaagttcatctaagaaagtcattttcgttgtggtcaattcttggtgttggattcggtttgactaattcctggttcggtatttctacatcgatggttgcaggtatatcttctggtggacccatgatgattgtttacggtataattattgttgccctgatttctatttgcattggtacctcgttgggtgaattatcttccgcatatccgcacgccggtggtcagttttggtggtctttgaagcttgcccctcctaagtacaaaagatttgcggcctacatgtgcggttcatttgcttacgcaggatccgtgttcacaagtgcttcaactacgttatccgttgctaccgaagtggttggtatgtacgctctgacgcaccctgaattcatcccaaagagatggcatatattcgtttgctttgaattgttgcatttgttcttgatgtttttcaactgttacggtaaatccttacctatcatttcatcttcctctctatacatttccctactatcctttttcacaattacaattactgtattggcatgttctcatggaaagttcaacgatgcaaagtttgtttttgccacatttaataatgaaacaggttggaagaacggcggtatcgcctttattgtcggtttgattaacccagcttggtcattttcgtgccttgactgtgcaacccatatggcgtttgaagttgaaaaaccagaaagagttattcccattgctatcatgggaacagtcgccattgggtttgtcacttccttttgttatgttatcgctatgttcttctctatacaagatctggacgctgtcttgtcttctacaacaggcgccccaatcttggacatttataatcaggcattgggtaataaatcaggtgcgattttcctgggttgcttgattctatttacctcttttggttgcgtcattgcttgtcacacttggcaggcaaggttatgttggtcatttgccagggacaatggtcttccattatcccgtttatggtcgcaagttaacccacacactggtgtacctttgaacgctcatttaatgtcatgcgcttggataaccctcattggcctactttatttggcttccagtacggcttttcagtccttaattacaggttgtattgcatttttattgttatcctacatcattccggttatatgtttacttgctaaaaagcgtaacatagctcatggtccattctggcttggaaaatttggatttttttcaaacattgttcttttgggttggactgtcttttctgtggtctttttttcctttccaccagttttacctgtgacaaaggataacatgaactatgtttgtgtagttattgttggttatactgcgtattcgattctttactggaaatacaagggtaagaaggaattccacgctttagaagaatctgagaacgaacaggctgaatatagtaataacttcgataccattgaagatagtcgagaattttccgttgcggcctctgacgttgaactcgaaaatgaacacgtaccgtggggaaagaagtga

SEQ ID NO: 76626 - DNA, 1164 bp, Saccharomyces pastorianus
atgagtaacggtgcgtttgatgctatttttgagtacgcatggggccaaattgacaaacccatcagtggagactttatatatggtaaagatttgccaaagctaatcgagataattgagaatatctttcaaaaggcacagaaaagtggttcctatgagcttcgattgccattgttttcagaaatcaataaagatttgtttcgcacgttttctaatacaaaaaccttctttaaaatacacaaagaagaatttgacgatatctttttcaatttggttaatcaccccctcagggaaatcttagaaaacgcgttcattggtgtagattctattccaagtgattttatcgtaagtatgaatttgaattcaccttccaaatttctggttgagaacaagaacaagaatacagagggggctggaatttcgacacctaggaagaagcttactgaatcacctatcaagctgttaagcaggaaaaatataggaaaggccttagaggtgcaggtggaggaattgaaaagagaactaactgcgaaacaaagcctccttcaggaaaatgaacgacaagtaagcgaattgaaaataaggctcgaaacttatcaagaaaagtatgcttccatacaacagcggttcagcgacttacagaaagcaagacaagtggaagataatcaaaatagctccagaacatctgacccaggatcacctctggtaacgggaatcgatcaaaaagccattctggaagagtttagaagaagattacagagacaaacagacaccatatctttcctaaaggatcaaatacggcgagaaagggggctcaattgcagtaacgataaggtatcacattcaaaacgaaaacatgcaaccactgatggtgatgggactttcaagaattttatttccgcggttccctccaacatatgggtaaaagcaacaataagaattatagtctgtttcgctttactggcaggtgtcctaccatacattagaaaatacgtatatgctcatgacacaccatcccaaaactcaaggttacaattatcatggtgggaaaatagtggcatattaagcaagattgtatggttctttgaagatcagacagatttagaaactgaataccgttcaaatgccaatgtggatgacgcatatagtagagtattcggcatttaa

SEQ ID NO: 76627 - DNA, 360 bp, Saccharomyces pastorianus
atgggtgccggtattttttttagttcgctctgcgccttacgcgatcagcttcgagaacatactatattaaatgattatatacgctatttaatgaccttgccctgtgtactatttcttagctcgtttgggcaggcggtgatcgttgtactctgtcgggtcctgtatttcgactatagccggttccggtatttcctccacaaatcttttcttagcgttctcgggcgccgtgtcggcctgggtggaatagctgtggtcattaaagcttggcaggttatcactcactttagtgttttcagtggcgctgaactttatatcgggggacacccttgtacttccctcattagtgttattgtcgtttag

SEQ ID NO: 76628 - DNA, 369 bp, Saccharomyces pastorianus
atgactacgtttagattttgtcgtgactgcaacaatatgttgtaccctcgtgaggataaagaaaataaccggttgttatttgaatgcagaacatgctcgtatgtagaagaagcgggcagtccattggtctacaggcatgaattgattaccaacattggtgaaactgcgggagtggtgcaagatattggttccgatcccactcttccgagatctgatagagaatgtcccaaatgtcactctcgggagaatgtgttttttcagtcacaacaaagaagaaaggatacttcgatggttttattctttgtgtgcttatcttgctcacacatatttacttcagatcaaaaaaacaaaaggacgcagttttcatga

SEQ ID NO: 76629 - DNA, 465 bp, Saccharomyces pastorianus
atgactttagccttagtcttagtgtcgaacgagtccaacttcaccgtaaacacggtctttgcctcaggcttagcttcttcttcagcaccactaccagcttcaccagtggagctaggtacattaccagcacctgcgcctgcagcgcctgccatgaatccgcccataggcatggaaatttctggaatgttcaatacggttttcagctcgttgattaaactggaagtttccaaaagagtcaattgtgaaatgtcctgtacaattttagaaattttaggatcaactggccttacatcatccttatgtgatggtgctgttgtagtcgtagaattgaaacgggttgtgatagtaataggagaaattagcgctggtgtaacgcgcgttttcatccagatagaagaagatctcttcgctagtatacgtaaggacatactgggcgcttatttaattgactgtgtttgctgctga

SEQ ID NO: 76630 - DNA, 585 bp, Saccharomyces pastorianus
atgtccttacgtatactagcgaagagatcttcttctatctggatgaaaacgcgcgttacaccagcgctaatttctcctattactatcacaacccgtttcaattctacgactacaacagcaccatcacataaggatgatgtaaggccagttgatcctaaaatttctaaaattgtacaggacatttcacaattgactcttttggaaacttccagtttaatcaacgagctgaaaaccgtattgaacattccagaaatttccatgcctatgggcggattcatggcaggcgctgcaggcgcaggtgctggtaatgtacctagctccactggtgaagctggtagtggtgctgaagaagaagctaagcctgaggcaaagaccgtgtttacggtgaagttggactcgttcgacactaagactaaggctaaagtcatcaaggaagtcaagggattattggggctttcattagttgaagctaagaaattcgttgaagctgcaccaaaggtcttgaaagaaaatgtcgccaaggatgatgctgaaaagattaagaaaaccttggaagacttaggagctaaggtcagtttagaatga

SEQ ID NO: 76631 - DNA, 1155 bp, Saccharomyces pastorianus
atgtccactgcagtgactttttttggccagcatgtcttgaacagagtttcgttcttaagatgttcgaaagagttcatcaaaaaatcattgaaccatgactctaccgtttttatcccatttatcgaaggggaagccctcatttcgcccgaaaatggtgacctagttcagctttctaattctgtaaagtcttacaagaatattttgtcagcaatagttcctttatacactactttattgaacacaactcgctcaagaagcgatgaatcaggcatcaatgtaacatttttaggtctcctggaaggcacagattctgcatttaattttgaatggtctaatatttcttacaaaggaacaccatattttggattagatatccgtgttactgagagcacactcttcaagaaagtcgactttgagcctattttttcctatccgaaggtgaccagagatcacattttcaaacaaacaaatgaggatgcttcactttattcacaaggtaagatgtatctggattggctagcaaagtacaaattctgtcccggttgtgggtctccgttattcccagtagaggcaggaactaagcttcagtgttctaatgaaaatcggaatgtatactgtaatgtgagagatgcaagaattaataacgtttgcttcccaagaactgatccaacggtcattatagccttgaccaattcggattactctaagtgttgtctggcaagatcaaaaaaaaggtacggtgattttgtattgtattcaacaatagcaggttttatggagccatcagaaaccatagaggaggcttgtatcagagaaatatgggaggaaacaggcatttcatgcaaaaatattgatatagtccggtcacagccctggccttacccttgcagtttgatgattggctgtttaggcatagttcaattcaattccaaaaatgaggttatcaacctgaatcatgacgacgaattattggatgctcaatggtttgatacaactgaaatcattcaagctttggataagtacgccggcgggtatcgtgttccattcaaaaatgatatcaatttacctggaagtactaccattgccttccaattaatcaatcatgtttgcgagaactataaaaacttacgtaagacctcatcgagccatctatag

SEQ ID NO: 76632 - DNA, 1962 bp, Saccharomyces pastorianus
atgaggtcaggcgatgcagagattaaaggaattaagcccaaagttattgaggaatattctttatctcagggaagtggtccttccaacgattcatggaaaagtttaatgtcgtccgcgaaggacactcctttgcagtatgatcacatgaatcgcgaaagtctaaaaaaatacttcaatccgaatgcacaactcattgaagatcctttggataaaccgattcagtatagagtgtgcgaaaaatgtgggaaacccttagctttgacagcaattgtagaccacttagaaaaccattgtgcgggagcatctggaaaaagtagcacagatccaagagatgagagtactagggaaacgatacgaaatggagtagaatcaactgggagaaataataacgacaatgacaatagcaatgataataacaatgatgatgatgacgataacgacgacaacgaagatgatgatgacgatgatgatgacgacgataattccaatggtgccaattacaagaagaatgactcttcttttaaccctttgaaaagatccacatctatggaatctgcgaacacaccaaatatggacacgaaaagatcgaaaactgggactcctcaaaccttcagctcttccataaaaaaacaaaagaaagtcaaacaaagaaacccaactgaaaagcatttaattgatttcaacaaacagtgtggtgtagagttgccggaaggtggttactgtgcacgttcgctgacatgtaagtcccattcaatgggtgcaaagagggctgtctctggtcgttccaagccctacgacgtcttgctagcagattatcatagagaacatcaaacaaaaattggtgcagctgctgagaaacgtgctaagcaacaagaattacaaaaattacaaaagcagatacaaaaagagcagaaaaaacatactcagcaacagaaacaaggtcaaaggtctaagcaaagaaatgtgaatggtgggaaatcagccaaaaatggtggtaagagtactgtacacaatggtaacaatatcaatgagataggacacgttaacctaactcctgaagaggaaacaacacaggttctaaatggggtatcccgatctttcccactgccactagagtcaacggtactatcgtcagttagatacaggactaaatattttagaatgagggaaatgtttgcttcctccttttctgtgaaaccaggatatacatctccaggttacggtgcgatccattctcgtgtaggatgcttggatttggatagaacaacagattacaaatttcgtgttaggactccacagccaattaatcacctcacaaaccaaaacctcaatccgaaacaaatacaaagactacaacaacagagagctctacaggctcagcttctttctcaacaacagcaacagcagcaacagcagcagcaacatcactcaccccaagcgcaggcccaggccagtacccaacaacctactcaaggtatggtgcccaatcatttccccggcggggcaacgaattcatcatttaatgccaatgtgtcgagcaagcaaattcagcagcagcagcagcagcacaagtctcaagacacaggtctcacgccgctggagatacaatcacaacaacaaaaactacgacaacaacaactacaacaacagaagtttgaagctgctgcttcatatttagccaacgctaccaaattaatgcaagaatcaaatcaagatagccatttatctggcacccacaacaataatagtagtaaaaacggtaacaataacctcatgacgatgaaagcctccataagctctcccaatactagcgtaaatagtatccaatctccccctagtgtcaacagcgtcaatggctccgggcaaggtgtatctaccggtattaatgtctctggcaataacgggagaattgaagtaggtattggaaattctgtgaacccctacaatggcagaataaattaa

SEQ ID NO: 76633 - DNA, 1512 bp, Saccharomyces pastorianus
atgattgaaaaggataaaagaacgattgcttttattcatccagacctaggtattgggggcgctgaaaggttagtcgtcgatgcagcattaggtctacagcaacaaggacatagtgtaatcatctatactagtcactgtgataaatcacattgtttcgaagaagttaaaaacggccaattaaaagtcgaagtttatggtgattttttaccgacaaactttttgggtcgtttttttattgttttcgcaacaattagacagctttatttagttattcaattgatcctacagaaaaaagtgaatgcgtaccaattaattatcattgatcaactgtctacatgtattccgcttctgcatatctttagttctgccactttgatgttttattgtcatttccccgaccaattattggctcaaagagctgggctattgaagaaaatatacagactaccatttgacttaatagaacagttttccgtgagtgctgccgatactgttgtggtaaattcaaatttcactaagaatacgttccaccaaacgttcaagtatttatccaatgatccagacgtcatttatccatgcgtggatttatcaacaatcgaaattgaagatattgacaagaaatttttcaaaacagtgtttaacgaaggcgatagattttacctaagtataaatcgttttgagaaaaaaaaggatgttgcgctggctataaaggcttttgcgttatctgaagatcaaatcaatgacaacgttaagttagttatttgcggtggttatgacgagagggttgcagaaaatgtggagtacttgaaggaactacagtctctggccgatgaatacgaattatcccatacaaccatatactaccaagaaataaagcgcgtctccgatttagagtcattcaaaaccaataatagtaaaattatatttttaacttccatttcatcatctctgaaagaattactgctcgaaagaaccgaaatgttattgtatacaccagcatatgagcactttggtattgttcctttagaagccatgaaattaggtaagcctgtactagcagtaaacaatggaggtcctttggagactatcaaatcttacgttgctggtgaaaatgaaagttctgccactgggtggctaaaacctgccgtccctattcaatgggctactgcaattgatgaaagcagaaagatcttgcagaacggttctgtgaactttgagaggaatggcccgctaagagtcaagaaatacttttctagggaagcaatgactcagtcatttgaagaaaacgtcgagaaagtcatatggaaagaaaaaaagtattatccttgggaaatattcggtatttcattctctaattttattttgcatatggcatttataaaaattctacccaataatccatggcccttcctatttatggccacttttatggtattatattttaagaactacttatggggaatttactgggcatttgtattcgctctctcctacccttatgaagaaatataa

SEQ ID NO: 76634 - DNA, 1686 bp, Saccharomyces pastorianus
atgtcgctttttttcaagccagtaatttcaccacagtggtctttccccgtgcttctcaagataggagtgcgttcttatgcgggaggcccaagaacaaagcataaaggaaactctccattagcttcagtgcctacaggcagtagtaataaaaaccgaaaacagaaggccaaaggcaaaaaaggtaacaaaaagaatgaccctgaccaagcattcaactttggagagtatggtggattgaaaaaagacgtcgagatgaatatggacagtacgaataaactcattcaaaaaatatcgaatttcgaccaattgcttatacttccacctgtcagagacgctgtgaaagaaatcatttccaaagagtccctgaagctacaagatagtaggaaaaaaaccagtgaaaatataataccgagtcccattcaaacagtggccattaagagaatatccaaaaatttaatggatccaaagttacaaatacatgcgattgccgctgagacaggttcaggtaagaccatggcctacttgatacctttaatagactatttgaaaagacaggagttggaaactcccgaattatgggaaacattaagaaaaaacgttctgattcggtccatcatactggtgcctacgcatgaattggttgaccaagtatacgaaactgtttccaagacgaaaaccttgttaggcttaaactctttcaagtgggacaaggccacatcatatcgtgatttactagagaacattaaaaatagaatagatattttagtcactactccgggaaaactactgaacctgttctccataagaatgataactagacctgataaagtcttgtccaaagtgggtttcgtagtactagatgaagctgacacacttctagataggtcatggcttgaagaaacgcactccgcaataaagagaattcctaacattaatcaccttattttctgttccgctactattcctcaagagtttaataaaacaatgcaaagactatttcctacagtggttcctataatgacacccagactgcataagttaccattcgctttggactttaaagttataaattctgccttaagtcctttcaagggatccaagatcaaagcattggcacaaactttatatgctatttcaaatgatgacacggaaccagggttcgagaaaagatgcattatctttgttaacgaaaaaaagaatgttcctgaaattgttaacctattgaataagaaattcggtcataatgccatcggtttaactggtgaagatacatttgaagaaagatccgagaaaattatgccctttttatcaccaccgcgaccactttcggaggtggttgctcagagtacttcacctcccacttccttgaagaaatttgaaattcctgattccaacatcgtcatcggcaaattgaaaaacacaaattctaatggtaccgcacccagtaacaagtctttgcatgtactcgtaaccaccgacctcatggcaagagggctcaatttcaaaggtgtacggaatgttgttctctacgatgtacccaaaacgtcaatagacctgatacaccgagtgggcagaactgctagaatgaaacagggcggccgcgtatttatgctaactgacagtaaaacaaaatcttgggctaaagctcttccaaagatcatcaaaaagcaccagagattatcatga

SEQ ID NO: 76635 - DNA, 1113 bp, Saccharomyces pastorianus
atgctcttaggttactgtggcagcggatactatggaatgcaatacaacccaccacacaagacgattgaaggtgagattctcaccaagctcttcgacgtaggagccatttccgaagaaaattcattggcaccgaagaaaaattcctttatggcagcggcaagaacagacaagggtgtacacgctatgttgaatctactgtcgctaaagatcacattgcgagaggacacagtagcgaagttaaacgccgcactaccgcccgaaatacgcgtgtggggtatccagcctgtcaataaaaagtttaatgctagatccgcgtgcgattctcgatggtaccaataccttatcccagaatttatactcattggtccaccccggagttctcttttgcatcgaaacgtggggggatgctaccgcgaagacggctcgcaagaggtgtgggatacgttcctggaacagacgcgtgggagatttagcggggatgagctgtgccgtttgcaggacactgcacagaaactaagcgagagcgatcctttggtacaagactacgtggggctattgagcggtacccttagcggctactgcttgccgccctcgaagctggacgcgtttgaggcagccatgcaggagtacgtgggaacgcataattttcacaactttaccacaggaaagctttggggggatcctagtgctcagcgccatatcaaaaaggttgtagtgtcgcaggcctcaccgggatggatatgtgtgcggatccacgggcagtcgtttatgctgcatcagattcgacgaatggtagcgcttgccgtacttgcagcccgttgccaattgccgcctaatattgtacgtaactattttaacgccgggcctaggaaatacattccgagggcgcccgcacaaggcctattattagagggacctgtgtttgacgggtataacactaagttgcgcaatttgctgtattgcgaaatccgcccggacgatatcactattgagcgcatgtgccgtttccgagaacgccagatctatactgcgatcgcacacgaggagacacagcgtcacgtgttttgccattttgtacgacaaatgaaccgcctggccacgcctctaatctag

SEQ ID NO: 76636 - DNA, 150 bp, Saccharomyces pastorianus
atgcgctcaatagtgatatcgtccgggcggatttcgcaatacagcaaattgcgcaacttagtgttatacccgtcaaacacaggtccctctaataataggccttgtgcgggcgccctcggaatgtatttcctaggcccggcgttaaaatag

SEQ ID NO: 76637 - DNA, 3537 bp, Saccharomyces pastorianus
atgtcgcaaagaaaattcgccggcttgagagataacttcaatctcttgggtgaaaagaacaaaatattggtggctaatagaggagaaattcctatcagaatttttcgtaccgctcatgaactgtctatgcagacggtagctatatattctcatgaagatcgtctttcaacgcacaaacaaaaggctgacgaagcatacgtcataggtgaagtaggccaatatacccccgtcggcgcttatttggccattgacgaaatcatttccattgcccaaaaacaccaggtagatttcatccatcccggttatgggttcttgtctgaaaactctgagtttgctgataaagtggcgaaggccggtataacttggattggccccccagctgaagttattgactccgtgggtgataaggtctcagctagaaatttggcagcaaaagctaatgtgcccaccgttcctggtacaccaggtcctatagaaactgtagaggaagcacttgacttcgtcaatgaatacggctacccggtgatcattaaggccgcctttggtggtggtggtagaggtatgagagtcgttagagaaggtgacgacgtggcagatgcctttcaacgtgctacctccgaagcccgtactgccttcggtaatggtacctgctttgtggaaagattcttggacaagccaaagcacattgaagttcaattgttggccgataaccacggaaacgtggttcatcttttcgaaagagactgttccgtgcagagaagacaccaaaaggttgtcgaagtggccccagcaaagactttaccccgtgaagtccgtgacgccattttgacagatgcagttaaattggccaaagagtgtggctacagaaatgcgggtactgctgaattcttggttgataaccaaaatagacactatttcattgaaattaatccaagaatccaagtggaacataccatcacagaagaaattaccggtatagatattgtggcggctcagatccaaattgcggcaggtgcctctctaccccagctgggcctattccaggacaaaattacgactcgtggctttgccattcagtgccgtattaccacggaagaccctgctaagaacttccaaccagataccggtagaatagaagtgtaccgttctgcaggtggtaatggtgttagactggatggtggtaacgcctatgcaggaacaataatctcacctcattacgactcaatgctggtcaaatgctcatgctccggttccacctacgaaatcgttcgtagaaaaatgattcgtgcattaatcgaattcagaattagaggtgtcaagaccaacattcccttcctattgacccttttgacacatccagtctttatcgagggtacatactggacaacttttattgatgatactccacaactattccaaatggtttcatcacaaaacagagcccaaaaacttttacattacctcgccgacgtggcagtcaatggttcatctatcaagggtcaaattggcttgccaaaattaaaattaaatccaagtgtcccccatttgcacgatgctcagggcaatgtcatcaacgttacaaagtctgcaccaccatccggatggaggcaagtgctactagaaaaggggccagctgaatttgccagacaagttagacagttcaatggtactttattgatggacaccacctggagagacgctcatcaatctctacttgcaacaagagtcagaacccacgatttggctacaatcgctccaacaaccgcacatgcccttgcaggtgctttcgccttagaatgttggggtggtgccacattcgatgttgcaatgagatttttgcatgaggatccatgggaacgtttgagaaaattaagatctctggtgcctaatattccattccaaatgttattgcgtggtgccaatggtgtggcttattcttcattgcctgacaatgctattgaccatttcgtcaagcaagccaaggataatggtgttgatatatttagagtatttgatgccttaaatgacttggaacaattgaaggtcggtgtagatgctgtgaagaaggcaggtggtgttgtagaagccactgtttgtttctctggggatatgcttcagccaggcaagaaatacaatttggattactacttggaaattgctgaaaaaattgtccaaatgggcactcatatcctgggtatcaaagatatggcaggtaccatgaagccagcagctgccaaactactgattggatctttgagggctaagtaccctgatctcccaatacatgttcacactcacgattctgcaggtactgctgttgcatcaatgactgcgtgtgctctggcgggcgccgatgtcgttgatgttgccatcaactcaatgtctggtttaacttcacaaccatcaatcaatgctctgttggcttcattagaaggtaatatcgacactggtattaacgttgagcatgtccgtgaactagatgcatattgggcagagatgagattgttatactcttgtttcgaggctgacttgaagggcccagatccagaagtttatcaacatgaaatcccaggtggtcaattgacaaacttgttgttccaagcccaacaattgggtcttggagaacaatgggccgaaacaaaaagagcttacagagaagccaattatttattgggtgatattgtcaaagttaccccaacttcgaaggtcgttggtgatctggcacaatttatggtctccaataaattaacttccgatgatgtgagacgcctggcaaattctctggatttccctgactctgttatggatttcttcgaaggcttaatcggccaaccatatggtgggttcccagaaccatttagatcagacgttttaaggaacaagagaagaaagttgacttgtcgtccaggcctggaactagagccatttgatctcgaaaaaattagagaagacttgcagaatagatttggtgatgttgatgaatgcgacgttgcttcttataacatgtacccaagagtttatgaagacttccaaaagatgagagaaacgtatggtgatttatctgtattgccaacaagaagctttttgtctccactagagactgacgaagaaattgaagtcgtaatcgaacaaggtaaaacgctaattatcaagctacaggctgtgggtgatttgaacaaaaagaccggtgaaagagaagtttactttgatttgaatggtgaaatgagaaaaattcgtgttgctgacagatcacaaaaagtggaaactgttactaaatccaaagcagacatgcatgatccattacacattggtgcaccaatggcaggtgtcattgttgaagttaaagttcataaaggatcactaataaagaagggccagcctgtagccgtattaagcgccatgaaaatggaaatgattatatcttctccatctgatggacaagttaaagaagtgtttgtctctgatggtgaaaatgtggactcttctgatttattagttctattagaagaccaagttcctgttgaaactaaggcatga

SEQ ID NO: 76638 - DNA, 1476 bp, Saccharomyces pastorianus
atgtctaagtatcaaattaattgcataagataccggcactttctcaggacatctaatatctcgcagatccctgatttcacgaaatactgcattggtcccgtaaatgaagaattggcaccttacatcatggaaaccatgaaggcatacccttcaaattccgaatatatcaatccgcagcattactatcataatagaacggtattagtagaaaattacttaaaacgaagtccaaatccagtatcattaacgcagttagcgcaatattatgacgattctaccaagctgaccagaaccaagatcatcaattccgggaaatttgtaaaagaagaactggtaattaggatcgcgcataaattaaatcaattgcaacaacttccatttaatgttgtgaacaacttccattttgttcaagtttatgagtcatattacaatatttttgaaagctttagaaaatatccgactataagaactttagaggacgcttctcaatttgcagattttatcaaaaatatgctagaaggcttcaatactctaaacttaccacatttgataatgggggctttagaatgtacaattttggatctttatcctcgtgaaaaaatggaccaactactatctgatctgttaagagctcgaatatcaagaagattgattgtagaggaacacgtcagtatcacagccaactacactagtggtaaggaggaaaataccttggtattgggtgatatttttcaagaatgtagcgctaaaaaatatttattggaagccagtgaggaatctcaaaaatttatccaagatatgtactttaaagacattcccatgccagaatttattatcgaaggtgacactcaactaagcttttactttttgcctacacatttgaagtatttgttaggggagatccttcgaaatacttacgaagcaaccatgaaacactatattcgtaagggattagaaaagccggaaccaatcatagtaactgtagtaagtaacgatgaatcctatttgtttagaatttcagataaagctgggggcgtcctccatgatgatgaaaatctatggtcattcggtaaatcgaaagaaagggctcaagaatccctaaacaattttcacaagttacctggtttacaaacagtatctatttatgacgaagtacattcccatactaaatataactccaaactgaagtcattacagtcaataacattaaaaccgtacatgcacacgtcgctagaaccaatgagttatcctagcatcataaatgggcacatcaaatatgaaactcccctaattgaattgttaaagcggtcttttagatacaagcttgggattgggttagccatgtgtaaagtgtatgctgaatattggaacggcgacctttcattgcattcaatgcctggatatggtaccgatgttgtattaaaattaggcaacttgatgaagcatacgaagaaactacaattagataaagtgtga

SEQ ID NO: 76639 - DNA, 516 bp, Saccharomyces pastorianus
atgtccacaccagctagaagaaggttgatgagagattttaaacgtatgaaggaagatgccccaccgggtgtatctgcttcaccattacctgataacgtcatggtatggaacgccatgattatcgggccagccgatactccatatgaagacggaacttttaggttattgttggagtttgatgaagaatatcccaataagccaccgcatgtcaaatttttgagtgaaatgtttcatcccaatgtctatgcaaatggtgaaatttgtttggatattttgcagaacagatggactccaacatatgatgtcgcatccatattgacatccattcaaagtttattcaacgatccaaatccagcttcgccagcaaacgttgaagctgcaacattattcaaagatcataaatcacagtacgtcaaaagagttaaggagacggtagagaaatcttgggaggatgatatggacgatatggacgatgatgatgatgatgatgacgacgacgacgacgaagcagactga

SEQ ID NO: 76640 - DNA, 864 bp, Saccharomyces pastorianus
atggtactgtcaaacgttaaaatctttagattgaaatcgcacagagccttcagaatcggtcccatgattaaagcagtggcaggaaatcttttggtgaagagattttatcaaccaaaattagaaagaattccaccggcttcactgcttttgaagcagaaaatacggttagctcaaaatggcagtactacatctacagaaaaccccatttccttctcacagaccatgtccgagatatttagcgtcttgcagccaagtgcaccagatctagatgaagacgaaacaagtggtttgaaacgcgatcatttattaactgagcgtctaaacaacggcgagcttggtgtcattatgaacaaattcttcaatccgtcttcgacacataacaatcagttgatagatacgaatatattacttcagaattttcctaagttaagtggtaatgacttagatttattggattttgccataaatgagaaaatgcgaggaaactggaatgatctaaagcaagatttcattcagttgtggtactacaagtcatttggctttcttggacctcgaactcaatttgtcctgacaaactcttctccgtcacttaggtcccaattcttgaaacttccattcatcgaatataattggtttctcctacaaaataacaaaaacgcaaatatactacctgctgatgtgcaaaacgtggtcaaggtgtttcatcttgatgataaaaggtttacttggaagagcatagatccattcagcaaagctataatttcattcgtcgtttttgtttccatatatgtgtggttggatgaaagtgcaaaacaaaaaacgaaggagctgcccgcacagaagagtactgtaatatcagaataa

SEQ ID NO: 76641 - DNA, 1584 bp, Saccharomyces pastorianus
atgcctcaaaatacaagacacacgtccatcgtagaaatgctttctaccccacctcaattaccgaattccacagatttaaatagtttgagcgaacagacagacaagaacactgaagcaaacaaaagcgacacagaatcactacataaacctatttcgaaatcgtcatcttcttcttctctctccacgctggataacacggaatactcaaacaataacggcaactccttgtccaccttgaattcacagaatctgttatctgttcataggcaggagtggcaacacactcctctgtcgaatttggtggaacagaacaaattgattttcatcagaggttctatttccgtagaggaagcattcaacacgctggtcaagcaccagctaacgtctttgcctgtggagaattttccgggagacatgaattgtttaacattcgactataatgatctcaatgcgtaccttcttcttgtattaaacaggatcaaggtgagcaacgacaagataacctcagactgccagaatggtaagtccgtgcccgtgggcgagatagtaaagttgacacctaagaatccattctacaaattgcccgaaacggaaaacttatcgacggtaataggcatactaggctcaggtgtgcatcgtgttgccatcacgaacgtggaaatgacacagattaaaggtatactttcccaacgtcgattgattaagtatctgtgggagaatgcgagatcatttcccaacttgaagcctctcttggactcttccctggaggagctgaatattggtgtactaaatgcagcccgtgataaacctacattcaagcagtcacgtgtcatatccatccaaggtgacgagcatctaattatggctctgcataaaatgtatgtcgaaagaatctcttccattgcggtagttgacccgcagggaaacttgattggtaatatttcagtaacagacgtcaaacacgtcaccagaacttcacaatatcctttattacacaatacatgtcgtcattttgtctcggttattttgaatttaagaggtctagagaccggtaaggactcatttcctattttccatgtgtatccaacaagttccctggcaagaacgtttgccaaattggtcgctaccaaatctcacagattatggatagtacaaccaaatgacaatcaactaacagcatcttccgaaaaatcctcatctccatcaccaagtactccacccgtaacgacattgccatcgcttgcgtcgtcataccattcgaacacgcaatcttccaggatggccaactctcctgttctaaaatcttcagatacatcaaacaataaaataaatgtaaatataaatttgagcggtccctcaccttctcaaccacagtctccatcggccacaatgccaccacctcaaagtccaagtaattgtcccgcatctccaactccagcacatttcgaaaaggagtatagaacaggtaaattgataggtgttgtgtcattgactgacatattaagtgtcttggcaagaaaacaaacacatcataaggaaattgatccgcagatggcgagaaagcaaagagggcatataggctga

SEQ ID NO: 76642 - DNA, 417 bp, Saccharomyces pastorianus
atgggtgcttggttatttatccttgctgttgttgtcaactgtatcaatttgtttggccaagtgcatttcacaatactatacgctgatttagaagctgactatatcaatccaattgaattatgttctaaagttaacaagttaattacccctgaagccgccttgcatggtgccttgtcattactattcttactgaacggttactggtttgtatttttattgaacttaccagttctagcttacaatctaaacaagatctacaataaagttcaacttttggatgctaccgaaatattcagaactttaggcaaacataaaagggagagtttcctaaagttaggtttccacttattgatgttcttcttctacttgtacagaatgatcatggctttgattgctgaaagtggtgatgacttctaa

SEQ ID NO: 76643 - DNA, 822 bp, Saccharomyces pastorianus
atggctgcgcagaatgcctttgaacagaaaaagagggcaattttgaatgagatagactcaacccaaccagatttgtcaccaaaaggcactatagatgaactatgccttccaataatcgatcttatcaacgcaagcgctgatatggtgacaacttcatcgtgttccggtagagtcagtgtattcttggaaggtactaagtcatataacggggaggtcaagataggtggtaagggacaaggcggtaaatggctttacgtcactcataatcgtgagaaagttattggctggttagatgagttgaaatcaaaaagtgagttttcttttgaactatctggcaaggagataccaacagagaaagtaacggggagtatcagatatatactttataagtatgagcctttcatattgcacgttaaatgcagagactttcaagcagcatccaagttatacaacacagccatgtcttgtggtttcagagaaagtgggattggttcgaacaatctggtcgcaatcagaataaatatcaagctggacgtaccgctcggttatttagatgagacttcaggcactttgaaattttttgtaactccagaatacgtaagcgttctggattctttatcgttaagcaaattcgatgagaataccaggaaaatgcaagcactatatgatagaattgaaaaagaactcataaattgtgcgccggatgtaaattctaaggtcaatataatgccaatcgaaacaaaggaagagaggagagaacgaaagaaaagagaaggtatggagagacaacgtcaacttaagagcccacaaaatgtgctataa

SEQ ID NO: 76644 - DNA, 2745 bp, Saccharomyces pastorianus
atgactgaccaaagaggtccaccgcccccacacccgcagcaagccaatggctacaagaaatttcctcctcatgataaccaatactctggagccaataatagtcagccaaataaccactacaatgaaaatctttacagtgcaagggaacctcacaataacaagcaataccagtcgaaaaatggcaaatacgggacaaataaatacaataatcgtaataatagtcaaggaaatgcacagtactacaataacagattcaataatggctacagactgaataacaacgactataacccggcaatgttgccaggtatgcaatggccagctaactactatgctcctcagatgtattatataccccaacaaatggttccagttgcttctccaccatatacacaccaaccactcaacactaatcccgcacctccctctacacctaaaactacaaaaatagaaatcactacgaaaactggtgaacgtttaaatttgaaaaaattccacgaagaaaagaaagcttcgaaaggtgaagagaagaatgatggggtagagcagaaatctaaatcaggaaccccttttgaaaaggaggcaactcctgtactacctgctaatgaagcagttaaagatacgttaaccgaaacatctaatgaaaaatctacctctgaagcagaaaatactaagagattatttttagagcaggtgagattgcgcaaagctgccatggaaagaaagaaaaacggtttaatttccgaaactgagaagaagcaagaaacttcaaatcatgataatactgatacaactaagcccaactcggttattgaatctgaacctattaaggaagcgtcgaaaccaacgggagaagctaatgaagttgtgattgatggaaaatcagggccaagtggtaaaactccacaacatgtaactggaagtgtaactaaatccgtgacttttaacgaacccgagaatgagagcagttctcaggatgttgatgagcttgttaaagatgatgatactactgaaatttcggatacgactggtggaaaaactgtaaataaaagtgacgacgaaacaataaattccgtaatcaccacagaggagaacacagtgaaggagacagaaccttccacttccgatattgagatgccaactgtatctcaactacttgaaactttaggtaaggctcaaccaatttctgacatatatgagtttgcctatccggaaaatgttgaaaggcctgatatcaaatacaagaaaccaagcgttaagtacacttatggccctaccttcttactgcaattcaaagataaactaaaattcaggcctgatactgcgtgggttgaagctgtatcctcgaagattgttatacctcctcatatagccagaaataaaccaaaagatagtggcagatttggaggcgatttcagaagtccatctatgcgcggtatggaccatacttccagttcaagagtttcatcgaaaagaagatcaaagagaatgggtgacgacagaagatctaatagaggatatacctccagaaaagatcgcgaaaaagctgcagaaaaggcagaagagcaagctccaaaggaagaaatcgccccgttggttccaagtgctaatagatggatacctaaatcaagggttaaaaaaacagaaaagaagttagctcctgacggcaaaactgaattatttgacaaggaagaagtagaacgaaaaatgaagtctctattaaacaagttaactttagaaatgtttgattcaatctcctctgagattttggatatagcaaaccaatcaaagtgggaagatgatggcgaaacattgaaaatagttattgaacaaattttccacaaggcttgtgatgaacctcattggtcttcaatgtatgctcagttatgtggcaaagtggtcaaagaccttgacccaaacattaaagataaagagaacgaaggaaagaatggaccaaagcttgtgttgcattatttagtggcaagatgtcacgaagaatttgagaaaggttgggctgataagttgcctgcaggagaagatggtaatccactagaacctgaaatgatgtccgatgagtattatattgcggctgccgccaagagaagagggttaggtttagtacgtttcatagggtacttatattgtttgaacttattaactggtaagatgatgtttgagtgcttccggagattaatgaaagatctaaacaacgatccatccgaggagacgttagagtccgttattgaattactgaatactgtgggtgaacaatttgaacatgataaatttgttacgccccaggcaactcttgaaggttcggtactactcgacaatctatttatgttgttacaacatatcattgacggtggcaccatatcgaacagaataaagttcaagttgatagacgtgaaggaattgagggaaattaagcattggaacagcgctaagaaagacgccggaccaaagacaattcaacaaatccaccaagaagaagaacaattacgtcagaaaaagaacagtcagagatcaaattctagattcaacaatcacaaccaatcgaacagcaacagatattcttctaacagaaggaacatgcaaaacacccaaagagatagttttgcttccacgaaaacaggttctttcagaaataaccaaagaaatgctcgtaaagtcgaagaagtttctcaagctccaagagctaatatgttcgacgcattaatgaataacgatggggacagtgattaa

SEQ ID NO: 76645 - DNA, 1218 bp, Saccharomyces pastorianus
atgacagctgctgtaacatcctccaatatagtattagaaacccacgaaagtggtatcaaaccatattttgaacagaagatccaagaaacagaattaaagatccgctccaaaacagaaaatgttcgcagactggaagctcaaaggaatgcattgaatgacaaagtacgttttatcaaggacgaactgcgtctattacaggaacctggatcttatgtgggtgaagttataaagatcgtgtctgacaaaaaagttctcgttaaagtgcaacctgagggaaaatacatcgtggatgttgcaaaagatataaacgtgaaggacttaaaggcatctcaaagagtttgtctaaggagtgactcttatatgttgcataaagttcttgagaataaggctgacccactagtttcgttgatgatggtggaaaaagttcctgattccacatacgatatggttggtggtttgacaaagcaaataaaggagattaaagaagttattgaattgcccgtaaaacatcctgaactttttgaaagtttgggtattgcgcaaccaaagggtgtcatcttatatggcccccctggtacagggaaaaccttattggcaagagctgtcgcacatcacactgattgtaaattcatcagggtcagtggtgcggaactggtacaaaagtatatcggcgaaggttcccgtatggtccgtgagctgtttgtgatggctagagaacatgctccctcaattatctttatggatgaaatcgattctattggctctactcgtgtagaaggttctggtggtggtgattcagaagttcaaagaacaatgttagaactactaaaccagttggacgggtttgaaacttctaaaaatatcaaaatcataatggccacgaatagactagatattctagatccagcacttttgagacccggtagaatagataggaagattgaatttccacctccaagtgtcgcagctagagctgaaattttaagaatccactccagaaaaatgaatctaactcgtggtatcaacttgagaaaggttgctgaaaagatgaacggttgttctggtgctgatgtcaaaggtgtctgtacagaagctggtatgtatgctttaagagaaagaagaatacatgttactcaagaagacttcgaactcgctgtgggtaaggttatgaacaagaaccaagaaacggccatttctgtcgccaagttgttcaagtga

SEQ ID NO: 76646 - DNA, 609 bp, Saccharomyces pastorianus
atgggtattattgaagaaaagactctttttgttacgtgtggggcaacggtgccatttccaaagctcgtctcatgtgtgctaagcgacgaattctgccaagaattgattcaatatggattcgtacgtctaatcattcagtttgggagaaactacagttctgaatttgagcatttagtgcaagaacgcgggggccaaagagaaagccaaaaaattccaattgaccagtttggctgtggcgacaccgcaagacagtatgtcctgatgaacgggaaattaaaggtgatcgggtttgacttttcgaccaagatgcaaagtattatacgtgattattcagatttggtcatatcacacgctggaacgggctctatactagattctctacgtttgaataaaccgttgatagtttgcgtaaacgattctttgatggataaccaccagcagcagatagcagacaagtttgtagagttgggctacgtatggtcttgtgcacccactgaaacaggtttgatagctggtttacgtgcatctcaaacagagaaactcaaaccattcccagtttctcataacccgtcatttgagcgattgctagttgaaactatatacagctag

SEQ ID NO: 76647 - DNA, 888 bp, Saccharomyces pastorianus
atgaataggcagagcggtgtgaatgcgggggtacagaacaacccaccatcccgagtggtgtatctgggttctataccatacgatcaaacagaggagcagatacttgatttatgtagtaatgttgggcccgtgatcaatttgaaaatgatgttcgacccccaaactggtaggtcgaaagggtacgcgtttattgaatttagagatttagagtccagtgccagcgcagtacgtaatttgaatggataccaattaggctctaggtttttgaaatgcggttactccagcaatagtgatatatcgggagtttcacaacagcaacaacaacagtacaacaacattaatgggaacaataacaacaatggaaataataataatagtaatgggccggactttcaaaacagcggaaatgccaattttctaagtcaaaagtttccagaattgccctctggtatcgacgttaacataaacatgaccacccctgctatgatgatatcgagcgaactagctaaaaaaccgaaagaggtgcagttgaaatttttacaaaaattccaagaatggacaagagcgcatcctgaagatgctgtttcgctattagagctgtgtccacagttgagttttgttacggctgaattattgctaacgaatgggatatgtaaagtggatgatttgatcccgttagcttccaggccgcaagaagaggcatcggctacgaataacaatagtgtgaacgaggtggtggatccagctgtgcttaacaaacagaaagaactactgaaacaggtgttacaactgaatgacagccaaatttctatcttgcccgatgatgaaaggatggctatttgggacttaaaacaaaaagcattaaggggagaatttggtgcattttga

SEQ ID NO: 76648 - DNA, 183 bp, Saccharomyces pastorianus
atgttcgatagttctatcgaacgagtgactctggaactatgcttccatataactcttagcattatgtgtggctgtagtatctactttctgcttcttgtgtttattctaactttttattcgtcggttttgttacatcttaaattgtatttctttagttctgaccgagccatatttaatgcatag

SEQ ID NO: 76649 - DNA, 1029 bp, Saccharomyces pastorianus
atgcatacagctgaatttttggaaacagaaccaacagaaatctcatctgttctagcaggtggttataatcacccactgctgagacagtggcaaagtgagcgtcaactgactaagaacatgttgatttttccgctattcatctccgataatccagatgattttactgaaattgactctctacctaatatcaatagaatcggtgtaaataggctaaaagactacttaaagccattagtggccaagggtttgcgttctgtgatcttgtttggtgtgcctctcatccctggtaccaaggatccagtgggtacagcggctgacgatcctgcagggccagtcattcaaggtattaaattcattcgtgagtatttccctgaactgtatattatttgcgatgtctgtctctgtgaatacacttctcatggccattgcggggttctatacgatgatggtactattaatagagaacgtagtgtctctagattagcagctgtggcagttaactacgctaaagctggtgcgcactgtgtggctcccagtgatatgatcgatggtaggatcagagatattaaacgaggcttaataaatgcaaacttggctcacaagaccttcgtgttatcctatgcagctaagtttagcggtaatctatatgggccattccgtgatgctgcttgttcagctccttcgaatggtgataggaaatgttaccaattacctcctgccggtcgtggcctggcacgtagggcgttggaaagggatatgagtgaaggtgccgacggtattattgttaagccttccactttctacttagatataatgagggatgcaagtgaaatttgtaaagacttaccaatctgcgcatatcacgtgtcgggcgaatacgcaatgttacatgctgcagctgaaaaaggtgttgttgatttgaagacaattgcctttgaatctcatcaaggtttcttgagggcgggtgccagattaatcatcacttatttggctcctgagttcctagactggttagatgaagaaaactaa

SEQ ID NO: 76650 - DNA, 1047 bp, Saccharomyces pastorianus
atgactactgaaaaaaccgttgtttttgtttctggtgctactggtttcattgctctacacgtagtggacgatttattaaaaactggttacaaggtcatcggttcgggtaggtcccaagaaaagaatgatggattgctgaaaaaatttaagagcaatcccaacctttcaatggagattgtcgaagacattgctgctccaaacgcttttgacaaagtttttcaaaagcacggcaaagagatcaaggttgtcttgcacatagcttctccggttcacttcaacaccactgatttcgaaaaggatctgctaactcctgctgtgaatggtaccaagtccattctagaagcaatcaaaaattatgccgcagacacagtcgaaaaagtcgttattacttcttctgttgctgcccttgcatctcccggagatatgaaggacactagtttcgttgtcaatgaggaaagttggaacaaagatacttgggaaagttgtcaagctaacgcggtttccgcatactgtggttccaagaaatttgctgaaaaaactgcttgggattttctcgaggaaaaccaatcaagcatcaaatttacgctatcaaccatcaacccaggatttgtttttggccctcagctatttgccgactctcttagaaatggaataaatagctcttcagccactattgccaatttggttagttctaaattaggcgacaatttttataattacagtggtccttttattgacgttcgcgatgtttcaaaagctcatttacttgcatttgagaaacccgaatgcgctggccaaagactattcttatgtgaagatatgttttgctctcaagaagcgctggatatcttgaatgaggaatttccacagttaaaaggcaagatagcaactggcgaacctggtagcggctcaacctttttgacaaaaaactgctgcaagtgcgacaaccgcaaaaccaaaaatttattaggattccaattttataagttcagagattgcattgtcgatactgcctcgcaattactagaagttcaaagtaaaagctaa

SEQ ID NO: 76651 - DNA, 1443 bp, Saccharomyces pastorianus
atgtctaggaagttgtcccacctgatcgctacaaggaaatcaaaaacaatagtcgtaaccgtacttcttatttattctttgttgacatttcacttgtcaaacaaaaggctgctttctcagttttaccctagcaaagatgatttcaagcaaactcttctccctacgacttctcattcacaagatataaatttgaagaaacaaattacagttaacaagaaaaaaaatcaattgcataatttacgtgatcaattatcgtttgcgtttccctacgactctcaggcccccatcccgcaaagggtgtggcagacctggaaagtcggcgcagatgataagaattttccctcttcgttcagaacctatcaaaaaacatggtctggttcgtattcaccggattaccaatattctctgatttcggatgattctattatcccttttttggagaatctttacgcacccgttccgatagtcatccaagcgtttaaattgatgcctggaaatatcctaaaggcagattttttaaggtacctattattatttgcaagaggtggtatttactcagatatggatactatgcttttgaagccaattgattcatggccttctcagaataagtcatggctaaacaacataatagatttgaataaacctattccttataagaactcaaagccctcacttctctcaagtgatgagatatcacaccagccaggtttggtcatcggcattgaggcagatccggacagagatgattggagtgaatggtatgctcgtaggatccagttttgtcaatggactatccaagccaaaccaggtcacccaattctaagagaattgatcttaaatattactgcaacgactttggcgagcgtacaaaacccaggagttcctgtcagtgaaatgattgatccaagatttgaagaagactacaacgtaaactataggcacaaaagacgtcatgatgagacctacaaacactccgaattgaaaaataacaaaaatgttgatggctcagatataatgaattggacgggtccaggtattttctccgacattattttcgaatacatgaacaatgtgctccgatacaatagcgatatcttgttaatcaacccaaacctaaacaagaacgacgaagaaggtagtgagagtgccaccacaccagcaaaagatgttgataacgatacgctgtccaaatcaacaagaaaattttataagaaaatatcagagtctttgcaatcgtcaaattcaatgccctgggaattcttctcttttttgaaagaaccagttatcgttgatgatgtgatggttctaccaataacaagtttttcaccagatgtggggcagatgggcgcccagtcgagtgacgacaaaatggcttttgtaaagcacatgtttagcgggagctggaaagaagatgctgataaaaatgcaggtcataaataa

SEQ ID NO: 76652 - DNA, 651 bp, Saccharomyces pastorianus
atgaagactttaattgttgttgatatgcaaaatgattttatttcacctttaggttccttgactgttccaaaaggtgaggaattaatcaatcctatctcggatttgatgcaagatgctgatagagactggcacaggattgtggttaccagagattggcacccttccagacatatttcgttcgcaaagaaccataaagataaagaaccctattcaacatacacctaccactctccaaggccaggcgatgattccacgcaagagggtattttgtggcccgtacactgtgtgaaaaacacctggggtagtcaattggttgaccaaataatggaccaagtggtcactaagcacattaagattgtcgacaagggtttcttgactgaccgtgaatactactccgccttccacgacatctggaacttccataagaccgacatgaacaagtacttagaaaagcatcatacagacgaggtttacattgtcggtgtagctttggagtattgtgtcaaagccaccgccatttccgctgcagaactaggttataagaccactgtcctgctggattacacaagacccatcagcgatgatcccgaagtcatcaataaggttaaggaagagttgaaggcccacaatatcaatgtcgtggataaataa

SEQ ID NO: 76653 - DNA, 1515 bp, Saccharomyces pastorianus
atgcaaagcccatatccaatgacacaagtgtctaacgttgatgatgggtcactattgaaggagagtaaaagcaagtccaaagtagctgcgaagtcagaggcgccaagaccacatgcttgtcctatctgccatagagcatttcacagacttgaacatcagacgagacacatgagaattcatacaggtgagaagcctcacgcgtgtgacttccccggatgtgtgaaaaggttcagtagaagcgatgaactgacgagacacagaagaattcatacaaactcccaccctcgaggtaaaagaggcagaaagaagaaggttgtgggctctccaataaatagtgctagttctagtgctaccagtataccagatttaaatacggcaaatttttcaccgccattaccacagcaacacttatcgcctttaattcctattgctattgctccgaaagaaaattcaagtcgatcttctacaagaaaaggtagaaaaaccaaattcgaaatcggcgaaagtggtgggaatgacccatatatggtttcttctcccaaaacgatggctaagattcccgtctcggtgaagcctccaccttctttagcactgaataatatgaactaccaaacttcatccgcttccactgctttgtcttcgttgagcaatagccatagtggcagtagactgaaactgaacgcgttatcgtccctacaaatgatgacgcccattgctagcagtgcgccaaggactgttttcatagacggtcctgaacagaaacaactacaacaacaacaaaattctctttcaccacgttattccaacactgttatattaccaaggccgcgatctttaacggattttcaaggattgaacaatgcaaatccaaacaacaatggaagtctcagagcacaaactcagagttccgtacagttgaagagaccaagttcagttttaagtttgaacgacttgttggttggccaaagaaataccaacgaatctgactctgattttactactggtggtgaggatgaagaagacggactaaaggacccgtctaactctagtatcgataaccttgagcaagactatttgcaagagcaatcaagaaagaaatctaagacttccacgcccacgacaatgctaagtagatccactagtggtacgaatttgcacactttggggtatgtaatgaaccaaaatcacttgcattcctcctcatcatctcctgatttccaaaaggagttgaacaacagattactgaacgttcaacaacagcagcaagagcaacataccctactgcaatcacaaaatacgtcaaaccaaagtcaaaatcaaaatcaaaatcaaatgatggcttccagtagttcgttaagtacaaccccgttattattgtcaccaagggtgaatatgattaatactgctatatccacccaacaaacccccatttctcagtcggattcacaagttcaagaactggaaacattaccacccataagaagtttaccgttgcccttcccacacatggactga

SEQ ID NO: 76654 - DNA, 366 bp, Saccharomyces pastorianus
atgaatgtagttgccattataatagcttctcaggaaacctgtagcggccgggccccgcgagaaactccagagtggcgtaggccggcttgtttagttgctagcatgcttgttcgagctcatgagttctcctggcttttctccacgtgtctgcttgttgcctttgatttcgcgagagactgcggactgccaccccactccgggaaaacctggagtgatggtaaaggccctgcggcgctttctttcggaaaaactaatacgaaagaagcaacaacaaatttttacaacaggctggacgagaaaagtggggaagagcaagcagaaaaaagaaaagagaatagtcgttctcggataatttatttattataa

SEQ ID NO: 76655 - DNA, 264 bp, Saccharomyces pastorianus
atgcagttacttcgctgtttttcaatattttctgttattgcttcagttttagcacaggaactgacaactatatgcgagcaaatcccctcaccaactttagaatcgacgccgtactctttgtcaacgactactattttggccaacgggaaggcaatgcaaggagtttttgaatattacaaatcagtaacgtttgtcagtaattgcggttctcacccctcaacaactagcaaagacagccccataaacacacagtatgttttttga

SEQ ID NO: 76656 - DNA, 468 bp, Saccharomyces pastorianus
atgaaggttgaaatcgattctttttcaggtgccaaaatctacccaggcagaggtaccttgtttgtccgtggtgactccaaaatcttcagattccaaaactccaaatctgcctctttgttcaagcaaagaaagaacccaagaagaatcgcttggactgtcttattcagaaagcatcacaagaagggtatcaccgaagaagttgctaagaagagatctagaaaaaccgttaaggcccaaagaccaattaccggtgcttctttggacttgatcaaggaaagaagatctttgaagccagaagttagaaaggctaacagagaagaaaaattgaaggccaacaaagaaaagaagaaggctgaaaaggctgctagaaaggctgaaaaggctaagtctgctggtactcaaagttctaagttctccaagcaacaagctaagggtgctttccaaaaggttgctgctacttctcgttaa

SEQ ID NO: 76657 - DNA, 363 bp, Saccharomyces pastorianus
atggtgaatgaaacaggagaaagtcaaaaagcggcaaaaggcactccagttagtgggaaggtatggaaggcagaaaagacaccgctgagggccaaaagcagagtcgttaagaacaagaagttaacatcatgggagttgaaaaaacaaaaaagactcgaagataaacagttcaaagaaagattgaaggctttgaaggatgagaaggaagaagctcgtcaagctaaaataaccatgttaaaggaaagaagagagaagaaggaagagaatgaaagatacgaacgtttggctgctaagatgcatgctaagaaggttgaaagaatgagaagaagagagaaaagggacaaggctttaaaagaacgttag

SEQ ID NO: 76658 - DNA, 2502 bp, Saccharomyces pastorianus
atgcttatttcaaaatctaagatgtttaaaacattttggatactaaccagcatagttctcctggcatctgccaccattgatattggtaaactacaagaattcgaagaatatcaaaagttcacgaatgaatctttactgtgggcgccgtatagatccaattgttactttggtatgagacccagatatgtccatgaaagtccactaattatgggtatcatgtggttcaacagtttgagtcaggatggcttacattcgttaagacattttgcaacgcctcaggataaattgcaaaagtatggttgggaagtgtatgatccaagaattggtggtaaagaagtttttattgatgaaaaaaataacttgaacttgactgtttattttgtaaagagcaagaacggggaaaattggtcagtgagagttcaaggtgagcctttggatcccaagagaccatctacagcatctgtcgtattgtactttagtcaaaatggtggcgagatagatggaaaatcttccttagcaatgataggtcatgacggccctaatgacatgaaattcttcggatattctaaagaattaggcgagtatcatcttacagtaaaggacaattttggtcactacttcaaaaatccggaatatgaaaccatggaagtagcaccaggaagtgactgctctaaaacaagtcatttatcacttcaaatcccggataaagaagtttggaaggctcgtgatgttttccaatctctagttagcgattcgatacgtgatatactggaaaaggaagagacaaagcagcgtcctgctgatttcataccaagtgttttaactattagaaatttgtacaattttaatcctggcaattttcattatatacaaaagacatttgatttgaccaaaaaagatgggttccaatttgatatcacttacaataaacttggcactactcaaagtatttccaccagggaacaagttacggagttgattacttggtcactaaatgagataaacgcacgttttgataagcagtttagttttggagaaggtcccgactcaattgaaagcgtggaggtcaaaagaaggtttgctttagagacgctatcaaacctattaggaggaatcggttatttctatgggaatcaactaattgatcgtgaaacagaatttgatgagagtcagtttacagagatcaaactgctgaatgcaaaagaggaaggtccatttgaactgtttaccagcgttccgagccgtggctttttcccacgtggattctattgggatgaaggtttccatcttctacaaattatggagtatgattttgaccttgcctttgaaatcttagcgagctggtttgaaatgatcgaagatgatagtggttggattgctagagaaattatactgggtaatgaggcaaggagtaaagttccgcaggaatttcaggtgcaaaatcccaatattgctaatccgccaactttattgctagcatttagtgaaatgctttctagggccattgaaaacatcggcgatttcaacagtgacagctaccaccaagtcatgttcaatagtaggacagccaagtttatgacgaacaatctagaagccaatcctggcttgctaaccgaatatgccaagaaaatttatcctaagctattgaagcactataattggttcagaaaatctcaagcaggacttattgatgaatatgaggaaatattggaagatgaaggaatatgggataagattcataagaacgaagtttatagatgggttgggcgtaccttcactcattgtttgccaagcggtatggatgactatcctagagcacaaccaccagatgtagcagaattgaacgtagacgcattagcatgggtgggcgttatgacaagatccatgaagcaaatcgctcacgtgttaaagttaacacaggacgagcaaagatatgcacaaattgagcaagagatggtggagaatctggatttgttacactggagtgaaaatgacaattgctactgtgatattagcatcgatccagaagacgatgatattagggagtttgtatgtcatgagggttacgtctccttattgccctttgcattgaagctaatccccaaaaactcacccaagctagagaaagtagttgctttgatgagtgacccagaaaaaatcttttcagactatggactgttatcactatcgagacaagatgactatttcggcaaggatgaaaactattggagaggcccaatttggatgaatattaattacttgtgtcttgacgcaatgagatactactacccagaggtgattctcgacgtggctggtgaggctagcaatgccaagaaactgtaccaaagtttaaagattaatctcagtaacaacatatacaaagtttgggaagaacaaggttattgttatgaaaattacagtccgatagatggtcatggtactggtgctgagcatttcacaggctggacagcacttgttgtcaacatccttggacgcttctga

SEQ ID NO: 76659 - DNA, 2124 bp, Saccharomyces pastorianus
atgtcagaacaactcagacaaacgtttgctaacgctaaaaaagaaaacaggaacgccttggtcacatttatgaccgcaggttacccaacagtcaaagacactgtccctattctcaagggtttccaggatggtggtgtagatatcatcgaattgggtatgcccttctctgatccaattgcagatggtcctacaattcaattatctaatactgtggctttgcaaaacggtgttaccttgcctcaaactctagaaatggtctcccaagctagaaatgaaggtgttaccgtacccataatcctaatgggttactataaccctattctaaactacggtgaagaaagatttattcaggacgctgccaaggctggtgctaatggttttatcatcgtcgatttgccaccagaggaggcgttgaaggttagaaactacgtcaatgataatggtttgagcctgatcccactagtggctccttctaccaccgatgaaagattggaattactatcgcatattgccgattcgtttgtctacgttgtgtctagaatgggtactactggtgttcaaagttctgtggccagtgatttggatgaactcatctctagagtcagaaagtacaccaaggatactcctttggccgttgggtttggtgtctctaccagagaacatttccaatcagttggtagtgttgctgacggtgtagtgattggttccaaaatcgtcacattatgtggagatgctccagagggcaaaaggtacgacgttgctaaggaatatgtagagggaattctaaatggtgctaagcataaggttctgtccaaggacgaattctttgcctttcaaaaagagtccttgaagtccgcaaacgttaagaaggaaatactggacgaatttgatgaaaatcacaagcatccaattagatttggggactttggtggtcagtatgtcccagaagctcttcatgcatgtctaagagagttggaaaagggttttgatgaagctgtcgctgatcccacattctgggaagacttcaaatccttgtattcttatattggccgtccttcttcactacacaaagctgagagattaactgagcattgtcaaggtgctcaaatctggttgaagagagaagatcttaaccacacgggatctcacaagatcaacaatgctttagcacaagttcttctagctaaaagattaggcaagaagaacgttattgctgaaaccggtgctggtcaacacggtgttgccactgccactgcatgtgctaaatttggcttaacctgtactgtgttcatgggtgcagaagatgttcgtcgccaagctttaaacgtcttcagaatgagaattctcggtgctaaagtaattgctgttactaatggtacaaagactctaagagacgctacttcagaggcattcagattttgggttactaacttgaaaactacttactacgtcgtcggttctgccattggtcctcacccatatccaactttggttagaactttccaaagtgtcattggtaaagaaaccaaggaacagtttgctgccatgaacaatggtaaattacctgacgcagttgttgcatgtgttgggggtggttccaactctacaggtatgttttcaccatttgagcacgatacttccgttaagttattgggtgtggaagccggtggtgatggtgtagatacaaagttccactctgctactctaactgccggtagacctggtgtcttccatggtgtcaagacttatgtcttgcaagatagtgatggtcaagtccatgatactcattctgtttctgctgggttagactacccaggtgtcggtccagaattggcatattggaaatctactggccgtgctcaattcgttgcagctactgacgctcaggctctgcttggctttaaattattatctcaattagaaggtattattcccgctttggaatcttctcatgctgtttatggtgcttgcgaattggctaagacgatgaagcctgatcaacatttggttatcaatatttctggtagaggtgataaagatgtccaaagtgtcgctgaagtcttgccgaaattaggtccaaagataggttgggatttgagattcgaagaagacccatctgcctaa

SEQ ID NO: 76660 - DNA, 1296 bp, Saccharomyces pastorianus
atggcgccgagcgaaattttaaagagaacaacagaaacagtcaccaagacttcttcaattaggcagcgcaaaacggacacaacagcagtaaagacaaccggaatggactcgattataccggcaggcgtcaagctagatgatttacaagtgatattggctaagaacgagaatgaaaccagggacaaagtgtgtaagcagatcaacgaagcacgcgatgaaattctgccgttgcgattgcagttcaatgaattcatacagataatggcaaacatagaccaagaaggatccaagcaggctgaccgtatggccaaatacctacatatcagagacaagattttgcaactgaacgatagattccagactttgtcttcgcatttagaagcactgcaacctttattcagcactgtaccagaatacttgaagactgcagataacagggacagaagtttccagcttttggaaccgttgagtacttataacaaaaatggcaacgccgtttgctcgacagcaactgttgtaagcaccaaccactctacggccgcttcgacacccaccacaactgccacccctcatgcaaatcccatcacacatgcgcactcgctttcgaatccaaatagcaccgctacaatgcaacataatcccctggccggcaagagaggtccaaaaagcggtagtactatgggaactccaaccgtacataatagcactgcagctgcaccgattgcggcacctaaaaagccaagaaaaccaagacaaaccaagaaggcaaaggctcaagctcaggctcaagcgcaggctcaagcgcaggtctacgcacagcagtcgactgtccagacgccaataacagcatcgatggcagccgcgctacccaacccaactcctagcatgattaacagcgtttcgcccacaaatgttatgggcacgccgctgaccaacatgatgtctcccatggggaacgcatactcaatgggagctcaaaaccaagggggacaagtatctatgtcacaattcaatggcagcggcaatggatccaatccaaatacaaatacaaactccaataacaccccgctacagtcacaattaaacctaaacaatctaacccctgctaatatcctaaatatgagcatgaataacgatttccagcagcagcagcaacagcaacagcagcagcagcagcctcaaccacagtacaatatgaatatgggcatgaataacatgaataacggggggaaagaactggattctctagacctgaacaatctggaattaggtggtctgaacatggatttcttgtga

SEQ ID NO: 76661 - DNA, 1908 bp, Saccharomyces pastorianus
atgactgcgttgcatagtgtgtccaaaacgcccgcgatcaaggaagaggaggaggacggtgatgagcgagacggcagaggagttcccctgggaccaaggaaccatgactaccgtggcaggaaaggtgatgaggaaagcggcgctgacacagtgacatctcccatcacatttgaaaagaagaaggtagcgcccagggcgtcaacgcattccgaacagagtattttgagcagcatctcattgaaatcgatggtaaatcaacatcgtcggcagcagttgcagcaagagagctcaacaggggcaggcactgggtttgttgacagaaagcagcagatccaatctccggcgatggtgtccatattgaggaagaactctgctgaggagaatgttcgcagcagccacagtagcaagctcggtaaagggcagatagatggtaggaaggcttctgctagtaaggagatcggcaagacgttgccattcacggatgaccaaagatcgaaccctgaactagatcccaccaatagcgtggtggatgttagcaggggcaagaatacaaagagcaaaactgtgttcaatgagttagaagatgatgccgatgacgatgacgaggttcgacaaaagaatctaaccacgcaggcgttacgcaagttgtcgtcgttcaaaatgaatgctagttctaatttgaggttgagtaaagaaaacaaggcgaaagagtcttcatcttcgtccacgtcttcagtgtcgtcatcgtcgacgtcgaaggtggaaaatattgtcgacaagctgactacaacgaattctagctcgatgtcccaactgcggtttggcaacacgaacgtcattattgattcggtgaatcatgcggcgaaaccgccgcatcagcagatgctaaggaaaccctcgctggaatttttaccgcagcctgcttcgagcactaatctgaattttaattccaataaacataaatccaatgtaagacagatcagtaaccctaaaaaaccgctatacatccccgccgtgctgaggaaagtttcagagacaaacataactaatgacgatctgttgaatgcaacattgtcgtcttactacaagaaggcatctaacctggaacatggctttaatccaagcaagtcgcaatccgctagcgttcagaatgcgaacaacctacggatcatatcttctcaatccagcgtacaatccaacacatcgtcaatcttggaaagctacaaaaacaaaatatcctcgtacttgttcccgaattctattccgaacagcgacagaatcaacttaataccaactatttcaaacagaaactctgccagagtaaacctgcccactaaggaccactggattccggacagtaagaggaattcttgtcgttactgccataagccttttaccctgtgggaaaggaaacatcattgcaggcattgcggggacatcttttgtcaagaccatttgcgccattggctgtacctggactcccaggcaaattttataatgatcaacgaactaaacaacggtggcataaatggcggtggcactctctgtaaaatatgcgatgactgtctggtcgagtacgagaacctttcaaccacgaaccataacgcaaacacgaacgaggataacataaacgttgaggagggcgaagatgacgataatgacaataggaagaaattacgcaattactacaagaataggcagatgaacgctcttttcagaccaaagaagggcgcttcgtcccaagagcatgccacggttgatcgagacacaacaacgcccatccaggtgaagtcgaacgatgaagaagcagataatgagaatacggggggagaacaagaagaaggtaatgatgttttgggcagtgttatcggctctgtgcctgcaaactggaattggagtagtttctga

SEQ ID NO: 76662 - DNA, 2283 bp, Saccharomyces pastorianus
atgctacttcatttcgacattgtaattcaattactattaagtcatacccttaaatcgcaccaagtcgagccccccatggattttgaaacgtcgttcgaagaatttgtcgaagataaacgattcattgctctagaggtatctgataatgatgacgattgtgacactgatttgactgctgacacagctgacgagctggaaagctctgctatcttaaagatgagggagtctaatgcatctttaaatgttaccaccggcaataatacatcaaggaaaacgacttccaattccaaaaaacgatggtctctattatccaatcattctgctgtttcatcatctaaatctaagaaaagatggtctgtactttcttcaagctttaccagtgaatctcataaggacagggaatcgaggaacgttttgcaacaaaaaagaaaatccttgcagagttattcaagcttagatacggtagcatctaatagctctatctctgcttcttcttctttgaaaagatcgtccactggtctttccctcagacaattgtttaccaagataggcataaacgatgatatatcacaacctgggatcgggattccgcaaggtaaggaaaatctgcctccaactatgggcaaaaaaaattcatcaattgcttccactagttcggaaaacagacttaggacaccattgaagccgcttgttaatcattctaaaaggcccacttcacaaccacaacagcaacaaccactatataatgcatcattgtcctcgagaagatcgtcgatttcttccactgtctcttcttccagctcgtctaaatggagattctggaagagaaataagaaccaggcacctgcattgttgcaaccagaccaccattctttaaaaacctttcctgcagtaaaccgtcgtgattccatgacgcccgttgaaccaagaaatatggtaaaacataagacatccttttcagatttccataagactatcttcagttcaaatacgtattctgaaagcagcgatacaatatcttccatggaaactactttgaaaaacaaagcttcttcctcaagtctatctttgaacgtgttgaagaaaaggaattcgcaatcaagtttgaagcacaaaagttcacatgcatccttacaagaattcaaaagaaacaaaggaaagtcctccatgatagcaccatcgacagcaactaatagcagcaatgatgactcttgtagctacagttccaaaaattctacgttgagtcaccgaatatcgttacctgtaccggaccaagtttcccgtgataaaattcagaacaaattaagatattcgacctcattactctcattaaattctaaatcatctttaccgatgaacaaaaatgatcatgatgagacacttctaagacagattctacgaaattgtgatataaagagaattttaaaccccgcaaaaggagatgtattgcctttaatcaacgatgtaaaccatttgtcatcaatacaattaacatcaaatgtttggcaaattggtgaagtaatctgtaaaaaagtttctctcggtactattgatgacattacatgggatagaaagttcttatctttgcaggaactggaaaaactcaaaatcatgcaacaaaaatttgatggcataccgcaactattgaaaagttttgttgttaaagaggcaaatggggggttgtatttgtacttactattcaaagatcacggtaccccaatttcgttaatctcactgaaaaactggaagcagattctaaagattttttggtcttgtgctggtataattcatgggttggaaaaaaatttgaaatttgaacatcgtaatcttactttggataatattttgatagatggtaatgggaatataacaattattgattttaaatgcagtagattgcaaactcctcaagatgatgttttatatctacggctagatcatccactcttttttctaaatgggaaagacaagagtaaaataaacgaataccagtatcaatttgagtttgaaatctatcaaagtatgcgaatcttgttgaacatggacgcgtcagcttttgagcccatgacaaatttgtattggttatattacctgtcacgcgttttactaaagtttggtgacaggaagcttggtaagaatgatgcaaacagggataaaatggcaagggtgataaaccatttggaaatgaacttggcagttcataaaagaggggggcagttattcaaaagattggagacagaggacattaagaatactggagatttactaaaactttataaataa

SEQ ID NO: 76663 - DNA, 708 bp, Saccharomyces pastorianus
atgccttgggcagcagcggtagcgatattctttattgtggtcacaaagtttctacagtatacaaacaaataccacgagaaatggatctctaaatttgcaccaggaaatgaattatccaaaaaatacttagccaaggtcaaagaacgtcatgaattaaaagaattcaacaactctatctccgcccaggataattatgccaaatggactaagaacaatagaaaattggactcgttagataaggaaataaataacttgaaggacgaaatacaatcagaaaacaaagcctttcaggcccatcttcacaaactcaggttattggcattgacggtgccattttttgtgtttaagattatgtacggcaagacaccagtttacaagttgagttcctcgactagcaccttgttccctacgtttgtaagtggtgtttggtctcaaggctggttatatgttctcttgcatcctctaaggactatttctcagaaatggcatataatggagggcaaatttggtgcttccaagtttgatgatatggctttacagagtgtctctttgggaatctgggtttgggcattgatgaatgtcatcaacggcgtggaatttatcgttaagcaattgtttttgactcccaaaatggaagcacctgcatctgtagagactcaagaggagaaagccttggatgctgtcgacgatgccattattttagattag

SEQ ID NO: 76664 - DNA, 837 bp, Saccharomyces pastorianus
atgtcgcaagagtttgtggaagactattcacgtacagggtcctcagacgacgaggatagtggagcttatgacgagtggattccatcgttctgttccagatttggtcacgagtacttctgccaagtcccgacagagtttatcgaggatgatttcaatatgacctcgttatcccaagaggtaccccactaccggaaagctctggatttgatattggatttggaggctatgagtgatgaagaagaggacgaagacgacgtggtggaagaagacgaagtggatcaagagatgcagagtaatgacggtcatgatgaaggcaaaaggagaaacaagtcgccagtggtgaacaagagtattatcgagcacgcagcagaacagttatacggattgatacatgcaagatttattctgaccaagccaggcctgcaagcaatggctgaaaaattcgaccacaaggaatttggaacgtgcccccgttactattgtaatggcatgcagttgctgccttgtgggttgagcgatacagttgggaaacacaccgtaaggttgtactgtcccagttgtcaggacttgtatcttccccaatcatctagattcctgtgcttagaaggtgcattttgggggacaagcttccctggtgtgttcttgaaacatttcaaagaattggaagagtatgtggaaaggaaaagtaaagagtcctacgagttgaaagtttttgggttcaggataaatgatgaggcagtatctggtcctagaatgaagtggttgagacaatatccatccacggaggaggactgggaagaatttgccaaatgcgagttcgagacaccggcggtttaa

SEQ ID NO: 76665 - DNA, 555 bp, Saccharomyces pastorianus
atgttgaaatacttggttcaacgaagattcacttctacattttacgagctgttcccaaagaccttccccaaaaagctacccatttggactatcgatcaatccagattaaggaaggagtataggcaattacaagcacagcaccatccagacatggcccaacaaggtagtgaacagtcatcaactcttaatcaagcttaccatactctcaaagatccccttagaaggtcacaatatatgctaaaactcttgcgcaatatcgatttgacgcaagaacagacctcacatgaagtaactaccagtgatccacagctattattgaaagttctagacatccatgatgaattatcccagatggacgacgaagctggtgtgaagctgcttgaaaagcaaaacaaggaaagaattcaagatattgaagcccagttgggacaatgctacaatgacaaggattacgccgccgcagtgaagttgaccgtggagctaaagtactggtacaacttagccaaggcattcaaagactgggctccaggaaaacaattggaaatgaatcactaa

SEQ ID NO: 76666 - DNA, 1512 bp, Saccharomyces pastorianus
atgtccgataggttcgttatttgggctccctcgatgcacaatgaacctgccgcaaagtgtgggtattgtcacggtaataaggggggcaacatggatcagttgttcgcattggattcgtgggctcatcgttatatgaacaaaatggacgttgtaaagattgaaaactgcacaattggctctttcgtggaacatatggatgtagccacgtatgatcgcatgtgtaatatgggatttagaaggtctggtaagtttctttataaagtggacccgttgaggaattgttgtaggttatacaccattcgaactgcccctcaagaattgaatatgacaaaggaattgaaaaaatgcatcagccgctttgctactagaataacaagtgaggactactgcccagccgctgttgcaagcagtgattttgtgggcaaaattgttaatgcagagatgaattctaaaacattctatacccgatttgagcccgcactttatagtgaagaaaagtatcacttatttgtcaaatatcaggaaaaagtgcatcaagactacaataattcgccgaagtcctttaagcgattcctatgtgatacgccctttggccctgaagcggtgttggggacacaagaatcatgggagcagttaaacaattggcagcgaatgaagccaggcgagaaactgaagcatatgggtcctgtgcacgaatgctactactatgagggtaaattaattgccatcactgtgtcagatatcttgcccagtggtatatcttcggtatattttatttgggatccagactacagtaaatggtccctagggaagctcagtgctttgcgcgatcttgccatcattcaaaggacaaatctgcaatactattacctggggtactatattgaggactgtccgaagatgaattataaagcaaactatggtgcggaagtactggatgtgtgtcacagtaaatatatcccattgaaacccattcaggatatgatttctaggggcaaactctttgtcataggtgaagaagagacgaaagttactaaggagctctacctcgttgactctgaaaccggaagaggggagggatttcccactgataatgttgtcaagtacaagaatattgctgaggaaatatacggtgtgggagggtgtgcgtttaaatctgcaaatgaatctgcattggaattgaaagaactttacggtataccgtacgaagaggaagatttagataccatctaccatttgaaagaacacaatggccatgctccaaatggtattcctaatgtggtgccgggattgctcccgctatgggaattgctggacattatgcaatctggcaagatcactgacctggagggaagactatttctcttcgaaatcgaaacggaggggattcgaccattaattaacttttatagcgaacctccgaatgtcaagaaacgtatttgtgacgtgatacggttatttggcttcgaaacttgtatgaaagccgtcattttatatagtgagcaaatgtga

SEQ ID NO: 76667 - DNA, 3246 bp, Saccharomyces pastorianus
atgagctccattcacgaggttgtggctcttattgaagagctgtactctcctcatccgaaacatgatgttaatcagattcaacagagtttacagtcaatccagaaatcagagcaaggcttccacctagctaatgagcttttatctgatgacaagtactctgcgaatgtcaagtactttggtgcactgactttaactgtgcaactaaatacacggggtgaaaacgattatgaaaccctatggaatgttttcaggtcaaatttattgtacctgacgaaattcagtacattgtacgtttccaatcctaatatgtacgggcaatctctaatcataattaaaaagttaatgtcaaacttgtcattgatcttcactaaaatcaacgatccgcagcttaataacgctggaaatgaaaatatgattaagcaatggaacaatcccataaatacgtttattcaacttatgtcggttcaaaatcaaaacattaatgcagaccaactgttgcttgactcaatcaactgctccttaacatacgagcaactgtctcaatttgttagcctatctcagaaacataatgaactggcattgacgtttacagaagttattgtggaagatttgacgaagttccaaacaaagaggcattcaatgtctcaaatccacgaagtagtccatgagcatttatatatttcaactatggctttgatcaacttgaacttaactgcacaagctgtcttcaatcctaccgtatttgattgtattactgcttggattaattatatctcattaaccagaagcgtatcttcaagtggtagaatggatttgtcggaaatttttcaaaacctgattgacttgatgtatcagtctacagaaggatcggacggttatgagaatgcggaaaagatcctaacaatatttggtaatgtttttgctaatgatccattattaatgagttacgatttgagacaacaaatcgagtgtattttcttaggtgtagtaaggcctgattctggcataaccgacatatctaacaaaaattcttggatgctacaatatatgaattatttagttaccaatgattttttttccgaattgaaggaattggccatttgtattgtggatttcttgcaaattaacacgttaagtgtttgtaataaattatttactaacattcaagcagctgataatggtcaagttcaagatgaatatattcaggaatacatcaaagtccttttgcaaatgaccaatttccctttaactcctgtcttacaagagttcttttctgttagaatggttgatttttggttggatttatcggatgcttacactaatttggctagcgaaactttgaggccaaattctattgagctgtctacacaaatttttcagcagttgatcaatatttatttacccaaaatttctttgagtgtgaaacaaagaataattgaagaagagggtgagagcacttctgtgaacgaatttgaagattttagaaacgctgtcagtgaccttgctcaatctctctggtctattttgggaaacgataatttaacaaatgtgctaattgatggtatgggccaaatgcctgctgcgagtgatgagactctcatcatcaaggatactgatgttttgtttcgaattgaaacgatgtgttttgttttgaatactatattggttgatatgactctatcagaaagcccatggattaaaaatatcgttgatgccaacaaattcttcaaccaaaatgtcatatccgtcttccaaactggtttccaaactagtgccagtacaaaagtcagtcaaattttgaaacttgacttcgtaagaacaagtacaactttaatcggcactttggctggttattttaaacaggaaccttttcaattaaacccatacgtggaagctttatttcaaggtttgcacacttgcaccaattttactagtaaaaacgaacaagaaaaaatttcgaacgataaacttgaagttatggttatcaagactgtttcaacattatgtgagacatgccgtgaggagttgactccatatttgatgcattttataagctttttaaacacagtcattatgccagactccaatgtttcacatttcactagaactaaattggttagatctataggttatgtcgttcaatgtcaagtctccaacggtccagaggagcaagctaaatatattttacaattgacgaacctattgagcggctcaatagagcattgtttggcttcatcggtacagttacaagaacaacaagattatattaattgtctattatactgtatatctgagctagcaacaagtttgatccaacctactgaaatcatcgaaaatgatgcattactacaaaggttatctgagtttcaaagtttctggtccagcgatcccttacaaatccgatcgaaaattatgtgcaccattgataaggtcttggataattcaatatattgtaaaaactccgcctttgtggagatcggttgtttgattgttggtaaaggattaaatctgcccgacggggaaccgtacttcctcaagtacaatatgtccgaagttatgaattttgttttgcggcatgtccccaactgtgagcttgctacttgcttgccttattttgtttatttattagaaaagcttatttcagagttcaggaaggaactaacaccacaagaatttgatttcatgtttgaaaagatccttttagtctattatgatgcatatattatcaatgatccggaccttttacaaatgacaataggttttgttaataacgttttggacgtgaagccaggcttagctattggcagtaaacattggacatcatttattttacctcaatttttaaaattaataccttcaagagaaaagttcacaattgttgcggtggcaaaattttggactaagttgatcaataataagaaatacaaccaagaagaactcacaactgttaggcaacaagtttcctctataggaggagaccttgtgtaccaaattatgtatggcttattccacacacaaaggtccgatctgaatagttacacagatctgctaagagctttggtagccaagtttccaattgaagcaagagagtggctcgttgctgttttgccccaaatatgtaacaatcctgcaggtcatgaaaaatttattaataaattacttattacgagaggaagcagagcagctggaaatgttattttgcagtggtggttggattgtaccacacttccaaattaccaaggatga

SEQ ID NO: 76668 - DNA, 393 bp, Saccharomyces pastorianus
atgggagacacgatacgtccattaaattacgcagatatcgagaccagcgggcccataaaccttcttgagacaactaataacctaaaaagctcgttaaaaaagttttcacaaaaggcaaagggatcacacatttccagagaaaggattcaccattttagaaaatggaaaaataagaccgaatcactttcagaaaaccatttgaagcctcctcctgacgtcgactctctatgtttcagtaactgctttcaacctgacgccctgtctggaaatgtatttttaccccccagaagctcaaacatgtattggaatgaaaagcaattacaattagaaatggaaattctaaaatttttatcactaaatactagcaatgaatgctgcatttctgatgattag

SEQ ID NO: 76669 - DNA, 2664 bp, Saccharomyces pastorianus
  modified_base (1558)..(1600): a, c, g, t, unknown, or other
atgtctacaaaaggtttgaaagaagaaatcgatgatgtaccatcagtagaccctgtcgtttcagaaacagtcaattctgctttagagcagttgcaactagatgatccagaggaaaacgccacctctaatgcatttgcgaataaagtttctcaagattctcaatttgctaatggccctccgtcgcaaatgtttccacatccacaaatgatgggtggaatgggcttcatgccttactctcaaatgatgcaggttcctcataatccctgtccattttttccgccccctgattttaatgatccaacagcaccattgagtagctcgcccttgaatgcaggcggtccaccaatgttattcaagaatgactcacttccattccaaatgctgtctttgggtgctgcggtagcaactcaaggtggacaaaatctaaacccattgataaatgacaattcaatgaaggtattgccaatcgcatcggctgatccgttatggactcattcaaacgtaccaggatcagcatctgtagccattgaagaaaccaccgctactctacaagaaagcctaccatctaagggcagggagtctaataataaggctagttcgttcagaagacaaacttttcatgctttatcaccaactgaccttatcaatgcggccaacaatgtaaccttgtcaaaggacttccaatctgacatgcagaatttttctaaggctaagaaaccgtctgtaggagctaacaatactgcaaaaaccagaactcaatccatatcttttgataatactccctcctcaacgtcatttatacccccaaccaatagtgtttctgagaaattatctgatttcaaaatagaagaaacctcgaaggaggatttgattaataaaactgcaccagctaaaaaagagagtcctacaacttatggtgcagcatatccatatgggggacctttacttcaaccaaatcctattatgccaggccacccacataatatatcctcccctatctatggtattagatcaccttttcctaattcttatgaaatgggcgcgcaatttcaacctttctctccgattttaaatcctacgagtcattcactaaatgcaaattctccaattcctctaacccaatcgccaattcatcttgctccagttttaaaccctagttcaaattctgttgccttttcagatatgaagaatgatggtggtaagcccaccaccgataacgacaaggcgggtccaaatgttagaatggattcaataaatcctaatcttgggccatcaatgcaacctttccacatattacctccccagcaaaacactccccctcctccctggctttatggcactccacctcccttcaacgcaatggttccgcctcatttgttggctcaaaatcatatgccgttaatgaatagcgccaataataaacatcatggtcgtaataacaatagcatgtcaagtcataatgacaatgacaacattggtaattctaattacaacaataaagacacaggtcgttctaacgttggtaaaatgaaaaatatgaaaaacagttatcatggcnnnnnnnnnnnnnnnnnnnnnnnnnnnnnnnnnnnnnnnnnnnacagtaatgctaccaacagcaacagcgcggaaaaacaacgtaaaattgaggagtcgtcgagatttgcggacgcagttttagaccaatatatcggaagtattcactcattgtgtaaagaccaacatggttgtcgttttctgcaaaagcagttggatattctcggcagtaaggcggcggacgcaatttttgaagaaactaaggattatacggttgaattgatgactgattcattcggtaattatttgatccagaagctattggaagaggttaccacagaacaaagaatcgtactcacaaaaatatcttcccctcattttgtcgaaatttccttaaaccctcatggtactagggcattacaaaaactcattgaatgcatcaaaacagatgaagaagcacagattgttgttgattctttacgcccttatactgtccagttgagtaaggatttaaatggtaatcatgttattcaaaaatgtttgcaaaggttgaagcctgaaaacttccagtttatctttgacgcaatctctgatagctgtattgatattgctactcatagacacgggtgttgcgttttgcaacgttgtctagatcatgggactacagaacaatgtgacaatctgtgtgataagttgctagcccttgttgataaattaactttggatccatttggcaactatgtggtgcaatatataattaccaaagaggctgagaagaacaaatatgattatacgcataaaattgtccacctgttgaaaccaagagccatcgaactttctatccataaatttggatcaaatgtgattgaaaaaatcttgaagacagctattgtttcggagccaatgattctggaaattttaaataatggtggcgagacgggtattcaatcattgttgaatgatagctacggaaattacgttttacagacagcattagacatttctcataagcaaaatgacaatctctatagaagactatcagagattgtggcgcctttactggtgggccccataagaaatacacctcatggtaaaagaatcatcggaatgttacatttagattcatag

SEQ ID NO: 76670 - DNA, 162 bp, Saccharomyces pastorianus
atgaggaacctgcatcatttgagagtaaggcatgaagcccattccacccatcatttgtggatgtggaaacatttgcgacggagggccattagcaaattgagaatcttgagaaactttattcgcaaatgcattagaggtggcgttttcctctggatcatctag

SEQ ID NO: 76671 - DNA, 3213 bp, Saccharomyces pastorianus
atgcgaggcttgacacctaagaacggtgtacatattgagacgggtccggatacagaatcgtccgcggactccagcaacttttccacaggtttcagcggcaagattcgtaagccaaggtcgaaggtaagtaaagcgtgcgataactgtagaaaaagaaagataaaatgtaatgggaagtttccctgcgcaagctgtgagatatattcatgtgagtgcacgttcagcactagacaaggtggcgctcgaataaaaaaccttcataagacgagtttggaaggtgcaaccgtacaagtcaaagaggaaacagattccagttcgacttctttttctaatcctcagcgatgtacagacgggccatgcgcagtggaacaaccaacgaaattttttgagaatttcaagctaggtggtcgtagtagtggtgataatagtggaagtgatgggaagaatgacgacgatgtgaatagaaacggtttttatgaagacgatagcgaatcacaggcaactttgacatctctacaaaccactctgaaaaatttgaaggagatggctcatttaggtacacatgtaacctcagccatcgagagcattgaacttcagataagtgacttgcttaagcgatgggaacccaaagtgatgaccaaagaattagcaacaacgaaattttaccctaataaatcaatagaaactcaattgatgaaaaacaaatactgtgatgtggtacatttgacaagatatgccgcttggtcaaacaataagaaggaccaagatacttctagtcaacctttgatcgacgaaatctttggtttgtactctcctttccaatttttgtcacttcaaggtattggtaaatgtttccaaaattatagatccaaatccaaatgcgagatttttcccaggaccgccaaggaaaccatatacatcatgttaaggtttttcgacgtttgttttcatcacatcaaccaaggctgtgtctccatagctaatcccctggaaaactacctacagaaaatgaatcttttaccttcaaccccatcttcgatatcatctgcagggagcccgaatacagcacacacaaaatcgcatgttgtgttagtgataaatcacttaccgcagccctttgtgagaaacataaccggaataagtaattctgagctactaagcgaaatgaataatgatatcagcatgtttggcattttattgaagatgttggatatgcataaaaattcctaccagaacttcctaatggaaatcacatctaacccctccgtggctaaaaacacgcagtcaattgatgtcttgcaggaattcatccattattgtcaagctggagaggcgctaatcgccttatgttacagctattataattctacattatacaactacgtggacttcacatgcgacataacgcatttagagcaacttctatactttttggatctgctattttggctatcggaaatatacggttttgaaaaagtcttgaacgtagcagttcattttgtttcaagagttggtttatcaaggtgggaattttacgtgggtcttgatgaaaactttgctgaaagaagaagaaatctctggtggaaagctttctatttcgagaaaactttagcctctaaacttggctatccttcgaacattgatgactccaaaatcaattgtttattacctaagaattttcgagatgttgggttcttggataatagagattttatcgagaacgtccacttagttcgcaggagcgaagcttttgacaacatgtgcatatccgacttaaaatactatggcgaattagctgtcttacaaatagtcagccatttctcatcatctgttttattcgatgaaaaattcacgtcaattaggaatacatcaaaaccatctgttgttagagagaaactactcttcgaggtactcgagatttttaacgaaacagaaatgaaatatgatgctatcaaagagcaaactggaaaattgttcgatattgcattctctaaagatagtactgaactcaaagtttcaagagaggataagattatggcttcaaaatttgttctattttacgagcaccatttctgcagaatggttaacgaatctgataatattgtcgccagattatgcgtgcacagaaggccctcaatactaattgaaaacttgaaaatataccttcacaagatttacaaatcatggaccgatatgaacaaaatcttattagactttgacaacgattattccgtataccgttcattcgcccattattctatcagttgcatcattttggtatcacaagcattctcagtggccgaattcattaaagtaaatgacgttgtgaatatgattagagtcttcaaaagatttttggatataaaaattttttccgaaaatgagaccaatgagcatgtcttcaacagccaaagctttaaagactatacaagagctttttctttcctgacaatcgtcactcgtatcatgcttttggcatacggagagtcctctagcaccaacctcgatgttatctccaaatatattgatgagaatgcgccagatttaaaaggtataatagaactagtcttggatacaaactcttgcgcttatcgatttttattagaacctgttcagaagtcaggattccatttaacggtctcacaaatgttgaaaaatagaaagtttcaggaaccactaatgtcaaatgaagataataagcagatgaagcataattcgggaaaaaatttgaatccggatctcccaagtcttaagacgggcacttcatgcttactaaatggcattgaatcgcctcaattgccattcaatggtcgctcagcaccttccccagtgagaaacaactcactaccggagtttgcacaattgccttcatttaggtcattatccgtgtctgatatgatcaatcccgattacgcgcaaccaacaaatgggcaaaataatacgcaagtccaatctaataaaccaatcaatgctcagcagcaaatacccacttcagtacaagtaccatttatgaacacaaatgaaatcaataacaacaacaacaacaacaacaacaaaaacaataaaaacaatattaacaatattaacaacaacaacagtaacaatttttctgcaactagttttaatttggggacactagatgaatttgttaataacggtgatcttgaggacctctacagtatcctgtggagcgacgtttatccagatagttaa

SEQ ID NO: 76672 - DNA, 1422 bp, Saccharomyces pastorianus
atggcaaaggataatagtgagaagctgcaggtgcagggagaggagaaaaagtccaagcaaccggttaatttcctgcctcagggtaaatggctgaagccaaatgaaatcgaatatgagtttggtgggactactggtgttattggtatgctgatcgggtttccactgctaatgtactatatgtggatttgtgcggaattttatcacggtaaggttgccctacccaaggctggtgaatcgtggatgcactttatcaagcacctataccagttagtcttggagaacggtatcccagaaaagtatgactggactattttcttaacattttgggtgtttcagatcattttctactatacgttgcccgggatttggacaaaaggtcaaccattgtctcatttgaagggaaaacaattgccttacttttgtaatgccatgtggaccttgtatgtaactaccactttggtcttggttttgcactttaccaatctttttagattgtatgtcattattgaccgttttgggaggatcatgacatgtgccattatttcagggtttgccttctccatcatattgtacttatggactttatttatctcacatgactatcatagaatgacaggaaaccatctatatgatttcttcatgggagccccactaaaccctaggtgggggattttggacttgaagatgtttttcgaggttagattaccttggttcaccctttactttatcactttgggtgcctgtttgaagcagtgggagacttacggctatgtgacaccacaattgggggttgtcatgttagctcattggttgtacgcgaacgcatgtgctaaaggtgaagaattgattgttccaacctgggacatggcttacgaaaagtttggatttatgctgatcttctggaatattgccggtgtcccatacacttactgtcattgtacgttgtatttgtactaccatgacccatctgaatatcactggtctacactgtacaatgtttcgctgtacgttgttctattatgcgcctactacttctttgacacggcaaatgctcagaaaaatgccttcagaaagcaaatgtctggtgacaagactgttaggaagactttcccatttttgccataccaaattttgaagaatccaaagtatatggttacctccaatggatcgtacctattgattgatggttggtacactttggctagaaaaattcactacactgccgattggactcaatctctcgtttgggccttgtcttgcgggttcaactcggtgctcccatggtttttcccagtattcttccttgttgtcctgattcacagagccttcagagaccaagcaaaatgtaagagaaagtacggaaaagattgggatgagtattgtaaacattgcccttacgtctttattccttatgttttctag

SEQ ID NO: 76673 - DNA, 759 bp, Saccharomyces pastorianus
atgtcgggtgctgctgctgcatctgctgctggttatgacaggcacatcactatcttttcccccgagggtcgtttatatcaagtagaatatgcctttaaagcgactaatcaaactaacataaactcactagcggtcagaggtaaagattgtacagtggtgataagtcagaaaaaggtccctgataaactgttggatccaactactgtttcgtatattttttgtatttcaagaacaattggtatggtagtgaacggaccaataccggatgcaagaaatgcggccctaagagccaaggctgaggctgcagaattccgttataaatatggttatgatatgccatgcgatgtattggctaagagaatggctaacctttcccaaatctatactcaaagagcatatatgagaccattaggtgttatactcacatttgtttcggtagatgaagaattgggtccctccatttacaaaactgaccctgcaggttattacgttggctacaaagctactgcgacaggaccaaaacaacaggagatcacaacaaacttagaaaaccatttcaaaaagagtaaaatcgaccatattaatgaagaatcatgggagaaggtggtagaatttgctattactcatatgattgacgcactgggtaccgaattttcaaagaatgacttggaagtcggtgtcgctacaaaggacaaattctttaccttgagtgctgagaacatcgaagaaaggctagtagcaattgctgaacaagattaa

SEQ ID NO: 76674 - DNA, 525 bp, Saccharomyces pastorianus
atgggcgaaggtttgctggatttaagatctcagcttggattttacaagttttaccaccacaatcctaagaacgttttgatccattccatatttgtccccacaatcctatttagtggtagctgtatgctccacagagtcaaaatatatcagagtatttcattgactgctgtgctaagcgttttattttccatattttattgtcttctgtatttacccacagggctattagcaggagctctcttgcttttgttaaatcttgcactcatcgatcacagggttgatttaacatttaagcaggaactgggtttgtttactattggttggattttccaatttgttggccatggtgtctttgagaaaaggaggccagcgttaattgacaatctagttcagagcttggtgctggcaccatattttataatgttcgagttccttttcaaattgggtttcatgcctagattaaaggcaactctcgaacatgatcttgaaattaagcaaagaaatttgcggatgcaaagacaataa

SEQ ID NO: 76675 - DNA, 2340 bp, Saccharomyces pastorianus
atggtttacactccatccaagggtccaagaactctttacgataaggtttttgatgcacatgttgtccatcaagatgaaaatggttcctttttgttgtatatcgacagacacttggttcatgaagtcacctctccacaagctttcgaaggcctagaaaatgccggcagaaaggtcagaagagttgattgtactctagctactgtagatcataatattccaactgaatcaagaaagaatttcaaatcactagacacatttatcaagcaaactgattcgcgtttacaagtcaaaactttagagaataatgttaaacagttcggcgttccatatttcggtatgagtgatgccagacaaggtatcgtccacaccatcggtcccgaagaaggtttcactttaccaggtaccactgttgtttgtggtgactctcatacctctactcacggtgcctttggttcgctggcctttggtattggtacttctgaagttgaacacgtcttggccactcaaacaattatccaagctaaatcgaaaaacatgagaattactgttaatggtaagctatcacctggtatcacatctaaagatttgattttgtatattattggtctgataggtactgcaggtggtactggttgcgttattgaattcgcaggtgaagccattgaagctctttctatggaagcacgtatgtccatgtgtaacatggccatcgaagctggtgcaagagcaggtatgattaaaccagacgaaactactttccaatacaccaaaggcagacctttggctccaaaaggtgccgaatgggaaaaggctgttgcctactggaaaactttgaaaacagacgaaggtgccaaatttgaccacgaaatcaacattgaagctgtcgacgtgattccaactattacatggggtacttctcctcaagatgccttaccaattactggttccgtaccagatccaaaaaatgttacagacccaataaagaaatctggtatggaaagagccttagcctatatgggtttggaacctaacacaccgctaaagagcatcaaagtagataaagtctttattggatcttgtaccaatggccgtattgaagatttaagaagtgctgcagctgtagttaggggtcaaaaattggctagtaacatcaaattagctatggttgttccgggatctggtttggtcaaaaaacaagccgaagcagaaggtttggacaagattttccaagaagctggttttgaatggagagaagctggttgttcaatgtgtttaggtatgaaccctgatattttggatgcctatgaacgttgtgcttctacttccaacagaaatttcgaaggtcgtcaaggtgccttgtctcgtacacatctaatgtccccagccatggcggctgctgcaggtatcgcaggtcacttcgtagatattagagaattcgaatataaggatcaagaccaaagtagtccaaaggttgaggtcacttccgaagatgaaaaagagcttgaaagtgctgcttacgatcacgctgaacctgtccaacccgaagacgctccccaagatattgccaatgatgaattaaaagatattccagtgaagtcagatgatacacctgctaaacctagctcttccggcatgaagccatttttgactttggaaggtattagcgcaccattagataaggccaatgttgatacagacgctattatcccaaagcaatttttaaagacaattaagagaacgggtttgaaaaaagggttgttttatgaatggcgtttccgtaaagacgatcaaggtaaggatcaagaaaccgattttgtattaaatgttgaaccttggagggaagctgaaatattggttgttactggtgacaatttcggatgtggttcttccagagaacacgcaccatgggctctaaaagactttggtataaaatccatcattgcaccttcttacggtgatattttctacaacaactctttcaagaacggcttattacctattagattggatcaacaaataatcattgacaaattgatccctattgctaataagggtggtaagctctgcgtcgatttaccaaatcaaaaaattttggattccgatggcaatgtgctcgttgatcattttgaaatagaacctttcagaaagcactgcctagttaacggtcttgatgatattggtattacattgcaaaaggaagaatacatttccagatacgaagctttgagaagagagaaatactcattcttggaaggtggatcaaaattattaaaatttgacaacgttccaaaaagaaaagctgttacaactactttcgataaagtccaccaggattggtag

SEQ ID NO: 76676 - DNA, 87 bp, Saccharomyces pastorianus
atgctcccctccattagtttcgattatataaaaaggccaaatattgtgttattttcaaatgtcctatcattatcttctaacatctaa

SEQ ID NO: 76677 - DNA, 378 bp, Saccharomyces pastorianus
atgatggaaaaggaaggaaaaaaacccgaaaggcatatggataacattctgaaaatgtctattcctgtcaaaagcatgtcagaggtctcgaggcctggaagtgccgcattgggaaatacagatgcaatgcgcgcgagtttacgaaattctcgcaggagtttctccggccatgtgcggctggttctacgtctcgtgtatgggtttatttctgcggtaattatcgccggatctccgcttcgagaccgggtttgttttcaaattaccggaaaaggtcaggcaaaacagagtgatgtatgggtgatcccagcaatgcctgtttatgtttctccgtttcaggaagcttgttttgttttttccccgccagcgatggtgacgtaa

SEQ ID NO: 76678 - DNA, 111 bp, Saccharomyces pastorianus
atgctaatcttcataattcattatcatcgccacctggcattgcatttaatgggcgccttccaaaaacattcaaatagtatcagcccccccccaaggaaaggctttatttga

SEQ ID NO: 76679 - DNA, 840 bp, Saccharomyces pastorianus
atggtagacttgacaattacgggtgatgatgatgatatattgagtatgttttttgatgaggagttcgttccccatgcatttgttgatatactcttatcaaatgccttaaacgaagatcagattcaaacgcaatcagtatcctcattgctattaaccaggttggatttttacacaaagaaccttacaaaagagttggaaagcaccatatggaatttggataaattatctcaaacgttaccaagaacttggacatcttctaggtatcacaaagaagcagaacagaacgattcctcattgtattctactgaatccttaaaatcatcgaagcttgaatattacttagatacgttggcaagtgctgtaagagcattagaaacaggaatgcataatgtaactgagaaactaagcgatctagataacgaaaataatcacaataccaatgtgaggcaacaactgcaaagtttaatgttaattaaggagagaattgaaaaagtggtatattacctggaacaagttaggaccgttacgaatatttcgacagttagagaaaataatacaaccagcacggggacagatctttcgataacagattttagaacatcactgaaagcattagaggatacaatcgatgaatctttaagctctgcgattgataacgaggctaaagatgaaacaaacaacgatttgataggaaaaattgactcactttccgaactgaaggtcttgtttaaaggcctggataagttctttgctgagtacgtcaccttttcagagagtataaaatcaaaagcacaaagttatttatcaaccaaggatattgacgaagagctaatttcttga

SEQ ID NO: 76680 - DNA, 1701 bp, Saccharomyces pastorianus
atgtccacaaacctgaacccattcatgaataatacgccttcctcctccccactcaagggttctgaaagtaagagggtatcgaaaaggccaatatctagttcttcgtccgcctcactattatcatctccctccaggcgatcgaggccgtctacagtatatggtgataggtatattccttcccgaacagatatagatttcaattccatcgtttccatcagtagtatgacaagtgttccagcccttaatccatcgagtacggaagatcaagtagaataccaaaaggaaagacaggcacatgaaacttataatactttgctgaagaatgaactttttggcgagatgctaagcaaggatacggtaggctcagagagcagtatagatcgcattaagaatacgagaccatctactagaggcaatgtgcacacagaaaatacaactagacatggttatgaactggaacgagtatcaaccccacctcctgaagctgctggtttagaggaattttcgccacattccacgccagtcactcctcgacgtctttttacatcacagcaagatgaaatcacgagaccctcaagcaactcagttaggggcgccagcctgttgacttatcaacaacgtaaaggtagaagactatctgcggcctctttgttacaatctcaattttttgattccatgtcgccagttaggccggattccaaacagctcctattatcaccggggaagcaatttagacaaatagctaaagttccctatagagttttagatgccccatcattagcagacgatttttactacagcttgatagattggtcaagtactgatgttttggcagttgctcttggaaaatcgatttttttaaccgataataacactggcgacgttgttcacttatgcgacacggaaaacgaatacacaagcttaagctggattggagcaggctctcatctggcagtaggtcaagcaaatggacttgtagaaatttatgacgtaatgaaaagaaaatgtattaggacgttgtcgggacatattgacagagtagcgtgtttatcttggaataatcatgttttgacgtctgggagtagagatcatcgaatactgcatagggatgttaggatgccagatcccttttttgaaactatagaatcgcacactcaggaagtctgtggcctaaagtggaatgtagcggacaacaaacttgcctcaggtggtaacgataacgtcgtccatgtttacgaaggaacgtcgaaatctccaatcttgacgtttgacgaacataaggctgctgttaaggcaatggcctggtctccccataaacgaggtgtgctagctaccggtggtggtacagcagatagaagactaaaaatctggaacgttaatacgtcaataaagatgagtgatatagatagcggctctcaaatatgtaatatggtatggtcaaagaatactaacgagcttgtgacatcacatggttactcaaaatataacttaaccttgtgggactgtaactctatggatccaattgcaattctgaaaggtcatagtttcagggttctgcatttaacgttatccaatgatggaaccacggtggtttctggggctggagatgaaacattgcgatattggaaactttttgataaaccaaaagcgaaggtacagccaaattcgttaatatttgacgcatttaatcaaatacgttag

SEQ ID NO: 76681 - DNA, 651 bp, Saccharomyces pastorianus
atgttatcacactacatcttcctggcattcgttttattaccattcagagtttccgcgttttacttctatggttatggtggagacagaaaatgcttcctgaaggaactgtccaaagacactcttttaaaaggttcttacaatttggaagtttacgatgataagttggcagattatgcgcttcccagttataatgactatggcattgtcatagatgtggaagaagtctttgataataatcatagggtagtccaccaacagggctctccttccggtgacttcagctttctagctttggaatctggagaatataagatctgtttacagtctagggtaaataactgggtagggaaaactaaaacaaagttagaaatcgaatttgaagtcggttttgaagcaatgttggacatgcaaagaaaagaaaccttggaaagtttgcacggaaaagtcagtatattgaattctaagatcgtggatatcaggagagagcaacaactgatgagagaacgtgaagaatcctttagagacatatccgagtctgtgaattctcgcgcaatgtggtggacggtaactcaagttactcttctcattataatttgtgtatggcaaatgaaaagtttacgctcgttttttgttaagcagaaagtattatga

SEQ ID NO: 76682 - DNA, 1050 bp, Saccharomyces pastorianus
atgtcaaagatagattcagttttaattatcggtggttctggttttcttggattgcacttaattcagcaattttttgatattaatcctaagccagacatccacatttttgatgttagagatctccctgaaaaactttcaaaacagtttacttttaatgtagacgacataaaatttcataagggtgatttaacatcacctgatgatatggaaaacgcaattaacgaaagtaaagcaaatgttgttgttcattgtgcttctccaatgcatggtcaaaatccagatatttatgacatagtgaatgttaagggaacccgtaacgtgatagatatgtgcaagaaatgtggcgttaatatacttgtatatacttcctctgctggtgttatttttaatgggcaagatgtgcacaatgcagacgaaacctggccaatcccagaagttcctatggatgcgtacaatgagactaaagctatcgccgaagatatggtcttgaaggcgaatgatccaagcagtgatttctatactgttgctcttcgtccagctggtatttttggcccaggtgataggcaattagtacctggtctaaggcaggttgcgaaattggggcagtcgaagttccaaattggtgataataacaatctatttgattggacttatgctggaaatgttgctgacgcgcatgtgttagctgcacagaaacttctcgatccaaaaacaagaactgctgtctcgggtgaaacttttttcattaccaatgatacccccacctatttttgggccttggcccgtactgtgtggaaggcagatggtcatattgataaacatgttattgttttgaaaaggccagttgcaatttgtgcaggttatctttcagaatgggtatccaagatgctgggtaaagagccaggtttgactccattcagagtcaagattgtgtgtgcataccgttatcacaacattgctaaggccaaaaagttgctaggctacacaccaagagttggtattgaagaaggaattaacaaaacgttggcctggatggacgaaggtttgtaa

SEQ ID NO: 76683 - DNA, 1431 bp, Saccharomyces pastorianus
atgtcatcatcagacatctttgatgtactaaacattaagcaaaaatccagaagtccaactaatggccaggtatcagtgccttcgtcctcggcagccaaccggcccaagcctcaagtgacgggcatgcaaagagaactatttaacctgctaggagagaaccaaccccccgttgttattaagtctggaaataactttaaagaaaaaatgctttcgacgtccaagccatctccttggtcatttgtagagttcaaagctaatagctctgtgactctgcgtcattgggtcaagggttccaaagaattaataggagacacaccaaaagaatcgccatattctaagttcaatcagcatttatctattccatcattcaccaaggaggagtacgaggcttttatgaatgaaaacgaaggaactcaaaaaagcgtagaaagtgaaaaaaaccataacgaaagctttactaatgaaaagaaggatgaaggtaaaaatagctggtcttttgaagaaatagaatacctgttcaatctctgcaaaaaatacgatttacgttggttcctgatctttgacagatacagttataataattcaagaacacttgaagatctcaaagaaaaattttattacacctgtaggaattattttaaagcaagtgatcctagcaatccgcttttatcttctttgaatttttcagctgaaaaggagatagagagaaaaaagtatttacagcgtcttctttctcgttctgcagcagaaattgctgaagaagaggcactcgtagtagagtccaaaaaatttgaaatggctgccaagagaacacttgcagaaagagaatcattactccgactgttggactcgccacattcagatcagacaattacacaataccttacctctcagggaatgtctcagttatataacgcgcttctagcagataaaactagaaagcggaagcacgatttgaacatccctgaaaatccttggatgaagcagcaacagcagtttgcccaacataggcaacttcaacaactgaatgtaaaaaagtcagaagtcaaggaaaatctctcccccaagaaaaccaaaagacaaagacaggaaatgcaaacggcgctcaaaagaaagtcagaaagcgcatatgcagaacaattgctgaaagatttcaattcagatgaaaggaaggctttaggtgtgattacgcatggtgagaagctatcgccgggtgtatacttaagatctacaaaattatcaaccttcaaacctgcgctgcagaacaaaattctcgccattcttcaagaattatcgttaccttctcgccctgtgatgccctcatttgatgtaatggaaagacaagaggagcttttgaaaaaaatcaatacgcttatcgatttaaaaaaacacgttgacaaatacgaagctggtatgtcaatcaccaagtga

SEQ ID NO: 76684 - DNA, 1389 bp, Saccharomyces pastorianus
atgagcgaaataaataatgaaaatctggagccaaccccaagtacagtagctgagtctacagaaagcaagaataaacacattcgtagcgctttaagaaaacgaagaggtaaattaagcgcccaaacttatgaggaagatcaagaggctattttatcatctcctttattgacttcaacacctaaaacagtctccaggtcattagtgaggttatacccatatttaattgttgtggataactttctaagtatcatcacttggtccaatgacaatgtctctgcaaacttgcttggaatattcttatttacggtttgtgttctatattttggatttattacaaggtattttggacatttaatgatcgttggtataatatgggtatatcttttaattgacaagcacgttcaagaaacaatggcatcttgcccttcattggatgatataatacacgttatggatagggtttctatgaaatctagcgctgtgttatctcctattacgattttgagcgctcaggatgttagaagactgttatttaccattgccttcctatccccagtttacatttttctaacagtgtttgtgctatctccaaactatttaatgttaatagggggtctgtatgtgcttacgtaccattctaaactaatccgaagaatgagaagatacttgtggaaatttcgcgttgttagattacttgtatttttcataacaggattggaccttggtggaccagataataataggcgcctgtttgcttctgtcaataagaaaataaggtcctttgtttggaatgaggtagggaacacatctaacactaaaaagactgtacttttcaaggttgctctgtttgaaaaccagcgccgctggcttggcatcgggtggacatcaactatgttgagttatgagcgcgcatcttggacagatgaattcctaaatacttctccaagcccagaagtgtttactttaccagaggagcagtcgggaatggcttgggaatggcacgataaagattggatgcttgacctaacaaatgatgggatcattcaacttcctgcttctgctgctaagacaaaagttaagccaggtgcagatgaaggtttcatatattatgataacacctggaataatccctctgcaacggacacatataaaaagtacacaagaagaaggaggtggatcaggactgcaacagtaacaacaacgtatgacgatgagcccactgtagaaaaacctacaccgaattctcatgctctgaagagtgaagaaaataatagagttagaaaaagaaaagtgtcatttagtacagcaaatgaagtgcatatcataccttcctcggacagtagcaaattaatacaaatatctgatgtttcaatgtctccttctctataa

SEQ ID NO: 76685 - DNA, 972 bp, Saccharomyces pastorianus
atgacggtaaacttagatccggataaagtttggatagacggctgctttgatttcacacatcatgggcatgcgggagccattttgcaggctcgtcgaacagtttcaaaagaaaatggtcaactattctgtggtgtgcataccgatgaagatattcaacataacaaaggaacaccagtaatgaactcctcagaaagatatgagcatactagatcaaataggtggtgttcggaagtggttgaagcggcgccatatgttacagatcccaattggatggataaatatcagtgccaatatgttgttcatggtgatgatatcaccttagatgctaatggagaagactgctataagttggtgaaagagatggggcgcttcaaggtagttaaaagaacatatggcgtaagtactaccgagattatacatagaatattgacgaaaaaatctttgccaccgactcatcctgattattatcccaccacccaggaattgagtttctattctgtcgcccaagatgccgtttcaaaacattgttatgtctttcagagggatttggacaatgtcttggtcaatggtggatacaaattcgatgcagaagattgtgtttatgttgacggggattttgacttattccatatgggggatattgatcagttaagaaagctgaaaatggatcttcaccccgataagaaattgattgttggtattaccacaagcgattactcgagtaccattatgacgatgaaggaacgcgtcttgagcgttttaagttgtaaatacgttgatgccgttattatcgatgctgacgccacctcaatgtctcagtataactgcgagaagtatcatattggcacggctgtcctcactgctgccggaaaattcagtgaatacttgactaaagagcttattgtgaagagggtggaatcgcaaagggaggtttacattgcgaggaaccaaaaaaagggaatgtccatataa

SEQ ID NO: 76686 - DNA, 255 bp, Saccharomyces pastorianus
atgacgagaacaaacaagtggaccgaacgtgaaggaaaggctgatccaaagtacttttcgcacactggtaactacggtgaatctccaaatcacatcaagaagcaaggttccggcaagggtaattggggtaagccaggcgatgagattgatgacttaatcgatagtggtgaaatacccccagtgttcaagaaagatagaagaggctcaaatttgcaatcgcatgaacaaaagtttgaaaacgtccaaaaggaatga

SEQ ID NO: 76687 - DNA, 1956 bp, Saccharomyces pastorianus
atgggattaaagaaattttttaagattaagcctccagaggaagcgacaccagaacagaacaaggatactttgatggaactgggtattagtgtcaaaaaccctagcaagaaaagaaaagagaaatttgccgcctacggtaaatttgcaaatgataaagctgaagataaggtatacgcgccaccaggttatgagcagtatgctaggccacaggatgaacttgaggatttgaatgcttctcccttagatgccaatgctaacgaggcaactgctggttctaatagaggttcaagtggcacgcaagatctcggaaatggagcagaatccaattctatgcaagatccgtacgctatcgaaaatgatgattaccgatatgatgacgatccttatgcaaggtttcaagctaataaaagtaatgggagaggtagcgtcaatgctgcgccttatggtgactatggaggggggtacaatggcacatctctgaattcatataataacgatggcccgtatagtaaccaaaatacttcaaacagctgggtgaatgcgaatggccgtaatagtttaaatcattcaaacagcactttaaacgcagggccttcgaggcaaacaaggcaaccgccggtttcaacgtcgaccaacagcttatcgcttgaccaaagaagtcccttagcaaacccgatgcaagaaaagagaaatccttacgctgatatgaatagttatggcggggcgtatgactccaatactaatagaactagcggtactcgacaaggaagctccaggaatgcaaatccatacgcctctatggcgaacgactcatatagtaatggaaatttgaacaggtctgcaaatccatattctagtagaagtgtgcgtcaaccgcaatcgcaacaagctccaatgacttatacgccctcttttattgcttctgatgaagcagcacgcaatagtgaagttgatttaaatgaagaacctagaacaggtgaatttgattttgaagaagtttatgctgacaagtctgcagaaaatagagcggcattagatgagcctgatttgaatgcagtaatgacgaatgaagattctatagatttaaatgcgtccgaagttgatcatcgttcaagacagcagcagcagcaacagtggttcatggatgagcagcaacagcaacagcaacactttaacgcaacaaataaccaatatggagatcaaaggggttacaaaacatttgaagaaatacaaaaagaagaggaggctcgccagcagcaggaagaagatgaagcagtagatgaaatcaagcaggagatcaaatttacgaaacagagttccgtagcctctactagaaatacactaaaaatggctcaagacgccgaaagagcaggtatgaacacattgggtatgctgggtcatcaaagtgaacaattgaataacgtagaaggaaacttagatttaatgaaggtgcaaaataaagttgcagatgaaaaagttgcagaactaaaaaaattgaaccgtagtatattggctgtccatgtttctaatccgtttaattccaagagaaggagaagggagagggaagagcagctgaagaataggaaaattgaagaaaaattaatgagagagcaaacaagtcaacaattgtctcagtccactcaaagaatagagggtgctatgaacgcaaataataacataagtgaggtgcgggaaagatatcagaggaagaatgttctagaaaaggcaaagagatatcagtttgagaatgatgaagaagatgacgaaatggaattggaaattgataggaatttggaccagattcagcaggttagcaacagattgaagaaaatggccttgaccactggtaaagaattagactctcagcaaaaacgtctcaacaacattgaggaaagcactgacgatctagatatcaatctccatatgaataccaacaggttggcaggtatcagatag

SEQ ID NO: 76688 - DNA, 1188 bp, Saccharomyces pastorianus
atggatcccaccaaagcacccgattttaaaccgccacagccaaatgaagaactacaaccaccgccagatccaacacatacgataccaaaatctggacccatagttccatatgttttagctgattataattcttcgatcgatgctcctttcaatctcgacatttacaaaaccctgtcgtcaaggaaaaaaaacgccaactcaagcaaccgaatggaccatattccattaaatactagtgacttccagccactatctcgggatgtatcatcggaggaggaaagtgaagggcaatcgaatggaattgacgctactctacaggatgttacgatgactgggaatttgggggtactgaagagccaaattgctgatttggaagaagttcctcacacaattataagacaagccagaactattgaagattacgaatttcctgtacacagattgacgaaaaagttacaagatcctgaaaaactgcctctgatcatcgttgcttgtggatcattttctcccataacatacctacatttgagaatgtttgaaatggctttagatgatatcaatgagcaaacgcgttttgaagtggttggtggctatttttctccagtaagtgataactatcaaaagcgagggttagccccagcttatcatcgtgtccgcatgtgcgaattagcatgcgagcggacatcatcttggttaatggttgatgcctgggaatctttacaatcaagttatacgaggacagcaaaagtcttggaccatttcaatcatgaaataaatatcaagagaggtggaatcatgactgtagttggtgaaaaaatgggcgtaaaaatcatgttattggcaggcggtgatcttatcgaatccatgggcgagcctcatgtgtgggctgattcagacctgcaccatattttgggtaattatggatgtttgatcgtggaaaggactggttctgatgttaggtccttcttgctttcccatgatatcatgtatgaacacagaagaaatatccttattatcaaacaacttatttacaatgatatttcctctacgaaagtgcggcttttcatcagacgtggaatgtcagttcaatatcttcttccaaactctgtcatccgttacatccaagagtataatctatacattaatcaaagtgaaccggtcaagcaggtcttggatagcaaagagtga

SEQ ID NO: 76689 - DNA, 327 bp, Saccharomyces pastorianus
atgttaggtccttcttgctttcccatgatatcatgtatgaacacagaagaaatatccttattatcaaacaacttatttacaatgatatttcctctacgaaagtgcggcttttcatcagacgtggaatgtcagttcaatatcttcttccaaactctgtcatccgttacatccaagagtataatctatacattaatcaaagtgaaccggtcaagcaggtcttggatagcaaagagtgagtttattacaactttgatactgcagcagttcaaatttaccactttcctcttcaaggtgcatagaaaaaaagttcctggatgcacgatttaa

SEQ ID NO: 76690 - DNA, 1182 bp, Saccharomyces pastorianus
atgtcctgttctcaaaataagacttctgtcagtctggcctggcgtgaatgcatatccatcgcttccgtcctaattggcgcgtatgcatcatacagatactataagttgttcaaaacacgcgatattccacgtccaaaagaaggcattgaagaactcataggaaacactcctctggttaagatcagatctcttaccaaggctactggagttaacatttacgctaagttggagttatgcaacccagcaggaagtgctaaggatagagtggctttaaacatcataaagacggctgaggaattaggcgagctcgtcagaggtgaacctggctgggtatttgaaggaacaagtgggtcgactggtatctctatagcagtggtctgtaatgcgttgggttatagggcacacatttctttgcccgatgacacatcgctagaaaaattggcattactagaaagcctcggtgctactgttaataaggttaagcccgctagtattgtcgatccaaaccaatacgtaaatgccgccaaaaaggcatgtaatgaactaaagaagagtggtaatggaataagagcagtttttgccgatcagttcgaaaacgaagccaactggaaagtacattaccagaccacaggcccagaaattgcccatcaaactaagggaaatattgacgcattcattgctggttgcggtactggtggcaccataactggtgtggcaaaattcttaaaggaaagagcaaagataccttgccatgtcgttctagcggatccacaaggatctggcttttataatagagtcaactatggcgtgatgtatgactatgtagagaaggaaggtactagaagaaggcatcaagttgacactatcgtagaagggattgggttaaacagaatcactcataattttcatatgggcgaaaaatttattgatgaatcaatacgagtcaacgataatcaagccattagaatggcaaaatacctatcggtaaacgacgggctattcgtggggagtagtacagctattaatgcggtagccgctattcaggttgcaaaaacgcttcctcacggctcaaacattgtgattattgcatgcgacagcggttcaagacacctaagtaaattctggaaagaagctaaagaaatcgatcacgacgtatcattagaagaagtaataaatatctaa

SEQ ID NO: 76691 - DNA, 1863 bp, Saccharomyces pastorianus
atgagggatattgtatttgtatcaccgcagctgtatttgtcatcacaggagggttggaaaagtgattctgccaaaagtgggttcatccctatcctcaaaaatgatctacaacgttttcaggactcattaaaacatatagttgacgccagaaacagcttatcagagacactgctaaatagcaaggatgatgggagtatacacaattctgaccagaatactggtttgaataaagacaaagaggcttcaatagcagataacaatagtgctaacaagtgcgccacaagctcttcccgttaccaagagctcaaacaatttcttcccatttccttagaccaacagattcatacagtatctttacaaggtgtctcttcatcattttcccgcggacagatagaatcattgctagaccactgtttgaatttagcgttgactgaaactcaaagcaattccgcattgaaagtagaagcttggtcttctttttcttcgtttttagatacccaggacatttttataagattcagtaaggttgatgaagatgaggcatttgttaatacgctgaactactgcaaagccttattcgcgtttattagaaagctacatgaggatttcaagattgagttacacttggatttgaacacaaaagaatatgtcgaagaccgaacaggaactataccgagtgttaagccagaaaaggctagcgaattttattctgttttcaaaaacattgaagatcaaacagacgaaagaaattcaaagaaagaacagttggatgactcttccacacaatacaaagtggatacaaacactttaagtgatttgccatcggatgctttggaccaattgtgcaaggatataatagaatttaggacaaaagttgtcagtatagagaaagaaaaaaaaatgaaaagtacgtacgaggaaagtaggcgtcaaagacaccaaatgcaaaaagtttttgatcaaataaggaaaaaccactcaggagccaaagggagcgccaatacagaggaggaggatactaatatggaagatgaagatgaagaggatgacactgaagacgaccttgccttagagaagagaaaagaagaaagagacctggaagaatcaaatcgtagatatgaggatatgttacaccaattacattccaatacagagcctaagataaaatccattagggctgatatcatgagtgctgaaaactatgaggaacatttggagaaaaatcgctcattatatttgaaggagctattacaccttgccaacgacgttcattacgaccaccatagatctttcaaggagcaagaggaaagaagggacgaagaggatagagctaaaaatggaaatgcaaaggaactggcgcctatacaactatcggatggtaaggccatatctgcagggaaggctgccgccatcacccttcctgaaggcactgtgaagagcgagaactataacgcggacaagaatgtgtctgagagctcagaacacgtcaagatcaaattcgactttaagaaggctattgatcactcagttgaaagctctagcgaagacgagggatacagagagagcgagctacctccaacaaaaccctccgagagaagcgcggcagaggaccgtttgccatttacagcagatgaactgaacataagactaactaatctgaaggaatcgcgctacgtggacgaactggtgcgtgaattcctcggcgtctacgaggacgagctggtggaatacattcttgagaacatccgcgtgaaccagagcaaacaggcccttttaaatgagctaagggagactttcgacgaggacggggaaacgatagctgatagactgtggagtcgtaaagaatttcgcttggggacctga

SEQ ID NO: 76692 - DNA, 987 bp, Saccharomyces pastorianus
atgtcgagactagcgcataataaagcgctaccttataaaagaattgtcgatttatcattccatagaacgcgtttaccctcagatgtttcatcgctaataaaattcgagcaaagacctgcaattattaacatccatggccttttgggctcacacgtgatgtttcattctctcaataagcttctttcaaggaagcttgacgcggatattttttctgttgatgtaagaaatcatggcatttcaccaaaagcaataccttatgactacactacactgaccaatgatttgatttattttattgaaactcatattggcttggagagacctatttatttactgggattctctatgggtggtaaaattgcattattaaccacattgtacaagaatattaatatacgaaagtgtatatcaattgatttaccgccttatgaaaccccagaattagatcccatgatattacaaaactatgacttaataatgcggattatccgcagagatgtcaagattttaagaggttcccccagctggcagaaaaaagttcttgagcttttcaaaagtttggaatgtaataagaggaaatgtggtggagctgtggcactctactttgccaacggttttctttctgtaaaatccaataatgtacaccaagcacagttacactatgaacaacaacagcatgatccttatataaattactcaatgcctctctccagcatgccgaacctgttggatgaagtgaaaaaatggccggatctatcgaaccaaagggacttcttccaaaaaggcaccgccagtcgtaaagttttattcatgaaaggcctgcagtctaactttattaacaatgattattccctcctgaggtataactttccctgtgctgatgttcgagaatttaatactgggcataatttactgttggagaatccagaggactcattcaaatgtattttgaacttttttgcggaggagacgctggattttgaataa

SEQ ID NO: 76693 - DNA, 573 bp, Saccharomyces pastorianus
atgtccagattaagaagattcaatagaaagatcttaagcttgagttctgactacactcatgacggtgaatctgatcaagaagatgtatccatattaccattagatacagaagagcaggaagaactcatacaaaaatttgagactaatgctcacatcacaaataagctgtacataaacctgttaagcatattgtatttgctatatggcggactgctaatgatactcgtaagaaaatcgcgagggtatattaagttagcacttcttgctggcgctaattctttgatctgttcgtgcatcacacttagatatgatattgtaaacgactatcttttgttcaaaaagtttaagttaagagtgagcaatttttctattaacataataaacattattttgctagtacttatggcttggataagcttcaatcatgtggtcgaagataaaaaaacggtgctctgtttgcaagttccaatgtttttattctgggtcgctgtgcttgtgaaaagatgggctcgaaatatcgaagatgaaatcgcagatctaagatgcttgaaatacaaatacaaaaatgcttag

SEQ ID NO: 76694 - DNA, 894 bp, Saccharomyces pastorianus
atgtcgcatcaaatggcgccatggatacccatgtttattcaatcgtgcaaaaataacactgaaccgtttgtatcatttcaatttgctactgttgacgaactaacgaacaaaccacgttgtagaacggtagtgttcagagattttttatttcatgacaaaagaactaatgtgttgacttttaacactgatacgaggagctcaaagataactgaatcatttataactccaaattcaaataactctagcgacagcaaaagatgtgagactccatttttcgaagcatgtttctatttcccggaaacttgggagcagtatcgcttcagtggccaatgctttacaatatctaaacaatttaagaaaataccggctgagattgtaaccaagtatgatatattttcaccgcggttttcagagacaaatgatgacagtactgacgaagaaatagatactccaattaacgacgacgacgacaacgataaaaataatgacgccgacaataatgacattaacgaagataacaaacttatagaatccatagagaacgatgaacaccatgaggatgaagacgattactaccctcaaccacaagaatgggaggctgaattactaagacaatggtcctctctatcaaggcataccaagtcattgtataggaagccagccccgggccagaaacttacctctgaaactagcaaacaactggacaaactccatagaggagttgacggtgctaaagaggacgctggactggaaaactttggtattgtctgtctttgtgttgattctgttgattttttgaacttgaaagagggaagaggtggtgaaagatggattttccagaaaaccgacggcaaagacgaagatctgtgggaggaacaagaagtgtgtccgtga

SEQ ID NO: 76695 - DNA, 330 bp, Saccharomyces pastorianus
atgattgacatttctcacggacacacttcttgttcctcccacagatcttcgtctttgccgtcggttttctggaaaatccatctttcaccacctcttccctctttcaagttcaaaaaatcaacagaatcaacacaaagacagacaataccaaagttttccagtccagcgtcctctttagcaccgtcaactcctctatggagtttgtccagttgtttgctagtttcagaggtaagtttctggcccggggctggcttcctatacaatgacttggtatgccttgatagagaggaccattgtcttagtaattcagcctcccattcttgtggttga

SEQ ID NO: 76696 - DNA, 1416 bp, Saccharomyces pastorianus
atgtctatttgtgaacaatactacccagaagagccaaccaaaccaactgttaagaccgagtccattcctggtcctgaatcccagaagcagttaaaggaactgggtgaagtttttgacacaagaccagcatattttttggctgattatgagaaatctttaggcaactatatcactgatgtggatgggaacacatatttggatttgtatgcccaaatctcttcaattgcacttggttataacaaccctgctttgatcaaggcagcacaatcaccagaaatgatccgtgctttggtcgaccgtcctgccttaggtaacttcccatctaaggatttagacaagatattgaagcaaatattgaaatctgcgccaaagggtcaagatcacgtctggtcagggctttccggtgcagatgccaatgaattagcgttcaaggctgcctttatttattaccgtgccaaacaaaggggctatgatgccgatttttctgaaaaggaaaacttgtctgtcatggacaatgatgcccctggcgcccctcatcttgccgtactatcgttcaagagagcgttccacggtagattgtttgcctccggttccacaacttgttctaaaccaattcacaagttggatttcccagccttccactggcctcatgctgagtatccatcttaccaatacccattagatgaaaattctgatgcaaaccgtaaagaggatgaccgttgcttggccattgttgaagaattaatcaaaacctggtctattccagttgctgccttaatcatcgaaccaattcaatctgagggaggtgataaccacgcttctaagtatttcttacaaaagctaagagacattaccttgaagtataacgttgtctacatcatagatgaagtgcaaacaggtgtcggagccaccggtaagctatggtgtcatgagtacgccgatattcaaccacctgtggatttagtgaccttttccaagaaattccaaagtgcaggatatttcttccacgaccctaaattcattccaaacaaaccatacagacaattcaacacatggtgtggtgaacctgcaagaatgatcattgcaggtgccattggacaggaaatctccgacaagaagttgactgaacaatgttcaagagtaggtgattatttgttcaagaaattggagggtttgcagaagaaataccctgaaaactttcaaaacttgagaggtaaaggaagaggcacattcattgcctgggatttgcctactggtgagaagagagacttactattgaagaaattgaagttgaatggttgcaacgttggtggatgtgcagtccatgcagtgagattaagaccttcattaacattcgaggagaagcatgctgatatctttattgaagcattagccaaatcagttaatgaattatga

SEQ ID NO: 76697 - DNA, 357 bp, Saccharomyces pastorianus
atggctgagaaacgtactcttatagctgtgatagctgacgaagatactacaactggtttattgttagccgggattggacaaatcactcctgaaacccaagaaaagaacttttttgtttaccaagaaggtaagactactaaggaggaaatcactgacaagtttaatcacttcactgaagagagagacgatattgccatccttctaatcaaccaacatatcgcggaaaacataagagctagagtggactccttcaccaatgcgttccctgctattttagaaattccatctaaagatcatccctacgaccctgaaaaggactctgtattgaagagagtcagaaagttgttcggtgagtaa

SEQ ID NO: 76698 - DNA, 873 bp, Saccharomyces pastorianus
atgttggtaagaaataggtatctgggtgaactgctcaaaaactctcgatcgtttagtgtgctgaattcctcggtacgttcaggtcacaacaaatggtcaaccatcaagcacggtaaagccaagaatgatgcggaacgaaacaaaattaataacaagtttgcaaaccagatagcaatgtcagtcaagttaggcaacggtattacggatccgagcatgaatataagattagccaccagcatcgagctagcaaataaaaacaatgtcagcaaaaaagttattgagaacgccatccggaaagcttctggaagcagcgcatcgggcaaggactcaaacgcttctgagctatgtgtatacgagggaatggggcccggcggggtcgctatagtggtggaagcgctgacagacaacaagaacaggaccataggtctgataaggagtgcatttaataaagctaatggatcgatgactccaacgttgtttttcttcgacaaaaaaggatacgttacaatggtacctccgaagatgttagacactgaggacaaggtgctagaaagcgtactggagattcaaggcatcgaagacattgcgcctgtgcaggaagacgcagaagatttagagtgtgataccgaaactgaaactacaggccaaacttacgaggcggtgatggaacctgccgataccaataaggtggccgccctactgaaggagcgtggtttccacatcagagacttgggcatcggctacaatgccaagccggatatggaagttttcgtgcaaggcgatgaaacgctcgagaaactacagaaactgaccaccgcgctcgaggacatcgacgaagtgacgtcgttgtacactaatgctagcaacgcctaa

SEQ ID NO: 76699 - DNA, 330 bp, Saccharomyces pastorianus
atggacgaagaggaaagttctgaagataatgttgacgaaagagtaagcagtgaagaactttgtgggaaggaagtaaaggatattgaagctatactcggcgttgataaacttgcgctgctcgttgcatcggtactggacgtaaatgactcaactgcggaaagcgaagtgatggaaggagctgtgctcgatgttgtgctattagccggaaccaactcctgcgaaagaacacttagcggtagagttgttaacgccatgagaatcgttctccacatagataggcttgaagcagagctcttcttcctggtcggattgcagcttgccataccttaa

SEQ ID NO: 76700 - DNA, 714 bp, Saccharomyces pastorianus
atggcaaactctaaatttggatacgtaaggcaatttgaaacacacgatgttattttgcctcagtgttatattgtggtaagaatagacggcaagaagtttcatgaattttccaagttctacgagtttgccaagccaaacgatgaaaatgctttgaagttaatgaatgcatgtgctaagaaccttgtcctcaagtacaaaaatgatattatattggcgttcggggagagtgacgaatactcatttattttgaagtcaagtacaactttatttaacagaaggaaagacaagcttgcgactttatttggttcttttttcacgtccaattacgtcgcattatgggccaagtttttcccagaaaagccgttgaatatcaagcatttgccatatttcgattcaaggtgtgtagcataccctaatttacaaacgataaaagattatttatcctggagatatgtcgatacacatataaacaatctttataatacgacgttttggcagttaataataaagtgtggcttaactccccaggaatccgagaagaaactatgtggaacatttagtaatgagaaacaggaaatactattttctgaatgtgggataaactacaataatgaacctgaaatgtttaaaaagggttcactagtaacaagaaaaggagaaatacttcatattaacgtcatcgcacagatagatgagttgttcgaaggctattaa

SEQ ID NO: 76701 - DNA, 303 bp, Saccharomyces pastorianus
atgactggctatgagccctttaagtttttctctatccgcatgtcttcaattaattctccatcagtgatttttaaaacaataaaaactttcaatccgggtaaaactgaagaatatagagcgaaaaaagcgtatatgcaggacaagggatacttacgccaaaaaagaccatgtccattctattataggatacccacttgcacggcgtcaaagtactcaattggctgtgcttcttcaaaaaaactaacatacacaagaaccaaatttaaattcaacttggttacccaaagagagaattcattatag

SEQ ID NO: 76702 - DNA, 837 bp, Saccharomyces pastorianus
atggcgaagactatcaaagttatcaggaagaaggaccccaaaaagaagaacctatccgatcctttagcaaaacaaaaactagtttggaaaatcggacacgttttaactttagtttttggtttattattttctatcacgtatttctaccatgtcctaatcttcttcaaatatcgttcctggaagtggttgttcttaagggtcaataaaaattactcgtttattcaaagtaagagatggtacatgaaacttttgagttggagcccacaggtaatgtaccgtttgtcattaattggcgtatttatgtctgagtccgtcacaatgcaacagaactgggttggacttaaccctacttggaatgaccttttgtcctctgagaactttcatacccttttgattgcctgtttatggttctttggtggtggtaagtctttttacaagattttgccttacatgattttaagttatctacacctaactaaaatgaactacgaattgaatgctaacaaagaagaaaagatccctttaacacccaaagacagaaaaatgctacacttacttgcgtactctgaattacttgttatcttagcgctaacactagacactatattgtttaagacgggtacatccggatttatgctcgttatttatgttggtatttattggttgaggttgaacttctctccatacgcacaagtggctgttttggagttacttgtcaagtttgaaaaatacgtccccaaaaaatatagagacaaatggcaggttataaagaaccttatttatatgaaaatgaaggagcacgaaaagagaacagaagaagttgccagatacgcgtaa

SEQ ID NO: 76703 - DNA, 327 bp, Saccharomyces pastorianus
atgcctccaaagcaacaattatctaaagctgccaaagccgctgctgcccttgctggtggtaagaagtctaagaagaagtggtccaaaaagtccatgaaagacagagctcaacacgctgtcattttagaccaagagaagtacgacagaatcttgaaggaagttccaacttacagatacgtttctgtctctgttttggtcgacagattaaagattggtggttctttagctagaattgctttgagacacttggaaaaggaaggtatcatcaagccaatctccaagcactccaagcaagccatctacaccagagctactgcttctgaataa

SEQ ID NO: 76704 - DNA, 1089 bp, Saccharomyces pastorianus
atgtctcgcaaatttgatttaaaaacgattactgatctttccgtcctagttgggactggcatatcattatactacctggtcagtcggctactcaacgatgttgaatcaggaccggtatcaggtaaatcaagggaatcaaaggccaaacagtccttgcaatgggaaaagctggtgaaaagatcaccggcattggcagaagtaacattagatgcatatgaaaggactatattatcttctatcgttacgccagatgaaataaatattacattccaggatattggtggcttagacccgcttatttcagatctacatgaaagtgtcatatatcccttgatgatgccagaagtatattctaatagccctttacttcaagcacctagcggtgtcttgctatatgggccaccaggatgtggtaaaaccatgttggcgaaggccctagccaaggaaagtggtgctaattttatctcaataagaatgtcatctataatggataaatggtatggtgaatctaacaaaatagtcgatgcaatgttttcattggcgaacaagttacaaccttgtataatattcattgacgaaattgattcattccttagagaacggtcttctacagatcatgaagttacggcaaccttaaaagctgaattcatgactttatgggatggcttattgaataatggaagggttatgattatcggtgctactaatcggataaatgacatagatgatgcgtttttgaggaggttaccaaaaaggtttcttgtttcattgcctggttctgatcaacgttacaaaatattaagtgttttattaaaagacactaaactagacgaagacgaattcgacttgcaactgattgcagacaataccaaaggattttctgggtcggacctgaaagagctttgcagagaagcggccttagatgcagcaaaggaatacataaaacagaagaggcagctcattgatagtggtacaatcgatgttaatgatacttcttccttgaagataagaccattaaagacaaaagattttacaaaaaaattaagaatggatgctacaagtacgttgtcatctcaacctcttgattaa

SEQ ID NO: 76705 - DNA, 477 bp, Saccharomyces pastorianus
atgatcaatggggtatattacaatgaaattagtagagatttggatatctcttcctccactcaatgtcttcggtttctcaaagaaacagttataccatccttagcaaataatggtaacaacagtacatcaatacagtatcatggcatatcgaagaacgataacattaagaagtctgtaaataagttagataaacaaatcaacatggcagatagaagtttgggtctacaacaagtagtttgtatattctcttacggtccacatattcaaaaaatgttaagtattttggaaatatttaaaaagggttatattaagaacaataagaaaatttatcagtggaataaattaacatcgttcgatataaaaagagaaggcagaaatgaactacaggaagaaaggctcaaggttccaattttggtcacccttgtttctgactcagagatcattgatttaaacctacattcattcaccaaacaataa

SEQ ID NO: 76706 - DNA, 1029 bp, Saccharomyces pastorianus
atgatgatactgggtaaagccgggatcctggcacagtatgggacaatatatgtgagacaaaataccattcggaataatttaagttcctgcatttttaagcagtcactatgtgcctttcattcattagcaaaggtgctgcaacaaaagcaagtcccactggacctttcatatgacataatcaagagagatgcagtaaaaactggggatgaagggaagccaagaccacctattatcatacttcacggcttattcggtaacaagctcaacaaccgaagcattggccgtaaccttaacaagaaattgggaagagacgtgtatctgctggacctaagaaatcatggatcctcaccacacagttcagtccataactacgaagtcatgtcggaagacgtgaaacactttatcacaaagcacgaattaaacaccaatggaggccctattataataggacactcaatgggtggtaaagttgccatgatgctggtcctgaaaaacccgcaactttgttcgatgttagtctgtatagagaacgctccggtgagtttgcgccctaacgctgagtttgtcgaatacatcaaagcgctgatggaaatcgtcaacgacaagggcaaaactatccgcacgctgaaacaggctgatgaacaccttgcagagaggatcggcggcaatgagctagtaaggcggtttctcctaacggcgctaaaaaaggtcaagatggacaattcatcgtttgtgtcgtcatatacattcgaagaacgaattcccctcgcaacactgaaagatgccattgtcaaaggtgaaattgccgcgtggcccctagatcctgctcgtgaacgatggacgcggcctgcgctattcatcagggctactcaatcgcattatgtggtagacgagtatcttccgatcatcggcgcgttctttccacgctttgaaacacgtgacatcgatgcgggtcactgggtaaatgcggagaagcctggggaatgtgccgaaagcatcgtcgattttgtggagcggcacgaggattaa

SEQ ID NO: 76707 - DNA, 492 bp, Saccharomyces pastorianus
atgaatagcgcaggccgcgtccatcgttcacgagcaggatctaggggccacgcggcaatttcacctttgacaatggcatctttcagtgttgcgaggggaattcgttcttcgaatgtatatgacgacacaaacgatgaattgtccatcttgaccttttttagcgccgttaggagaaaccgccttactagctcattgccgccgatcctctctgcaaggtgttcatcagcctgtttcagcgtgcggatagttttgcccttgtcgttgacgatttccatcagcgctttgatgtattcgacaaactcagcgttagggcgcaaactcaccggagcgttctctatacagactaacatcgaacaaagttgcgggtttttcaggaccagcatcatggcaactttaccacccattgagtgtcctattataatagggcctccattggtgtttaattcgtgctttgtgataaagtgtttcacgtcttccgacatgacttcgtag
